United States Patent Application Publication US 2020/0377945 A1 - sequence listing, part 58

SEQ ID NO: 12854 - DNA, 3903 bp, Unknown
  gut microbiota DNA sequence
ccgtgcagttggaagagttcgggatgaatgtagaaagagttgtggatggaaagaatgctgttgagattttcagaaatcatccgaagggcacgtttgatgtaatcctgatggatatcatgatgcctgaaatgaatggttatgaagcgacaaaagcaatcagggcaatgaatgacagaccggatggaaaaagcattcctattatagcaatgacagctaatgcatttgcagaagatgttcaggcatcactggatgcaggaatgaacgcacatttgtcaaagccgattgtgattgatgaagttataaaaacgattttaaggtatatataattgattagcagaggttcatgaattagtggaataaaattgacaggaggactaaagtttgacaatgtgagagtgcagtgttatggaaactacaaaaaatggatgtgttatggagatgccctaaatgtaacggagaatacaggtattcgattgcagaacgaaaagtgggagatgattcgtgcccatactgccagggccggaaaagattcatttttctaatcagcagattggcatagcgcttgaagaatacagcaaaggcatgttataatgaacgaaatgaaacgttcaaaatagatgaaacgttcattttgaaaagcaatgcacgaaacgaaaaaacatagacggtatatagcttttcgggggttttagcgaaaagttcatatttttccggagttgaacgcgcggccgacgccccggagattgcgctgctctgagcacgaaaaaagtcgaaacggctacaatttaccgccaggacttgccagaaacgttccggatagagtataatagaggtactgtttataatgaaaaggatgaaaacacaacatggcttcttttcttgatatttttaagagaaacttctctcttttttcgagcgacatcggcattgatctcggcacggcgaccgttctcgtctatgtgaagggcaagggcatcgtgctcaacgagccgtctgtcgtcgcggtgaacaaggtgacgggaaagctcgtggcggtcggcacggaggcgcaggagaccctcggccgcacgccggacaacatcatcgccatccgtccgctgcgcgagggcgtcatttcggactacgagatgaccgagctgatgatcaaggagttcatccgcaaggtacagggattccgcctgttcaagccgaacgtcgtcatctgcgtgccctcgatcatcaccgaggtcgaggagcgtgcggtcatcgacgccggcacgcaggccggtgcgaagcgcgtgttcctcattgaggagccggtcgcggcggccatcggcgcgggtctcgacatcagcaggccgaacggcaatctggtcgttgacatcggcggcggcacgaccgacatcgcggtcatttcgctcggcggtatcgtcgagtccacctcgatcaagattgcgggcgacaagttcgacgaggcgatcattaaatatgtgcgccgcaagcacaacgcgctcatcggtgagcgcacggcggagcaggtcaaaaagaccatcggctgcgtctatccgcgcaccgaggaggagatcatggaggtcaagggccgctgcctgatgaccggcctgccgcgcacgttcacgctcagctcgtccgagatcctcgaggcgctcgaggaggtctcctccgctattgtcgaggccattcacggcgtgctcgagcgcacgcctcccgagctgacgggcgacatctcctccaacggcatcgtcatgaccggcggcggctcgctcatctggggcttcgacaagctcgtggcctccaagaccggcatcccgacgcgcgtcgcggacgaggcggtctcgtgtgtcgcctacggcacgggcaactgtctcgagaaccttgcgagtatgcaggacggcacgatcaatctgtcgcgcaagagacagatgcggtaacggcaggcatgatgaccgaacaggaaaaatacatgaaggcggcgctgaagctcgcgcacagggcggccgaggagggcgaggtcccggtcggcgcggtcgttgtctgcgacggaaagatcgtcgggcgcggccggaaccgccgcgagacaaagaaaaacgctctgcatcacgcggagatcgaggccatcgagaaggcctgcaaaaagctcggcggctggcggctgcaccggtgcgacctgtatgttacgctcgagccgtgtccgatgtgcgccggggcgatcatcaacgcccgcatcaaaacggtctatttcggcgcgttcgacccgaaggccggctcgtgcggctcgatgatcaatctgttttcgctgccgtacaatcatcagccggagctcatttccggcgttatggaggagcagtgtgcggacgagctgcgcacattcttccgggagcttcgaaagaagcgcaagctcatcagaaaagcacagaagagcgagaaagctgcggcggaaagcggagaatcgcagcaggatgcgttctgtgaaagagaaaagtagtaataagtggggttaaaaaacaaatgcaaagagaaagactcggttcgcgtctgggctttattctgctcagcgcaggctgcgccatcggcgtcggcaacgtatggaagttcccgtggatggtcggacagtacggcggcggcgccttcgttctgttctatgtgatcttcctgctcatactcggtctgccgatcatgacgatggagttcgcggtcggccgcgccagccagaaaagcccggtgcgcgcctatcaggtactggaaaagccgggcagcaggtggcatatccacggttatctggcgatgatcggcaactatctgctgatgatgttctacacgacggtctgcggctggatgctgcactatttctatctgaccgcagcgggcagatttgtcggagcaacgaccgagcaggtcggcgcggcgttcggtgaaatgctgtcccggccgggcgtcatggcgggctgcatgatcgcggtcgtcgtcatcggcttcctcatcaactcgttcggccttcagggcggtctggagcgcgtgaccaaggtcatgatgatcgcgctgctcgccatcatggtcgtgctcgccgtcaacagcatccgcaccccgggctcgagcgagggcctgcgcttttacctcattccggacttcagccgcatggcggagaccggtgtggcgaacgtggtcgtgggcgcgatgaatcaggcgttcttcaccctgtcgctcggcatcggcgcgatggcgatcttcggcagctatatcggcaagggacgcgcgctcatgggagaagcggtcaacgtcgccgtgctcgacaccttcgttgcgttcacggccggcctgatcatcttcccggcgtgcttcgcgttcgacgtatccccggacagcggcccgaacctcatcttcgtcaccctgcccaacatcttcaaccacatggcgggcggccgtctgtggggcagtctgttctttgtattcatggcgttcgcggcattctctaccgtgctcgctgttttcgagaacatcatgtcctgctgcatggatctgaccggctggagccgcaaaaagactgcggcgatcaacatcgttctgatgatcctgttgtccatgccgtgcgttctcggcttcaatgtctggagcggatttcagccgttcggcccgggctcgaacgttctcgatcttgaggattttctggtttccaatctgtggcttccgcttggctcgctcgtctatctgctgttctgcacctcgcgctatggctggggatggaagaatttccagaacgaggcgaacgagggcggcggcatcaaggtgcgcgacggcattcgcttctatgtgagctatatcctgccgctcatcgtgctcgtcatctttgtgctcggcatcaaggataagttttttgcgtaaataataaataaaaaaatgggtgcagta

SEQ ID NO: 12855 - DNA, 25511 bp, Unknown
  gut microbiota DNA sequence
caggcctgtcctgcctgtcccgacttcgtcggaatacggcaggaaaaagaaaagcacgccaaaggcgtgcttttttgcgcgcttcgcgcgctatttccgtccaatcttgccgcaggcaaggaggacggacaggcgcaccgcagtgcgccgcgttaaattctccaagaaagtcggggcgtgtacctgactttcttacctccgcccgcgccgcggcggcgcggcctcgtccgctgtgcggacgagagggggttatcgcccccggtttcgcaggaaccgggggcgtatctaagggggacagcgtcccccttagaatgatgccgttttacggcatcataattctgccttcgaactcggcgcggcgcttgatatccgccatgacggtatcgaactggtcgaggtcgagcgactgcgcgccgtcgcacagcgcgtgcttcgggtcgttgtgcgcctcgatgatcaggccgtccgcaccggcagcgatcgcggcgcgggagagcggctgaaccatgtcgcggcggcctgctgcgtgagacgggtcgatgatgatcggcaggtggctgaacatcttgacgagcggaacagccgacaggtcaaggttgttgcggattatcttttcgaacgtgcggatgccgcgctcgcacaggatgacctgcttattgccgccggcgaaaatgtactcggcagccatgaggaactcctccatcgtcgcggacaggccgcgcttgagcaggatcggcttgttgcagcggccgagctccttgagcagcatgaagttctgcatattgcgcgcgccgagctggatgatgtcgacgtccgcgaacaggtcgaggtgcttttcgctcatgatctcggtgacgatcggcaggccggtctggcgctttgcctcgagcagcagcttgaggccctcagcctcgagaccctggaacgagtagggggaggtgcgcggcttgaacgcaccgccgcgcaggaaggatgcgccggctgccttgacgcgctccgcgcactcgacgatctgcgcctcgttctcgaccgagcacggacctgccataacattgaagtagccggcgccgatcttgcggcccgcgacctcgatgatcgtgtcctcggggtggaatttgcggttgacggccttgaacggctcggtcacgcgctgtacgcgctcgaccacgtcatacgccataatgtccccttcatcgagccgggtcgtgtcgcccatcaggccgagaatagtggtatcctcgccctgggaatagttgatccgcagccccatatccttgaaatgctgcatcagtcgctcgacacgttccttgtcgctgttctgtttgagtacaacgatcatttcagttcactccttcacaatgtgataattttaatcgatctgctgcctgccgctttctcgtcggaagcaaacagcgtacattttgcagtataccatagcgggcggcaaaaagaaagagcgatttacgacaaatcgcccctgtcttttacagttcttttttacatggttgtgctgcgctaactctaatcttctgcgtcggcggctttgaggtctgtgtacttctgtttgacggcggcgcagaactcgtcccagcggccctcgttgatgagtctcgcggggcagaccttttccatgaaatcctgatgctttttgagcgccttgtccgggttcagattgtaggcaaggcacagctgcgcgcacagtttttccgtgttgatgagggtctgctcgtaatttccgccctcgttgacgcacatttcgatgccgatgccgttcatgttgccgccgtcctcggtcatcatgtcgccggcatggtaggcggtctcggtgtcggggaggtggtggtagatctggtggtcatccacggtgtagtgccacgaaacgatgccgttgtccgcgtcggcgttctgatggatgaaggaattgtgcgccgcggcgtccgcgccggcggagaagttgtcggtctcgtgaatgacgagatatttgatctcgcgcgtctgaccggggcgcgcacggctgccctcggggatgaagtcggtgtaaacggggatgccgtctatgtagctgaggttcgcgtcctgctgcggcgttttcgtgagcgcgcgctgggtgagcatgccgcccataaaggaaagcagcatgagcacggcgacggcgatcacggtgggatttactgtgcgttttcctttctttctgcggtgaaaagcggaagttttcaagcgttatctctctccaatcctgtcttgtaatcttattgtactacgatcggcgcggattttccacccgaaggggtgtaaactttttatgacaaaaaaagcaggctgcttttaccctcagcagaggggagaccctccgccgatacagcggcgtagccggtggaggcgacttgacgccccatggcttttaccctcggcagagggtgagcggttccgccgttccggcggcttgccgccgcaggcgagattggctgccgatgggcaggccgggcattgccgccgcccggcggcgggggcaagaggggaaagacaaccaaggttttctttcccctcttaactccccaaactttccctaggacgcgactccctgcggtcgcgcgtctaaaatgcgaggggcccacaggggcgtttggtgctccaagaggacacacttgatggaagcagagcttttcgcagcgacggcgttcgcgccctgcaccgtctggccgcgcactgttatgcgcggcggataacgcaagggaaattcagggcataacagcctcccaaaagctgcctgacgcacggaaccgagctcccgtaacccccgtttcgctgcgcaaccgaagggcgtcgcggcgcaaaggagggtttgggggagtcaagagggggcaagggaaccatacggtgcccttgcccccttttgcccttcgccgtgggcacggcgttcccccgccgccggtcggcggcaatgcacagccatgtcatggcgaatatcccccggcccgggagggtctgtctcgcctgcggcggcaagccgccggaacggcggaaccgctcaccctctgctgagggtaaaaaccacggcgcaccgccggatcggcggaaggtctgccctctgctgacgatcgggattttaaggatttgcaaagccttttacaaaggcttttcctgaaaagccttgcattccacccggcggtacgatataataaaactactcggagaggcaaagcctttaccagcagaatttctttgaccgccctttccctccggaaaggtgctaaggccatacggacagccgggtcaaatgccgaacatggcaactttgttgccttattgaatttttataagttggctgactaaaagccgtgtgccgcgggcgcatacacttgtgaaacaatcaataagagtagtaaaagtaacgattcttgctatatagactctttcctcttccacagacacgaaaaacagtgcggtcactccgcgcgagaagagaatgattgattttccccaaggtgaaagcgtgcccggtgcactcccttccatccggggatttttttattatttttgtgaggatatgatatggagaacaagctcaaactctacggctttaacaacctgaccaaggcgctgtcctttaatatttacgatgtctgctacgcaaagaccgagcgagaacagcgcgactacatcaagtacatcgatcagcagtacaactccgagcgactgaccggcatcatggaaaagctgaccgagatgatcggcgcacatgtgctgcacatctccaagcaggactacgatccgcagggcgcttccgtcaccttcctgatcgcggaggagcacatgaagccggcgctcgagccggataccatcgtggcgcacctcgacaagagccatgtcactgtgcacacctaccccgagtaccatccggatacctgccttgcgaccttccgcgtggacatcgacgtggccacctgcggcgagatcacgccgctgtccaccctcgactacctcatcggctcgttcgattcggacattatcacgatggactaccgcgtgcgcggctttacgcgcgatattgagggcaaaaagctgtttatggaccacaatatgacgtccattcaggactttatcgaccccacgacgctcgaccgctacgatgcctatgacatcaacgtgtatcaggctaacctgttccacacccgtatgctgctcaaggagatcgaccttcagaactacctgttcaacaccgacatctacgagctgccgcccaagacccgtctcaagatccactccgacctccgccgtgagatgatcgagatcttttcgggcaaaaacatctactgatttcgattgaaaatacattttcaatcgagaaagacaaaccgaacgatgttcggatttgtctcacaataaaatttgcgcgtcgctgcgcggcacacaaattttattccttgtataaaaaccgtgatacatgctcccggtttttatcaatctgctgcgcagattgtatttcatgcgcgcttcgcgcgaaagcgcagcatatcattctctgccgaaagaaggcatttctatggatcaatcccgtgcgcccatcatggaggcgctcgaaaacttcaaggatatgcgcattgtgccgttcgacgttcccggacacaagcgcggacgcggctcaccggagctgacaaagttcctcggccagcagtgcatgaccgtggacgtcaactcgatgaagccgctcgacaacctgtgccacccaacgagcgtcatccgcgaggcggaggagctggcggccgatgcgttcggcgcggcgcacgccttcctcatggtcggcggcacgacgagcagcgtgcaggcgatgatactctcggtcgtgaagcgcggcgacgagatcattctgccgcgcaacgtgcaccgcagcgtcatcaacgcgctcgtgctcaccggcgcgataccggtctatgtcaatccgcagatgaacgaccgcctgggcatttcgctcggcatgtcggtcgcggacgtcaaggccgccatcgagaagcacccgtctgcgaaggcggtgctggtcaacaacccgacctactacggcatctgctcgaacatccgcgagattgtcaagctggcgcacgcggcgggcatgaaggtgctcgcggacgaggcgcacggcacacatttctacttcggggagaatatgccggtctccgcgatggcggcaggcgcggatttggcatccgtttccatgcacaagtcaggcggctcactcacacagtcgagctttctgctgtgcggcccgtcgatgaacgcggagcacgttcgccaaattataaacctgacccagacgacctcgggttcgtatctgctgatggtcagtctggatatttcgcgcaaaaaccttgcgctgcacggaaaagagattttccgaaaagtcgttgacctcacgacctatgcccgcgaggagatcaaccagatcggcgactactacgcctacggcagcgagctcatcaacggcgacaccgtgtacgatttcgacacgactaagctcgcggtcaacacgctcgacgtcggccttgccggtatcgaggtctacgacatcctgcgcgattactacgacattcagaccgagttcggcgacctcggcaacctgctcgcctatgtttcggtcggcgacagagaacgcgacctcgaacgtctcgtatccgctctggcggacatccgccgccgctataagcgcgacaaggcgacgctcatgcggcaggagtatatctcgccgcaggtggtcgcggggccgcaggaggcgttctacgcggacaagaaggccatgccgctcgatgagtcggtcggccgcatctgcgcggagtttgtcatgtgctatccacccggcattccgatcctcgcgccgggtgagcgtatcacccgcgacattcttgattatatccgttacgccaaggaaaagaactgtatgctgctcggcaccgaggaccccgaggtgaacagccttcaggtcatccgcggcgtcatcagtccggaataaaaggagcgttttccctatgcaacttacttttaccgaaatgcacacgccgacggtcggacttcaaattcaggtggaccgtcagctgcataccgaacagagcgactttcagcgcatcgacgtctttgaatgcgaggaattcggccgctttctgacgctcgacggctacatgatgctgaccgagcgcgacgagttcatctaccatgagatgatggtgcacgtaccgctcgccgttctgggcgaaaaaatcaaaaaggtgctcgtcatcggcggcggcgacggcggctgcgtgcgcgagctgtgccgctacaagcacatcgagcacatcgacctcgtggagatcgacgagcgcgtcgtcgcggtctgcaaggagtatctgcccggcgtggcgtgctcgctcgacgatccgcgcgtccatatcctgtatcaggacggcctcaagtacatccgccgcatcgaggacgaatacgacctcatcatcatcgactcgaccgacccgttcggccccggcgagggcctgttcacgatggagttctacggcaactgctacaaggcgctccacgagcacggcgtgctggtcaatcagcacgaaagcccgttctacaagggcgatgcactggcgtgccagagagcgcaccgcaatatcgtccattcgttcgagctcagccgcctgtttcaggcgcacatcccgacctatccgtccggccactggctgttcggtttctcgtcccgcggcgtacatccggtgcgcgatctgaatccggactggtggaatagtctgggactggaaaccaaatattacaataccaatctgcacaagggcgcgttctatctgccgaactatgtgcagaagctgctcgaaaaagtagaggaatagtgttatccctttgcacattttatcattttgaaccatttaacaggaaacaatgaggaggaaacaaacatgggaagagcattgattatcggctgcggcggtgtagccggcgttgtcattcacaagtgctgccagaacagcgacgtttttgaggagatcatgatcgcgtcccgcaccaagagcaagtgcgacgccatcaaggagaagctcgacggcacgaccgcgaccaagatccgcaccgcaaaggtggacgcggacaacgtggacgagctgtgcgcgctcatcgacgagtacaagccggacatcgtcatgaatatcgctctgccgtatcaggatctcaccatcatggatgcgtgcctcaagtgcggcgtaaactacatggacaccgccaactatgagccggaggacaccgacgatccggagtggcgcgccatttacgagaagcgctgcaaggacgagggctttaccgcgtacttcgactactcctggcagtgggcgtacaagaagaagtttgaggaggccggtctgaccgcgctgctcggctccggatttgacccgggtgtaacgcaggcgtactgcgcttacgcacagaagcacctgtttgacgaaatcgacaccatcgacattctcgactgcaacggcggcgaccacggctatccgttcgcgaccaactttaatccggagatcaatctgcgtgaggtatccgcaccgggttcgtactgggagaacggccactgggtcgagattccggcaatgagcatcaagcgcgagtacgacttcgatcaggttggccacaaggatatgtacctgctccatcacgaggagatcgagtcgctcgcgaagaacatcccgggcgtgcagcgcatccgcttcttcatgaccttcggtcagtcctatctgactcacatgaagtgtctggagaacgtcggcatgctgtccaccacgcccattgagtttgagggccatcagatcgtgccgatccagttcctcaaggcgctcctgcccgacccggcgaccctcggcccgcgcaccaagggcaagaccaacatcggctgcatcttcaccggcaaaaaggacggcaaggaaaagaccgcctatatctacaacgtctgcgaccacgaggaatgctatcgcgaggtcggctcgcaggccatcagctacacgaccggcgttccggcgatgatcggcgcggcgatgctgctgaccggcaagtggaacaagccgggcgtgtacacggtcgaggagtttgatcccgatccgtacatggaggcgctgaacaagtggggcctgccgtggcagatcgacgacaagccggtgctggtggactgatatgagatttaccgatcttccgactccctgctttatcatcgacgaaaaccgccttgtgcagaaccttgcggtgctgcgcgacgtcgcgcggcgcagcggcgcgaagatcctgctcgcgcagaaggcgttttccatgttttcgacctatccgctgctgcgcgaatacctcgccggaacgaccgcgtccggtctgttcgaggcgcggctgggtcacgaggaattcggcggcgagacgcatgtctattcgcccgcgtacacgccggacgagttccatgaaatcctgaattatgccgaccacatcgtgttcaactcgttcacgcagtggaaaaagtacggaaatctggcgcgcgtggccggaaagagctgcggtctgcgcctcaacccggagtgctcgacgcagccggacgaccacgccatctatgatccgtgcggcccgacctcgcgtctgggcatcaccgaggcgaactttcagcccgacctgctcgacggcatcgagggtttccatttccacacgctgtgcgagcagaacgcggacgatctcgtgcgcacggtcgcggcgtttgaaatgcgcttcggccgctacatggagggcatgaagtggctcaatctcggcggcggccatcacatcacccgtgcggactacgatgtggacgcgctcgtcaactgcatcatctacctgcgcgacaagtacaaggtgcagatctatctcgagccgggcgaggcggtcgtgctgaacgccggctatctggtctcgaccgtgctcgagaccatgaaaaaccgcaaggatatcgccattctcgatacctcggcggcgtgccatatgccggacgtgctcgaaatgccgtatcgtccgccggtcatgcgtgcggacgagccggggtgcaaggcgttcgattatctgctgaccggccgcacctgtcttgcgggcgacgtcatcggcgagtattcgttcgatgtgccgctgatggcaggcgagcaggtggttttcgaggatatggcgctgtacaccatggtcaagaccaatacgttcaacggtatgcctctgccgctgatcgccgtccgccgtgcggatggcacggacgaagtcgtccgcatgttcagctatgaggatttcaaaaaccgcctgtcgtaaaaaaacaagacgaccgtctccaatccggaggcggtcgttttccataccctcggtataattatacgatttgcaatcatgaaatcttccgccgatacagcggtgcagccggtggaggcggctttacgccccatggccttcaccctcagcagagggtgagcggttccgccgttccggcggcttgccgccgcaggcgagattggctgccgatgggcaggctgggcattgccgccgtctggcggcggaggtgccggtgttcaccggcggggtacgccgtgcccacggcgaggggcaaaagggggcaagggcaccgtatggttcccttgccccctcttgactcccccaaaccctcctttgcgccgcgactcccttcggtcgcgcagcgaaacgggggaaacgggggctcggttccgtgcgtcggttcgcttttgggacgctgtcaggccctgaatttactttgcgtaaaccgcagcgctgtcagtgcgcggccagacagtgcagggcggcagctctccgctgcgaaaagctccgcttcgatcaagggtgtaaccttggagcaccaaacgtccctgtgggcccctcgcatttagacgcgcgaccgcagggagtcgcgtccaaaggaaggtaaggggagtcaagaggggacaggaaaccatgtttggtgtcctgtccccttttgttcccgccggtgaacaccggctctcccgggccgccgaaggcggccattgtgcacgctcactttgagcgtaaagtcgcctccagcggcgcgccgctgtatcggcggaaggtcaaccgtcagcagatggaaaagatttttaggatgccgtccggcagttacagatgcttcgacagaagctcccgatattcgtcctctgctcccggattgccgacaacggcaagcgacgcctgcgccgggtcgaagatccgccgcgccagctcaagaatatcatcccgcgttacgctgtcgtagccggcgagcacatcctcgatcctcgagacctcgccgcggatcagctcgctgcggccgatggtcatcatgcgcgtacccgtgctctcgagacccatgagcagcgtggtcttggcctgctcgcgggtacgggagatctcgtcctgcgccgggccgtcttcacagaactgatgcagctcctgcaaaatgcgctcgagcgcgcggcgctcggtctcctcgccgagaccggtgtagatcgacatcagacctgtgtcctgatgcggcgtggtgaatgtgtagatcgagtagcacagaccgctccgctcgcggatgctctgaaacaggcgcgacgacatgccgccgccgaggatgttgcacagcaggttcatcgtgaagcggtcctccgacagcgcggacacgccggggaaggacaggcacaggtggttctgctcgatctccttgctgcggagcacgagcgagggcttgtataccgccggggtggtctggttgcggcccgagccggtcatgaccgagaacaggtctgcgatatagtcaagatcctcgtccgtgaaatggccggagaccgcgatgaccgtgtcctccgggcggtaatactcgtgcatgtatttgtgcatgatctcggtcgtgatgggcgcgagcgtctcctccgtgccgaggatggggcggccgagcgaagagccgtcatagcacttttcgaacagcttgtcgatggcgacgtcctcgggggagtcctcatacatatcgatctcctcgagcacaacgccgcgctcgagctcgatgtcctcctgcgcgaagcgcgactcgaggaacatatccgcgagcagggcaatgccggtctggagacggctgtcgagcaccttcatatagtagcaggtgcattccttgtcggtgaaggcgttggcctgaccgccgagcgcgtcgatggcgatggcgatatgacgcgcggagcgcttttccgtgcccttgaagatcatgtgctcgatgaagtgcgaaatgccgttcagctccgccggttcatagcggctgccgttgccgacccagatgccgaccgataccgtgcgcacattgtccagacgctcggagatgatgcgcacgccgtttgggagaactcgttttacatacataatatccgctcctatatttctttcttcctgtttgtcctgcgggggggagtgaggcggcggcgccgccgaaaaaagcaggggagcataaccgcggtcatgctcccctgctgcgattatttacttgttaataatacacccgattgccgttttcgtccagatagtatctgtctccgtccgagtcataataatcgccggtggaggcgtcgtagctgccgccctcctcgacgagcgactcggggtcgaccgtctcggtcttatggctgccggcggccggagaagaagtgccggtcgtgttgtcggcggggtcatcgctgtccgtgctgccgtcgctgccggagggagcggccgtgccgggcgttacatcattgtagatgtactcgtgcagctcgtcggccacgacgtccacgtcgtacatgatgtactcgttggacgagccgtaatacttccattcgccgtcgagcggaaaacggacatgctccacggcggggacgccgtttttgatcgcgccgacgatcaggggcgcaacgtccgccggagcgagcgaggtcgtgacgtagggcatgagccggttcatgatgccgagcaggccgtttgcgtccatcgaactgattttcgcgaacatggcgttcagcacgacactctggcgctcgacgcggctccagtcgtcgccggtgttgcccttgcggatgcggccgtagcacagcgcctgcacgccgtccagcgtttgcaggccggtcttttcgacaggggagaattccttgccctgctcgaggccgtagtcgcggatgacgcggttgagctcggtcagctcatccttggaggcaacgttgatctcgatgccgtccagcgcgtccacgatctcgacgacctgctcgaagttcacggcgatatagtccttgatgtccgtgccgaagttctcgttgatcgtgcggatggcgaggctcgggccgccgcggaaataggctgcgttgagcttgtcctctcccacgccgtcgatctcgacgagcgagtcgcgcatcaggctggacagcttgatcttgccgcgcgtgttgtcgatcgtgacgatcatcatgcagtctgaatggcttttttcgtcccccggacgggtgtccagaccgaacagggcgatattcgtgatgttttcgtccgcctgaatgccggccgagagatcctcgccggagagcgaggagtcatagtgatagccgaagacagcgcggtatccgtacagaccgatcgagccggccgtcgcgagaatgacgacgacggtcagcagacggacgagaatgcgacggaagcgtttgaaagacataagcgaccttctttagtcctgaacgaacggtgcaaaggacagctcggtgagctggtgaacgcgcagggtgttggtgtagttgacatggccgaccggcatgcctgcggtgatggtgatgatgtcgccgacgcgcaggtcgagggtctggatggcagcctgctcagacaggctgtacagctcggtgccggaggacgggcgctttgcgaccagaaccggctttacgccccaggacatggacagacggttgaaggtctgctcgcacggggtagccgcgacgatgagcgtgcccgggcggtaggtggatacggcgcgcgcggtcgagccggactcggtgaaggcaacgatgcacttcgcgccgaggtcagcggaagtcgagcaggtcgcgtgggagatggcgagggtcttcatgtcgccggaaacgtgcatgttctggaactccagacgggtgacgcggcggcggtcatagtggatggtgcgctcggcgttctctgcgatgcggctcatggtagcaacggtctctaccgggtacttgccgaccgaggtctcgccggacagcatgatcgcggaggtgccgtcgtagactgcgttcgcgacgtcggaaacctctgcgcgggtcggacgcgggttcttcgccatgctctcgagcatctgggtcgcggtgacgacgcgcttgccgcgggagatgcaggtcttgatgatgttcttctggatctccggcagctcctcgaacggaacctcaacgcccaggtcgccgcgggcgaccatgacgccgttcgcctcgtcgaggatctcctgaatgttgtttacgccttccatgttctcgatcttgcagatgatctcgacgtcttccttgccgtgtgccttgaggatggccttgatgtcgcggacgtcctgtgcgcagcgggtgaaggaagcggcgatgaagtcgatgtcctgcgtcaggccgaactcgatgtcctcgcggtccttgtcggagataaacttcatgttgagcttgatgcccggaacattgatggacttgcggttggagagcgggccgccgttgagcgccttgcagatgatgtcggtgccgtcgacgatcttgagcacctcgaacgcgaccagaccgtcgtcgatgaggatgcgggtgcccggctgaacgtcgttcggcaggccttcgtaggtgatggagacgatggtgttgtcgccctcgatgtcgcgggtggtcagggtgaactcctgaccctcgacgatctcgatcttgccgtccttgtaggtcttggtgcggatctccgggcccttggtgtcgagcatgatgccgaccggcatgccgagctccttgcgggcagcctttaccgcgtccatgcgcgccttgtgctcctcgtgggagccgtggctgaagttcatacgggcaacgttcatgcccgccttgatcatttcgggcaggataccgtcggtcgcaggaccgagggtgcagataattttagttttgcgcatcagtcatattcctctctgtatcagataactaacgaaacgtgtataacattatatcagacctattctagcacttttcgtgcggtttggcaatcgtccgcgaaaacggcagattgttttcgtgcttttcgacaaaaaagcaaatgctgcgtgtcggcggattgggcaagaccgcataatctccttcatgaaaaaggtaaaaatgcacggtctccgtcccctgtgccgcggcggcggcttcgctcttgtattttacccgcccttacgatataataaaagtatctgagcgaaatacagcacagcggcggacgacacgaaaacgccgctttgaaaggaagaaaacatatgaataaaccggttctggtcattatggcggcaggcatgggctcgcgctacggcggcctcaagcagatcgaccccatcggtccgaacggtcagatcattctggattactcggtctacgacgcgcaccgcgcaggcttcgagcgcgtggtgttcatcatccgccccgagctgcacgaggcgttcgagcaggccatcggcgcgaaggcgcgccgcttcatgcaggtcgactacgcctaccagacgctcgaccgtctgccggagggtctgaaggcgcccgagggacgcgaaaagccgctcggcaccgcgcacgcggtctggtgcgcgaaggagctgaccgagggatgcccgatcgcggtcatcaacgcggacgatttctacggcgcggacgccttccgcaagatgtacgactatctgtcgcaggcggaggacgacgataagttccgctactgcatggtcggctatcaggtcgagaacaccctcaccgagaacggcacggtctcgcgcggcgtgtgcaccgaggacgagcacggcctgctcgcgcacatcatcgagcgcacttccatccaccgcgacgcggacggcgtcatccgctatgacgcggacggcgacgcaccggccggcgagatcgcgccgggtacgccggtctcgctcaatctctggggcttcaccccctccttcctgccctcgctcgacgagggtctgcgcacgttctttgcggagaagctgccggaaaatccgatgaagggcgaatattacctgccgttcgcggtcgacgcgctcatcaaggcaggaaaggcgaccgcgaaggtcctcaagacctccgcgcgctggtacggcgtgacctatcgcgaggacaagccggtcatcacggctgcggtttcgcagatgacggcggacggcgagtacccggaagacctgtaaaaaggagagcggcatggatttttcgactgaatttgtcgcgctgcgcgaccggctgatcgagacccaggacaaggcgttccgcacgcagaccaatgtcgaggtcgcgggccgcatggcggcgctctgctcctcgttcaccatcaagagcgcgcgcaagatcctcggtctgatgccgacgggcggcgtcggccacgcgcacgaataccgcctgctgtttgccgtgccgaagctcggcgcggacgagcttgcggactggtgggcgtatgcggaaagggtgttcgaaacgctcgttgagccggatgaaaaccacgatttctccatcgtttcggtcatcctcgccgccggagagctggaaaaggacgtgccgaagcggctgaaaaagctcgcgcacgagcagcagttcgagggcggaaagcacggctggggctcggtgcgcatggcgtgcgtcgacctcgaggcgcataagctctgcgtgagccgcatgggagactcgctgaaaaatatcatgaaagctgtgctttgagagcggaaaactcttgaaatacagcgcgaaatatgatatagtatcatgtacgcaatctgacgcggacgctgttccgcgataaaagaaaaatgtaatggaggaaaaaacacatgactaccgcacagatcgctctttctgtcatcatgatcatcgcaagcctgttcctgatcgttgtcgttctgcttcaggagggcgcacagcagggcctcggcgccatcgagggcggcgcagacaccttcttcggcaagggtaaggcttccgcagccgaccgcatttttgcccgtctgacctcgatcgtcggcgtgatcttcgtcgtcgcagcgatcgttctcaacgtcgttcactaaaatgccggcgcagaccattcagcgtctgctgctctttctgttcgtcgcatttgccgcgctgactgccttccagcagctgcgctacggcatgatctgcggccgcagtgagcaggaggaccggcaggatgaccccaaggcgaaggcctgccacgcgcaggcgatgctgtacgccgtgctcgcggcggtcagcctgatcgccaacatcatcgtcggcgcactgacgcgcggataacacataaaaaagaggatgcaatgtgaaagcgttgcatcctctttttttcagctgtcgaaaggctccgttttttttcagacgcccgcgctgccgtatcagcattatgaaaacggactttatcgaccggccggagaagaatttccgttccgcttgaccgtttgaggtcaatttttccggtatccgcgctatgggtgaggggacttttcccctcggcatggcagacagagcgatgcgtctgacggagcgggaacaggatgcggcggccggtcaggtgagagttcgttctgtcagacacagggaaaactgcgatctgacccgacaggtcttttcgtgctgcccgccgtttttttcttgccgggaaatcgggatttctggccgggaaaaggcggttttccgcccggaaagtacacacagaacaggacagcagagtacagcacagtacagtagagtacagcacagcagagcacagcacagtacagcagagcagaaaaagtccgccattccccgaagggaacagcggacctgatttctggtttctggatgctgcggtcagatcgagttgatgtcgatcatttcacagttttcgatcttgatgtcgccctcgaggcagcgcagcagcgcggaaacggtatccatcgaggtcaggcacgggatggcgcgctcgaccgcagtgcggcggatatgcaccgagccaagctccggatgacggcccttgaccgaggtggcgatgacatagtcgatcttgccggactcgatcaggtcgatgatgttcggggacggctcgtctacgttgcggatggcgttggtcgcgaccatgtggcggttgagcacgttcgcggtgccgctggtggcgtagatgtcgaagccgagcgcctcgaagcgctcgccgatgcggatggcctcctgcttgtccgagtcgcggacggagatgagcacagcacccttcttcttcatcttaaagcctgcgccggtcagacccttgagcagcgcctcgcggaagctcttggcaacgccgaggacctcgccggtggacttcatctcagggccgagctgggtgtcgaggtcgcgcagcttctggaaggagaataccgggaccttgacggcgtagtggtcgctctccgggtgcaggccggtgccgcagcccatgtcgcgcagcttctcgccgaacatgcagcgggtcgccagatcgaccatcggaacgcccgttaccttggagatgtacggaacggtacgagaggaacgcgggttgacctcgataacgtagatctggtcgttgtacagaacgaactggatgttgaccagaccgagaacggcgaggttcttcgcgagcgactcggtgtagcgcacgagggtgtccttgtgcttcttctcgatgttgatggacgggtagatggagatggagtcgccggagtgaacgcctgcgcgctcgaaatgctccatgatgcccgggatgaggatgtcgtcgccgtcgcagatggcgtcgacctcgatctcgcggcccatcatgtacttgtcgaccagaaccgggttctcgaccttgttgcgggtgatgacctgcatgaactcgcggacatcggactccttgtaggcaatctccatgccctgaccgcccagaacgtaggacggacggacgagaaccgggtagcccagctcgtcggcggccttgacggcctcctcctcggtcataaccgtgtggcccgccggacgcgggatgccgcacttctcgaggataacgtcgaacttttcgcggtcctcagcggcgtcgatcgaccatgccggggtgccgagaatcggaacgccgagcttttcgaggtgcgccgcgaggttgatggcggtctgaccgccgaactgaacgatcgcgtagtccggcttctcggcctcgacaacgccggtcacgtcctccggagtcagcggctcgaagtacagacggtcagcggtatcgaagtcggtggagacggtctccgggttgttgttgatgatgacggtctcgcagccgagcttctgcagcgcccagacagcgtgaaccgagcagtagtcgaactcgatgccctgaccgatgcggatcgggccggaaccgagaacgaggatcttcttcttgccggacgggggagcaacctcggtctcctcgtcataggtggagtagtagtacggggtctctgcctcgaactccgccgcgcaggtatctaccatcttgtagaccggcagacgcttaacatcggaaatatccttgccggacagctgctcgatggtcttgtcgaggaagcccatcttcttggcgcggatgtacaggtcggagtcgatcttctcagccgacgccagctccttctccatgtcgatgatgttctggaacttgtgcaggaagaatacgtccatcgtggtgatgtcgtgaatttcctcaatggtcatgatgccgcggcgcagcgcctcgcagatgtggaacaggcgctggtcgtccgtgcgggaaacgcccttcttgatctcggcgtccgactgcttctggatgcgcggcgcgatcatgctgtcgagcttgatctcacagccgcgaacggccttcatcagcgcgccctcaaagctgttgtcgatggccatgacctcgccggtcgccttcatctgggtgccgagggtgttgtccgcgtagacgaacttgtcgaacggccagcgcgggaacttgacgacacagtagtccagggtcggctcgaagcacgccttggtcttgccggtaacagcgttggagatttcatccagaccatagccgactgcaatctttgcggttacctttgcaatcgggtagccggtcgccttggaagccagtgcggaggaacgggaaacacgggggtttacctcgatgaccgcatattcaaaggactccggattgagcgcgtactgcacgttgcagccgccctcgatgcccagctcggtgatgatgttgagcgcggaggtgcggagcatctgatactccttgtcgcacagggtctggctcggcgcaactacgacagagtcgccggtgtgtacgccgaccgggtcaacgttctccatgttacagatggtgatggcgttgcccttgtggtcgcgcatgacctcgtactcgatttccttccagcctgcgatgcacttctcgaccagaatttcgtcaacacgcgagtacatgatgccggaggccgcgatctcgcgcagctgctcccaggtgtaggcgatgccgccgccggtgccgccgagcgtgtacgccggacggatgatgaccggcagaccgatctcgcgggtgaaatcgaccgcgtcctcgaccgtgtgaacgaccttggaggcgatgatcggctcgccgatcttctccatggtgtccttgaacatctggcggtcctccgcctttgcgatggtggtcgggttcgcgccgagcagcttgacgcccatcttctcgaggaagccgttctcgcacagctccatggcgaggttcagaccggtctgaccgccgaggttgggcagcagggagtccgggcgctccttcttgatgatctcctgaacggcctcgacggtcatcggctcgatgtagaccttgtctgccatggccttgtcggtcatgatggtcgccgggttggagttaacaagaacgacctccagaccctcttcgcgcagtgcgcggcaggcctgcgtgcctgcgtagtcgaactcggccgcctgaccgatgacgatcgggccggaacccagtaccattaccttatgaatatccttgcgcagcggcattactgagcgcctcctttcgacttttcaatattttcgatgaacttatcaaacagatacgaggtatccatcgggccggggcatacctcggggtgatactgcacggtgaataccggacggccgatgtgctcgagaccctcaacggtgccgtcgttcaggttgacatagcgcacgcgggcaatctgcgggtcaaccgactcgcctacaacggcgtagccatggttctgcgaggtgatgtaggtgcggtccgcgtcgatgtccttgaccggatggttgacgccgcggtggccatacttcagcttggtggtctgggcatcgatagccagcgccagcagctgatggccgaggcagatgccgaagatcggcatgtcggacttcagcagctccttgaggttcgcaacgatctcgacgttctccgccgggtcgccggggccgttggacagcatcacgccgtcgtacttgccgactacgtcctccggcttggtgtacgccggaacgacggtgacctcgcagccgcgcttgcacagctcgcgctcgatgttgtactttacgccgtagtcgaacagcgcgatgcggtacttggtttcgccctcagccgggtaaacgatgttctccgcacaggtaacggtcttaaccgcatccttgacaacgtaagccttcatttcctcgatggtctgctcgtccggctcaaagccctcggtatagatcacgccgttcataacgccctcgccgcgcagcttgcgcgtcagacggcgggtgtcgatgccggcgagaccgacgaccttctgcgccttgaggtactcgtcgagcgttaccttgcagcgccagttggacggatattcgcacatctcgcgcatgatgaagccggaaacccagctcttgcgcgactcgtagtcctcgaagttaatgccgtagttgccgacgagcgggtaggtcatggtaacgacctgaccgtagtaggacgggtcggtcaggacctcctgatagccggccatgccggtgttgaatacgacctcaccgatgctctgtccttcgtagccgactgcggtgccctcgaacagggtgccgtccgccagcagtaagtatgcttttttcactatatccacacgctccttaattcttcgattgaaaccgcggtttcaatcgaggggacataccgcgctgaaagcgcggatatgtccagaactgcgcaaagctccgacgagcgaaactttgctccgtacttgtataaaaaccgtgatacatgctcccggtttttatgaatttgcaaggcaaattctattttatgcgcgccgatggcgcggtttatattatttgatggccgctacgatgtcgtcgcgcatgcggatcgcttctgcgcgggcggcttccttgtagtcctcgccgttgtttccggtctttttccacgcgcacatgatgccgcgggaggaatttacgatcgcgccgaggccgtcgtcgttgaacgcatttgcaatgtcctttgcggtcgcgccctgcgcgccgtagcccggtacgaggaagtagctcttcggcagcagctcgcggatgatcctctgctcctcgggataggtcgcgccgacgaccgcgccgatctggttgtagccacacggggtgtccagaccttcgccccactttgcgaccatctcagccatgcgcgcgtagagcggcttgccctccatgtcgcggttctgcagctcgccggaggacgggttggaggtcttgacgagcaggaacaggctcttctcacggctgcggcactccttgaggaagggctcgacgccgtccgtgccgaggtagccgtttacggtgacgctgtcgcagccatagggcgcgatctcggtgtcgccgacacgggtcttgccgaggtacgcctctgcatacgcggaagcggtcgcgccgatgtcgttgcgcttgatgtcgccgatgacgtacatgcccttggcgtgcgcgtagtcgatggtctccttgagtgccatcgcgccgtaggagccgagcagctcataatatgcagcctgcggcttgaccgccgggacgatgtcgcacagcgcgtcgatcagaccgcagttgaacgcaacaacgctctcggctgctgcgcgcagggtctcgccgtgcagcatcatgttgcgccccgaaatatgctgcggaatgtattcgagacgggcgtccagaccggctacggtcggattgcctttttccttgatcttttctactaaggtttggatagacatttggttcttcctttctcatagtgagtgtatcatgcggctgcaagagacagcggggatgctgcctcaaagaatagcaacgttatcttctccgtccacctcgcggaggcggacgcagaccctttcctcgtgcgaggtcggcaggtttttgccgatgtagtccgggcggatggggagctcgcggtggccgcggtcgaccagaacggcgagctggatgcggcttgcgcggccgaagcaggagaccgcctcgatcgcggcgcgcacggtgcgcccggtgtagagtacgtcgtccacgagaacgacggtcgcgccctcgatgcgcgcgtcgggggagggcatcggcgcgtcctgccgcggcatgtcgtcgcgccacggcgtcacgtccagctcgatgaccggaggagtcgtgccctcgacctcaccgagcttctgcgcgatgcgctgtgcgaggtaaatgccgcgtgtgcggatgccggcgagcaggagatgctcggcgcccttgtttttttcgatgatctcgaacgcgatgcgggtcagcgcacgacggatgccgtccgcgtccatgatcacggttttctgacctgccatgcgacacttccttcgagaataaacatgcagcgaaatgaataaacttacgaaccgatataagaaaaatgactttccgcacgataaaagacgcagaaagccgcactgaagttacacctgtcccctgtttcggctgacggcgtatgcactgttttctgccttgtgcggctcacgggccgcttcttaaaggcggatttttccaaatcgtaccgtgaacggagccacggtgttctctatcattatactgtatgtgagcgtttttgtaaacagtcgattgcgcaaaatattccggattttgcaggtggattttgtcagcgctgacggaggaagaaagcgggcgcggcgggacataataagggagcggcgcggagagcggcgctgaaaaaaagcgaaaaacggaggaagaagtatgcaggtatcaccatttgtatcgggtgtcgcgacgggagcggtcgcgggggcagtgatgagcattgtggcggcgagtgcgatgctgaacccgtcgctgcggcattcggcgcagcacgcagcgaaccgggcggagcacgcagtgcaccgtgcggtgagcaggatgggataagcccgcccgagggcaggcgtcccttttgctttaccgtcggatgacggcagaccttccgccgatacagcggctcgccgctggaggcgagaatggccctcccgggccggggatgttcgccatggcatggcgtggggattgccgccgcccggcggcgggggcaaaaggggcagggacaccaaggtttccctgcccctcttgactccccaacctttcctggggacgcgactcccttcggtcgcgcgtctaaaagcgaggggcccacagggacgtctggtgctccaaggcacaatccttgatggaagcggagcttttcgcagcggaacgctgtcgttctgcacagaatggccgcgcactgttatgcgcggcgccttacgcaagggaaattcagggcagtaaagcgtccaaaaatctgcccgacgcacggaaccgagctcccgtacccccgtttaaccgagcatcttcgatgcgacggctcaaaggaaggtcaggggagtcaagaggggacaggaaaccatgtttggtgtcctgtccccttttgccctccgccgtgggcacggcgtctccgccgccgaaggcggcaatgcacacgccatgtcatggcgaatatcccctgcccgggagagccgttttcgcctccagcggctcgccactgtatcggcggaaccgcctgccgtcagcagacggttaagagaaaaaagacctctgctgagggcataagaaaaaggctcccttttgtcaagagagccttcttttcttgttttacatcagcgtacgctgcggattttcggaattactcctcaacctttacgtaaacgccgccgttacggcaggactcggtagcagccttagccatgagaaccggacgcaggccgtcaacagcgccgacagcaaccggcttgtcgttgttgatcgcatcaacgaaggagataacctggttgatgaatgcctggttgtagcgctcgaggaagaaccacagcggcttctcggacttcgcgccgtctacggtcataacggtggtggtgttgaccagatcgttagcgtcggaagccatgcccttggagccgaaagcctctacgcgctgatcgtagccgtaaactgcctgacgggagttgttgataacagcgatgcagccgttagccatcttcatggtaacaacagcggtgtcaacgtccggaatgccggactcttcctgcagcttcgggttaacgaggcaggaaccaacagcggagatctcaacagcctcggaaccggttacgtagcgaaccatgtcgaagtcgtggatcatcatatcatagaagataccgccggaaactgcaacgtaggatgccggagggggctccgggtcacgggaggaaacgataacgatatgcggatcgccgatcgtgccgtccttgactgcgtctgcaactgccttgtggttgtggtcgaagcggcggttgaagcctacctggaacttaacgcccttctcctcaacgagtgcgagcagcttcttgatcttgtcgatatcatagtcgatcggcttctcgcagaatacgtgcttgccagcctgaactgctgccatggaaacatcgcagtgcgtgtcagtggaggagcaaacgaatactacgtctacttccgggttgttgataacgtccatgaagtcggtggaaacgcccgtgatcttgcgctctgccagccactcgcgtgcgccggacttatccagcatcggatctgctgctgcgactacctgtacgcccggtacagagttgatcaggttgttgatgtgcagcttgccgatacggccgcagccaactacgccgattttcagaatgcccattg

SEQ ID NO: 12856 - DNA, 28376 bp, Unknown
  gut microbiota DNA sequence
tataattgaagggaaactgcttttgaaaaactgcggctgttttctttagtctatggacaaatgctttttcaacgccgcgacataggatacggcataacggctgagcaccacgtttttcttgcggatgagtccgatgcgcatgctgccgtccatgtcgagcgggcgcgcgatgatgctcggactgttgagttttggatcgatgatgcccgagctgaccgtgaagccgttcagaccgatgacgaggctgaacagcgtggcgcggtcgcgcacctgtatggttttcggcatatcgagcatgctcagcagctcctcggaaaaatagaacgagttgcgttcgccctgctcgaacacaagataggggtaggggcgcagctcatcgagcgtgatgcgcgccctggcggcgagcgggtggtctctgctgatgaaaacgtgcggctcggcggtgaagagcgcctcgaacaccagctcgtttttgcgcagcagcttggagagcacactctcgttgctctcgcacaggtagagcagaccgagctcgctccggccggaggaaacatcgtcgatgatctcgccggtctgcgtctcgcgcaggatgaagctgtaccggtcggcgtcgtactgctgcaccacatcgacaaaggcgttgaccgcgaacgaataatgctggcacgacacgcagaaccggggatcgcgccgccggcctgcgccgaagtgctcctgcatgatgtcggcctgctcgagcagcatccgggcgaacgagagcagctcctcgccctcacgcgtgacggcaacgcccttgttcgagcgcacgaaggcggtcacgcccatttccttctccagattgtggatagcagcactcaggctcggctgcgagataaaaagccgttcggctgcgtcggtgatgctgccgcattcggccacggcgacaagataggcaagctgctgcaatgtcatgaaaagagcctctttctggcgcggagcgccgggatatagccacatcatacgctgtccggacgctgatgtcaatgtgcgttttcgactttttctgcggcgttttgcaggaatgtccttgtgatgcacaaccgggcgcgcggcgaacggaaccggccttttcgtgattacgctcttgcaaagcggcatggatgctgtataattttagatggacagagcgtaccaaacagaaagaaaaaactggcatatcgcatgaccgggtcgtgtggatgcagtcgggaggacgaaaatgagagggaaatcttccgctttgcgcgcgaaagaggaatttcttgcgctgtatcatgatggagcgttcgaagcagggacaaaaataccgtccgagtccagcatggcggaaatgctcggcgtaagccgggagacctggcgcaaggcgctcggcctgctgcgcggcgagggcgtgctgtattccagacacggctcgggcacgtatcttcaggagccgtcgcatcgcattacgaacgacctttctcagctgaaaagcctgtctaagatgatcgcggaggccggactgcgcgagcagggctcgtgcatgacctgtacggtcggcacagcgccggaggaggtctgccggtttttcgaagcgccggaaacagccgagtttgtgatcattcaacatatccgccgcaccgaggaggatgtgatcgcggtcagtctggggtatctgccggaaaaatacgcggaaaagatgcatggcgcaatcccgcagtcgctgtttgccttcctcgaggagagcgaggggatctatatcagccgcgcgagcaccgagctgtttatcccggcagagaatgacccgctgtgcgaaatgcttcgtctgcgcgagggtcagagcgcgttcggcttcagacagtgtcattacgactcgcgcggcaatccgacgctgtattcggtcgattatctgcgcagcgacctgtttcatttcacgatcatgagaatacggccgtaaaaacggcatggacagaaccttattccgctaataggatagaggttctgtcctttttcctccaattcacagtattctttctctgtcaccggctcgcaccactcgttggaggtatcctcgccgggaacctcgacagcaatatgggaaaaccagctgtccttcttcgctccatgccagtgcttaacttcgggcggaatggtgatgaccgtgccggcagtcagagacaccggcgctttgcctttctcctgataccagccctcaccggcggtgcagatcagcatctgcccgccgcctttttttgcgtggtggatatgccagttgttccgacatcccggctcaaaggtgacatttgccaggaaaagtccgctttccggatttgtcagcgggttcagatacgactgcccgatgaaatgcctggcataggccgtgttctctgccccccaagccaaacacattttcacgggcgaattctttttgatccattgttttcatacttccttctttcccatgctcatgcaccggcccaacacttcgccggttttcagatggcgtgggatacagggccggtttagcgccgatattggaaatccagcggcaaatggatacttcctttgcaatacctgcgcagaaaatgcaaaagaagcagttctatcacacaatacatgcgtggtagaactgctttcttttattgaattgcagcatcagacaggctctgcaaaacctgtccaatatctgcattcatgcagattgatcgttgctcaattccctgagggcaaactgcctgcccttggttgatacaggcgtaagtggcgttcgggttctttgccgtcatctgccagaaggggtacttaatgatgaccggggtattatagccaacgcccaactccagaaagagaatttttccgccttcacgggtacggagaaaattctcataccgctccgctgcccgatgccagccctcgtcctcgacaaacttgttgtcagaacgcaggttcatggtcagtggtttcccgcagtgggggcagacggggagcagctctggcgggattttcatatctttctgccgcttgaccatttcccggatgaccgcttcgttatcaaaggtctcctgacagcacggctcactgcactggaacagaccgtaatcgccctgcgtgtagaacagccgctttttatcaaagctcgccttctgaaagcagtgatccacattggtcgtgataacgaaataatccttgtcctgcaccagcttcaaaagatcatcgtagaccggtttgggggcatccatatagcggttgatgtagatgtaccggctccaatacgcccagaattcttccatcgtggggaagggatagaagccgccgctgtacatatcctgaatgccgtacttctgagaaaagtcggagaaatgctgctcaaaccgttcgccggtgtaagtgaagcccgccgccgtggacagtcctgcacctgcgccgatgaccacggcatcacagtcctgtaatgctgctttcagccgttccatcggcttagagcagctttttatagatggctttgtccaaatccttgaaaacattgaagatcaccttcttgacactggtttttctattcataaaccggttcacggtttccacggcgatttgcgccgcctgctcgtttggaaaatggaactctcccgtggaaatacagcagaacgccacgctttccaagctgttctctgccgccagagtcagacaggagcggtagcaggaagccagcagttctttgtcctctttggttactcgaccgctgatgatcggaccgaccgtatgcagcacatactggcagggcagattgaacgcgggcgtgattttcgcctgaccggtgggttcgggatggccctgctgttccatcaattccgcgcaggcaagccgcagttccacgcctgcaaaagtgtgaatggcgttatcaatgcagcgatggttgggaatatagcagccggtcatgccggagtttgccgcattgacgatggcatcgcagcggagcgtggtaatatcgccctgccagagatacagccccggctgaatgggtgtcaggtcggcaatatccgtgataccctttgcggcggtttcgccttgcagataggcgtcctgtgttttcagaaacgccccgtccgtgcgccgggacgcacgaatgttcatcagtccccgcaaaagctgacgctgactctccggctctgccggaatagcaatatcccgatattctgttttctctttcaaaagcgactggatgagaaacagccgccgctgtgcctgggtcattttttcaccgccttaatgaaacgattttataaaggatgcggcggccgccctttcggtgtggccgccgcgtgtttcttagaactcgtagggagggttgccggagaagtcggcgatgatgccgtgggcattatccagatagaacacctcaaagagggggttggtggcctcgccgtactgacccttcacgatggggttccggatgcacatttccttggcagccatgttgttctcaaacacagccttgccgtgcagacgaatccacgcatagtccgggctggaaacggagatctcgatttccgggttctcctgcatatccttatagacgtccttggtgttgttggtgcagaaccacagcttgccgtccatctcgccggagaacatgaaggggcggcacttggctttgccgtcacgaccgacggtagccagatactgtacagggttggcattcagaaattcaacgactttgttcatgatgagtacctccaaaaaatttgttgtttttacttgatgttttgattgtaatgcgatttgtacggtttgtgaagtacgcacaatattgtggtatggttacctccgggtaacaatcagaacctgccgttctccacacgccacagatcatagtagccggtgggcgcaccgtcaaagtaagtcgtcagcttttcgggatgctcaccccggaagacatcgcccgcgaagccggaaatcatgcggagattttgtgcgatgtgtacgcgaatttgggcagggtgcatcaagacgtgccggtcatatattcaccgagaccaggatactggtgaaggaaaaaggaggaagcagcatggcaaatccagagtatgtactggaaatgcggacgaaggcgaaatgttctactataaaacacagggaggacgaacgttcgtcctccttttggctgcttgttaatctgcacaatacagactgcatattttcgtttttctttattgcgtttccactatgaaatatcttccttctatgctatactgaggttagccatcaaaggcaggaaagaggtgtttcgcatgaacgaacaggaaaaaaccacgatgaacatcatcgaaccggaggggctgtcgagctgtggggcggacagcggcgcatggtgcggtcaggcgctcaagcgcgtgctgatcggcatgaccctcacgggactgacactgaatgtgctgtgtctgaactacattctcccggcgatcggcatggtatttctgctggtcggccttcgcgcactgcgccgggaaaacgcaggcttcaagggcggctatgtcatcgccatcctccgcacgttctacattaccgtgtggatgatactggatacgacgatctatgcggatgtgctgacggggacaacggccgcagtggtgctgacgttgtttaatctggtgatagtgctggcgcaggtggtctgcctgtggagcggcctgaaggcgttgcggcagaaggcaggctttggggcgaaatgcggtgcggccgccgcgctgatcgtatggaatgtcgtgctgtgcgcgctcggtctgatcagctggagcggctggattatgctcagcgttatgatcgcagcatacatcatcatcatgcgcaggctgttcgcgctcgcaggcgagctggataacgcaggctgcacgattacgcccgttccggtcagggtaaaggactggcagctcgtgctgtcgctcgccgtgctcctcgcggcaggcatggcctgcggctatgcgttcggcggcagctatccgatggagtggacgccgctcgataattcggcgcaggccgaggtgcagagcacaaaggcgaagctgctcgagctcggctttcccgaggcggtgctgaatgacctcagctcggaggacatcgccatgtgcgagggcgcgacgcagattttgagccgaacagaggacaagccggtgaacgacggcagagaagtgacgacgcagaccggcgaaaacagctaccgcatcgacacggtgtacgatgcaaaggagctgcgcctgaccggcgtggcggtccgcgtcggcgaatacagatggatcatcttccatcattttctctggacgcagccgatgaactactgcggcaccgaggcagttcagctgtggccgaacgggcagagtgactggtggccggacggcgacgcgaccggccgtgtgctgtgcggaagggacggtcagacgctcgcggcggcgtatcactcgctcgacacgcaggacaccttcacgaccgactttttcggcaattcgcagagcagcatcaacttgaccggcgcgttctccatgccgcgcggcagcgaaaatcagcgcggctacgtctgcttcccgatacagaccgcgcaggaggacacctacgtcaacagctgggtcaactacacgcatcagaacacctgggcgcagtacccggcgcggactgcgagggacagcatgtggagcagcagcgcgttcaagaccatccagttcgcgcttcagttcgatgcgacagagggcagaatgatgtactgagcacggtaatttgatacaaaagcagggcgtttccaaagaagggaacgccctgctggttttcgagacagtctttttaccattcatccatatcgctgaagatttccccctccatagcggagatctcggcggcagggatgacggtgccgtcctgcatgatgatgcgccgggcggcagggtcgagcttgcgcacaacaccggtcacggtcagatacgcgccgccctccttgcgctcgtcgggtctgaagtaggtgatgctgacggtcggacggctgtcgagcgtatccatcagacggcggtaccggcggttgagcatctcgatcgtgccctcgtcgagctcgatcttccgctcggtcagacgctgcgtttcgcggatggtatcggcatagccggagagcgccgcgaagggcgcgaactgaaacgcgcggtcggacagcggcatccgcggatggctgcgcgaaacatgatgcggacggtcgatgatatcatcgtatttcgggttgtaggccataagacacctgctttcttctcgggcacgcggaacaggctgcggtcattcctgcgccgctcgactgacttcggcgccgctgctctgcccgccgaggcttttccagccgtagcggaagatcgagaggaggatggaggcttcggtcgcgatctcgtccagaatgccggcccacgagccgatgatgatgtcgtatgcgatccagagcggcgagttgatgaacatgccgaccgagcggatggtgcgggcgttacaggtgtagccgccgatggtcgtggcgatgttcgccgcgacagggaggacggacagccatcccgaccaggtgaaaacaagggcgaggatctggagcacgcagatgaccgcgcccatggcacggctgcgcaggaaatcgtatctgctgctcagacagaaggagcggaaggtgttgatcagatagctgacggcgccggtagctgcgccgagcaggaacagatgggcagtgtagcagagataggacagaaactgcacgcgaaacagctgcctgttgtcccggcactgataggacgcgaagaacagcgcggtcccgaacagtccgacgagctgtgcaaacataaaaaaggttctcgctttctttggtgatcgagtacatggaaatgcgctgcatttatcgtatcatattgcagaaattattgcaagtttgcggcgctgcggcacagaacaggacgcatatgccgcgggtttctctgctagggcaataccgcataattgaacaagagcgatttgcgagcaaattttgcgttctgacaaggcgcggttttgcggtaatacttgatgtattaccgtgaaatcgcaacaaagtcagggcacaaaatttccgcaaagcgccgcagctttaattgtgcggtgttgccttaggccttgtggccgccgatctggctgttgcggtcgcgcgccgtcgcgccctcctcgaggttcatgcccttgaggagggcatttttaccgaactttttcttgatggcgagggcggcctgctggagctttcgctcgcgcgcaagcgcttcctcctccttccggcgcttttcctcctcggcggcgtagtcggtgaacaggtcgagctgctcacagtcgttccggcgcggcgcgttgttctcgaacagcacgcggttggcgacgagatacatacgccggatgagcagctcggggtcgacaatgcggtcgaacagggcggaggctgcctccatgatctgatgcgtggaggcggtgtagccgtcgagattgatcgagccgtgcgcctgtctgggcagcgtgcggccgtagcggtctacctcggtcttgccgtgatagcgccgacggcgcgccgggtcggtcagattttcgatgtcgtagccgacggtgagcacgatctggtcggtgacgagccgcttgtccaccagatcgagcacgagcaggtcggccatctcgcgcagcacgagccgcgccttgtccgcagggtaggggcaggtgagcacctgcccggagctgatgctcttgagcgagggcggcagctttttgatggcctcgatggtgcacggctcccagccccaggcgtggtcgatgagcagctcggcatttttgccgaacaggcggtacagcagctcctcgtcgcgctccgagcagagcgcaacatcgcccatggtgaacatgccgtgctgctcgagctttttcgcgtagccgcgccccacacgccagaaatcagtgatgggctgatgagaccacagtctgcggcggaagctcatttcgtcgagcacggcaatgcgcacgccgttgcggtcggccgggatgtgcttggccacgatgtccatcgccaccttgcacaggaacaggttggtgccgatgccggctgtcgcggtgatgccggtcgtgttcagcacatcgaggatgatcttcatggcgagctcgtgcgcggtcagaccgtaggtgttcagatagccggtcacatccatgaacacctcgtcgatggagtagacgacgatgtcctcaggcgcgacgtatttcatatagatggagtaaatgcggttgctgtactccatgtaatacgccatgcgcggcggtgcgatgatgaaatcgacggcgagggaggggttgctctgcagttcggagaaggaggacgacgagccggagagctgatgcccgggggcatcgtggcggcggccgatattcgcttccctgacgcgctggcgcacctcgaacagccgtccgcgaccggagatgccgtagctcttgagcgacggcgtgacggcgagacagatggtcttgtccgtgcggcgctcgtccgcgacgacaaggttggtgtcgagcgggtcgagccctctctctcggcactctacggaggcgtagaaggatttcaggtcgatggcaagataagtgtgagcggacacgttcgcagcctcctttccgggcggtatcgagtcacttgagcagatgacggatgacgagctttgcggcgagcagaatgaccagcaggaccagcacgcaggcgccgcagagcagaatcggcgtgtaccacggcgcggaatacagttcgtacaggccgggacgggtgcggcagtccgcacaggtgtaaatgctgtagccgaggaaaacgccgatgagcgagagtatcagaatggtcagcagacggtttactttttgcagcatggaaatccctccgtttcgtcagaacaggtcgagcgtgttgtccagatagatctcctcgcggacgttcagctgatattcgggccgggtcatgtagtgcagcagaaattcgagaacgagcgcgctgccgaggctgcggccctcgatcttgaactgcgaaaagcccatcgggagataaatgtcctcgatgtcgcgcacgccgataaatcccggatttttcatcgccttcgagaagcggtagccgccgtccgcgtccggtgcggcgcagcggtgctccgggcagacctcgccgaggttcatgcggctgacggtctcgtagcagcgcttccggtcggtgcagccgaaccagcagcactcgttgcacagaaactcgaccttgtcattttgcgcctgcgtgagggcggaaagtgcgtcgaattgccggttcaagcgaaaatccggcacgacataacggaaatccgcgcggtcgagctcgcttttgagctcgcgaaaatcggtgagcaccttggtggtcgaggacacgaagtaaagacccggccagcgctgcgccagatactcgagcagcaggtcggagtggacgatgacgccgttctgcacgccgccgctctccgcgaacaggcggcacagcgcattgcatttccgatcggacaggtgctcctcgcggagcagggaattgctgaacgtcagacgcgcggagatgccgtattcctgcatgagcgcgagcacatcgcgcggcgaagcctctccgaacccggcgcggccgccgccccagagacagtccgcaggcgcgccgtagatcgagccgatttcgcaccagtcgaagaagtattcccggtgctcgcggaacagcggcaggaatacgcggtacagttcgtagaactcgaacaggccgggcagatgaaaatatgcggtattcacagcggccacctcacttcagaaagtcgcatcggtgctcgggctgacggaagcggcggccctgccggttgagctcggcggtcttgagcgcgacgaggttgatgtccgagtgcatcagctgtgcgatctgcgcgacgtcacagccgcgcatgatatactcgaggatttcctcgtcgggcagcgcgacctgtgcggcgaacatgttggcctcgtattccatcgcgcggtcggccatgttgaaaaggttgaattcctgaaagccgccggcggcgatggcggcgctgcggtgcagctggtcgtggccgatctcgtgcagcaggacgatattgtgcatgaccggatgcaggtcctgcttgatgaagatatagcggttgcgctcgatgaccttgtatacgcccttctggtgtttgaaggcacgcggcatgacgatcagaccgagcgcctcggccaactggtcggcgtcccgcgtaccgtatttccggaccagccggtcggcggtgcggacggcctcgttatggtttttcagcaagtgactcaccccgcttcaaggctgctgctgatattttttcggcgcatatttcttgttgcgccgcttggcgtcgacataggcctcctgaatggcgagcataagctcgtccatgtcctcctcggccatctcgccgccggcgaacagaccggtcagctcgccgacgagcttttccgcgccgatgcggccgcgatagccgaattccttttcggccatcgaaacgaaatcgtcgttttcgttgtgcaggtagtccgcgctcgtgccgaggatctcggcgagcacgctgtagaccctgcggtcctgcggataagtagtgcctttttcgtaatttgtaatggttttcagtcccagaccggcgcgcttcgccagctccgcctgcgtcagatggctgtccttgcgcagctttcggagcttttcgccaaacctcatcgcgctgcctccttattttgtaatgcgtaaacggattacatgaatgctcgaaatttccattgacatgcgtaaaacaaatgcgtataataaaagcgtaaactgtttacgcatttatcatacaataaattgcgcatctcgtcaagagaaagcgcggcagcagcacatcggaggtggcagtatggccgaaagatacaccaaaacctatgtttccgtcaacgtggatattgatgaggacggcacgatgcttccgcggctgatccggtggatgaacgggcgcgtgttcgcgatcgagcagctcgggtataaatgccgcgcgtcctcgacgaaggtggggggaggcggcatccgctataccgtccggataaacggacgggagacctacctgtttcaggagggcagccggtggttcgtggaggccagggcctgagactgtcgaaaaacttcgtttttccgacaatctgcgtttcctcatagccgtcgtactgcttgacgagcgcgagacggcgccgccgtcaggatgagtcggatgaggaggacggaaccggacgaaaaatttttatcggcattgtgcggcaaataagttagcgccatctaacttgtttgccgcaaattgtgtgctttgtgtgtcgtttgcgtggcaggcctgttaactgctgcaaaaaacaggagttgacaacgcaaaggagatatggtattttattagcactttgagttagcgcgcgttaactttaaccgcatgatctgcccgcagagcgcttctgcgcaggcatacggtactgcctttcatcctttccgacgggaaaggacattttttgctgaaacggttagcttcgggtaaccgcaaccgataaggaggatataacccttgaagaagaaacaaaccctcgctctgctgctggccggcgcgatgctcgtaccgaacgcattcgccgcgtcccccgaggattttcacgatttcccgaccgactggtccgcagccggtctgcgccgcgccgtggacaacggtctgctgaacggtgcgaacggacggattgacggtgcgggcctgctgacccgcgcgcagatggccgccatcatcaaccgcgcctttgccgcgaaaaagaccgccgacctctccggctacaacgatgtgagcgcggatgcgtggtacagaagcgacctcgccgcagcggttgccatgggcacctttcagggcgcgaacggtcagctgaacccggaacgccccatcactcgcgaggaggcgttcaccgtactggcacgcgcgtttgcgcacgaaagcggcagcaccgcttcgctgaacgttttctcggacagcgcaagcgtttcttcgtgggcggcggacagcgcggccgcgctcgttgaaaacggctatgtaaacggcgcgaatggcgcgctgaacccgaaaagcaacattacccgcgcggaatttgccaaaatcatcagcgatatggcaagcacctatgcggacgcaagcgcatcgctccccgaaaccgtggacggcagcctcatcgtgcgcgacaacagcgtatcgctcgcaggaaagaccatcaacggcgatctgatcatcgcggacggcgtatcgcagatcgacctctcgaacgtcaccgtcaccggccgcattttgctgcgcggcggcgagagcggcgtaaacttcgcgaacaccaaggccggcaagggcatcgccgcaaacaccgacatcgcggtttccggtacggttgacagcattaccgtcatcgcggacggcgcgaaaatctccggctccggcaaggtcggcgcggtacaggcgcacgcgaataacgtttcggtttccaccaccggcaccaaggtttccgccgccgcaggcgttttcggcgtcaaggccggcagcaaggcggttgacgcaggcaagactgagaccgttagcacctcgacctccggcggcgcttcgggcggctcctccggcggcagttcttccggcggttcgtcctctggcggttcttcgtccggcggctctacttcgggcggcagtcaggtgacgcaggccgcaatcgcggacgccaaggtcgtcaccaccgacaccggcgcatatctcgcgctcagcttcaaggacggcttcacgctcggcggcacgaccgttacggtagacggcgcggacgtcaagaatgcggtttccaaggtgaccgatgacggcgccgttgcgaaaattccgctcgtggcgcagccgggttcggtcacgctgacaagcggcgcaaagacgcagacgatctctctcggcacggccgcagagggcgcggtctacaccggcgaggactacctgccggattacttcattaagcacggtccgctcgacctctgggattactacctcaccaactatgataacgcaggcaacgtgcgcgtcctgccgagcaagaccaccttcggcacttctgctgtccgcagcgagcacccgagctattccgagccgctcgttctgaatgagaacggcgagggcagcgttgtcgtgatgttcaactacacctcggaagccgacaaggcgtggttcgacaatatcgcgtcctatgacgcttcgtcgagcgaaagcgcggttcagctcgtcgcctacgaccagtacaagaacacgtggaaccgcaatctgaactttacgaagggcacggcggagcacaacggcagcacggtcgcgacgctgaccattccgttcaaccaggataatttccgctccaacggccgctattacgtccgcgtgacctcgaccgacggcaacaacgtcaagtccacggcgctcgcgtccatccatgtccagaattacgcaactcccgaactcagggtaaaggaaacaccgcagtcgggcgtaaatctgcacttcgcggttagtaatctggtttacggcatcgtggacccgattgaaaaggtaacgctcaccgacccgaccggcgcaaccaagacgctcgaaaaaatcaaggattactacctcatcagtcaggacctgttcgtgctctataacgatgtttcggcaacggacggccgcaacaacctgccgtacaagggcgaatatacgctcaccatcgaggcgaacggctttaagaagttcagcaagagctttacggtagcggagggcgaacagccggccaaacagaacgccatcacctatgacgccatcagccgcgcgaccggaagcacttccggcggcagcagcagcgacggctcgtccggcggctacgcgatttcgaccgatttcctgttcgacagcgaccttgtcgcgaacgcgaacgtgctcgataagctgaacaaatcgactgccgactcgactgcggttctcgaatactggaagtacaacgcctccacactggacagcgtattcaacaagggcgacgtcaagtatttcagcggcacggactacacggactacgtttcgaccgaccgtaacggtaagctgtggaagtcctacgcagatttccagtcgagccatgaggcaagcgtattcccgccgcacgccaccaaggcgatccttgaggacggcctgctcggcgacattcaggacagcaccgcgtccggcaagctcgattacatcgcaccggctgtttcggagaacaagcagggggaggacgttgttctgaccttcgcaaacggcgaggattacctcggcaaggtttccgcgctctacctgaacggcgactggcgtgagcttggcgaggagtattacagcattgacggtaacaccatcacgctgaaaaaggacctgctccatgtcggcgagaacgcgctgaaaatcgagtccgcaggctataagccgcagactgtgaagtttacttacagcaaggtgaacgaggaaaaactctcgctcttggcaaaggtcgatcaggatgcgcagaccgtcaccctgaccgtcaacggctcggagggcgatttcctgaaaaatctgaaatccgtaaagctcggcgacgatacggtttacagcaagggcgttgaaggcagcgacgcggtttactacgaaatcgcggaggataacaagagcctcatcctgcacaacgtcaagccgggcagctatcagctcaccctgtcggcagagtattacgagaatttgatggcggagtttacgatggaaaaagtagatacgcctgataccaagactgcaccggaaatttcctcgtatgaacagaaaagcatttctgatttctacggaacgcagtatccggtttatcgcttcagcttcaacggactgaacgccaccgacctgaaagagtatctgaatgcagtaacctcggttaaggtaaacgataccacgctgaccaagaacatcagcagtttcagcttcgacgagaaggaattccgtctgtattctaccggcagcgagaacggcggcgctgtgcgcgattatgacaggctcgacctctttgcctctctgttcaagcagcccggcacctacaccatcacgcttaccgcaccggactatgctgatgtttcctatgaactgacagtcagcggttcgaccgaccccaccgagccgaccaccccgactgagccgggcgagagcgaagtaaaggttccgaccgaactgccgacgattaccaaaggcagcaacgtatattgtacgctcacattttccaatgcagaaaagtggctagcgcagaatttaactgttactgtaaatgatgtagcatatgacaaaaccggttctatctataaccttgataacggcggagcatattatatcgaagagaataacatttctctgaagattccgtacgaaatgtttgataccaagacgagtatgcttgtaatctccgatggtacttcgactattaactttaccgttacgatgccggggtctttcatccttggtgctgaaccgaccatcgcatttaccaagtaaacaccgctccaaaggaagcccctcgcgggcttcttttctttacgatagggaaataccgccgcagttttcattgtgcggtgctgccatagatataatacactcccccttattgataaccacacgctctgtcccgtataataaagtagtcgaaaaaagggaggcgcacggatatgcggcacgaatacacatcatgcggacacccgcccgtttccctgaacagacctgtatgaccaaggaccccctgcccctaaaacggcagccggtccttttttgtgggaggaaaatgaaatgatcgaaaactggaacgacgtccacattgtcccggaattctgcgaccagggcgtggactgctaccgcctcgagggcggcagctttctcaacgagtactacatcgtttccgaggcggagacgcgcaagctgatgaaccatcccgaggtcgtcggctacgaggtctatgcctcgctcgtcaccgcgacctcgcagatgatgtactacctcaaggagcagaagaaaatcacgtccgccaatattctctccatcctgcgcggcgcgctcaactatccgctcgaggagagctgctacaaggaacacatccgcgtgcacgacatcagctttatgtccagcgagcgcgtgttcggcgagaacgatgagatgtcgctcgacatcaaatactgcaagctgaccatggtgcccaacagcacgctcatgatcggcgacatcatcgcctcgggcgaaacgctcgtgcagtgtctgcgctatgtcaccgactactaccgcagacagggcgcacagctgcgcaacatcgttctgttcaccatcggcggcacgcagggcatcgagatcctcgaaaagctgacccgagagatccgcacctactggccggactttgagggcttcatcaccgtgtactacgagggcgtgttcagctgctacgaggagggcgacaagggcgtttccggcatcaaccgcgcgctcatcgacttctactggaagggcggcatcatcgccccggcgttccgccgcgagacactttccatgcagaacccgctgttcgaaaagtgcacgatctatgacggcggcgcgcgccgctacgagatccatgagcacatcgaggaggtgcttgaattctggaacggcattctcgagcgtgcggacaaaatcgacaagcaggcgctgctcgaggaaaagctgggccacgcgctgcccatttcctacgaggactgggtcagggactgccactacggaaaactcgatgaaaagctgacgcgctggctgtatcagcaggagcgcggcttcgtcgagagcctgcgcggcatctcgctcgagcagatcgcccttcagcgcatcgaggagttcacctcgacgctcaaaaagtacatcctgtaacagattcacagcaaaagattggacggtaatcaatgaaaaaagaacaaacgacggtagatatcgactttgcggaggcggcggtgccgcagtacgcgcgccgtggcatcgtgaccatgttcatgatcatgctcggcttcacctttttctcggcgagcatgtgggtcggtcaggagctggccgacggtctggatttcggcggcttcctcgtctcgctcatcatcggcggcttcatcctcagcctgtacaccggcctgctcggctacgtcggcgcggagaccggcatgagccttgacctgctcgcgcgcaaggccttcggcagcaagggctcgtatcttccctcggcgatgatctccttcacacagatcggctggttcggtgtcggcatcgccatgttcgccattccggtcgcaaacgagctgctcggcggcagcaccgcggcggaatgggtgctcgtcatcgctgccggcgcgtgcatgaccgcttcggcgtacttcggcatcaagtcgctgacgctcatcagctacatcgcggttccgctcgtcgccattctcggcacgatcgccatggtcatggcggtctcgcgcggcgacggcacgatcatcgaccagttcgcgaaatccagcggcacgctgaccgtcatcggcggcgcgggtctggtcatcggctcgtttgtctccggcggcacggcgaccccgaatttctcccgttttgcgcgaaacggcaggatcggcgccatcacgaccgtcatcgcctttttcatcggcaactcgctgatgttcttcttcggcgcgatctcctcggtctacgtcggcggcaacgacattttcgaggtcatgatcaacctcggtctgttctatctggctattctggtgctcggcctcaatatctggacgaccaacgacaacgcgctctactcggccggtctgggtctcgcgaacatcttcggtcagaagaaaaagccgatggtcctcatctccggcatcgtcggcacggcgctcgccgtctggctgtactggaacttctgcggctggctgaatattctgaactgcacgctgcccccggtcggcatcatcctcgtcatgagcttcttcatggaccgcgagaagtaccgggacgtcgaagtcaccgagacggtcaactggtatgcggtcgcaggcgtcatcctgggcgccgtggttgcaaatgttgtgtcctggggcatcgcctccatcaacggcatgatcgtagccgctgtctgctacctgatcggccacgcccggaaaaacagataatctcgtattcgggatgatctgcatcctgtctgcgcggatcgataaggaaaacagaaatcggagcatagctcactgttctgtttgatacggcaaagccctcgttcacgcgaacgggggctttgagattttcgaaaagcttcgtttttccgacaatctgtgttttgccttcgcagaacacggacgtccgcaaaccgaggtacacgcccccggtttgcgctttattcctcggcaagttcccggacggcggaaacagcagcgtccgcttcctcctccgtattaaagaaggaaaagctgaaccgcaccgcgccctgctgcaccgtgccgagcgcctcgtgcatacgcggcgcacagtgcgctccggcccgtgtcgcgatgccgtagtcctcggccagaatatccgcgatctcggccgagtcgtaatcccggatgttgagcgtcacgatcgccgcgcgctccggcgcggtaaaatcaccgtagactgtcacgccgggaatgccgcgcacgccctcgtaaaaccggcgcatcagctgccgctcccgtgcgccgatggactctgcgccctgccgcaggataaaatcgagcgctgcgtgcagtccggcaagaccgtgaccgttgagcgttccggcctcgagccgtgccggatattcctgcggctgttcccggtcgtaggagtgcacgcctgtgccgcctcgcagcagcggccgcagctccacgcccggccggatgcacaggccgccggtgccctgcggccccatcagacccttgtggccggtaaagcagagcacatcaatgcccattttctgcatatcgatcggcgccgctccggcggtctgcgaggcgtcgatcaccagaagcgcgccgtgcgcgtgcgccatcgcgccgatccgggcaatatcgagcatatttccggtcagattggaggcgtgcgtgcagacgaccgcctttgtgttcgggcggaacagcgcctccatgtcctcgtatcggatgtttccgcggcggtccgcgcggacaaaatcgaccgccgcaccgcgcgtctgcatatcgtacagcgggcgcagcacggaattgtgctccagatcggtcgaaatgacgtgatcgcccgccgaaatcagtccgtagaccgcgatattcagcgcctcggtcgagtttgccgtgaaaacgacatggtccgcgcgcggacagccgaacagctccgccagtctgctccgcgtctcgaataccatgcgcgacgcagacagcgacgcgccgtgcgcgccccgtgcggcattcccggcggtcagtatcgcgtttttcaccgcctcggcaacctccggcggcttgtgcagcgttgtcgccgcattatccagatagatcatgtctgtctccctttgtcagccgtacatttggacgaccgcgtctgtttcgtagccacagcctgcctgcgccagagccgcaaggagctgcggcttttcgtcgacctccgccttccatgcgagaccgcagccggcgctgacctgcgacgggatggggatcatgcgcccgggcaggccgccgttcgtaaacagcgcctctgcggcaagcgcctgctcggtcgaggaaaacgcgatcacgagcaccggccgtctgcgccgcatcacggacgaaggaccagatcggcctgcatctgcttttcggtgataacgtacatgttggtaacgccgccgacctgaagccggtcggtcaggccgtagtggctcaggcaggtgccgcaggtcaggatctcgacgccgagcgcggcgagatttttcagatcctcgagcgacggcgagccctcgcaggtaacgcgcgcgccgccgttgtagaacaggagggtcgacggcagcttttcctgctgggtgagcgcgaacaggaagcccttgagcaggatgcggcccagctcgtcgtcgccctcgcccatgtggtcggcggaaatgacaacgacggtctttttctgcgcggccggtacggtgcaggaaatttcctcatctccgctctccgcgaccgcgcccccggtcgtgatggtcacgcagaactccttttcgccgcgcttttcggtccggatggcgcagcccttgctctccgcaaggcgcgtcagattctgcaccgcgatctcgttgtccacgagcgtctgcaccgtgccggcgccgttcagctcctgcagcgcgtgcaatgtttttacgaccgggatcgggcatgcctcgcccatcgcatttacctcaatcatcaaacttcctccttcggaatattctgctgttattatagcacgacagtacgccctttttcaatcgttctccgtattgcgcaggagacagcagggaaacggtgcttttctgtccttcgggagatccgccgcaaaaaacgcttgcgtttccgcgtgtttgcggtatgatggaagtataatatccatccgatctgccgcagtacaaaaggagatacagccgaaaatggagcactacacaaaaatcgacatggcgacctggccgcgccgtgagcactaccgctattacagtcagacgctcaaggtcgaattcaatatgaccgcacccgtaaacgtaaaaaatctgctcggtttctgccgcgcgaacggataccgcttttaccctgcggcgatctactgtgtcacccggacgctcggccgcatcgagaatttccgtatgttccggaacgcggacggcgagctgtgcgtctgggaccgggtcgttcccaactacacgatctttcacgcggatgactgcacgttttccgactgctggacggatttctccgacgatttcggcacgttctaccgcgcggtcacggcggatatgcagaccttcggcggcaatcacggcatcaaggcgaagccgggtcagccgtcgaacttctactgcgtttcctgcacgccgtgggtctcgttcaccggctgcggcagccgcgtgacgggcagcagcgagccggccttctttcccattatcgtgatgggaaggtatgaggagagcggcggcgcggtcagaatgccggtcgcgctgtcaatcgcgcacgccgttgcggacggctatcacgctgcgctgttcttccgttatcttcaggaggagatggacgcgctcgcggcctccggggccggactttgacgcggatgctcctccgggaacggcctgctgtctgcaaaatgcggacggcgggccgctttcgttttcctgacgcgcccgccgagggcgctctgcggcagctcagcaggagagcgcgcggaatgcggcgggggagaccggaccgcttttgcgtgaaaagggacttttccgacaagctgtgcattgtaaaatctgcgcggaaaccgtataattgtatcagacgaaaaacgagcggaaggactccttccgcaggaggataccgtttatgaaattttttgaagccgtgccggacgagctgttctcgccgctcgcgtccccgaaccgggcgctgtatgcggacgcgctcgatgtgctctgcatggcataccggcaaaagctcaagctgcccgaggacgagctgtactccatgctgcgcagccgtctggagcagcagctcgcggacgcgaccttcgagggcgaggacatcgacgaaaacgagctgcgcgatatttccggccgcgcgcgctttctcatccgcaagctgtgcgcgaagggctggttcgagaaggagcgcggtccggatttccgggagtatatcaccgtgccgggctacgcgagccgtctgctcgaactgttccatgagctgcgcgatgaaaggccggcgcgcggcttttcctatgtgttcggcacctattccgcgctccgggtcgcagacgagaccggctctgcctatgagaagatggcggcggtctatacggccttcgacaatacgcaggcgctcatccgcctgctccggctggtctatcacaacgtaaagcactattttcagatgcagctcgagctgcacgacgtcggcgaagtgctttcgtcctatttcgatgatttcggtcagaaggtcatcgaggcgtacatccgtccgctcaagatcaaggactccgtgccgaaataccgcgtgcccatccgcacggtgctcatgcgctgggcggaggacgacgagcagctcgccgccatggcgagggcggcgcagcaggagcggcgcggcggcacgatggaggactgccgcgcggacatcctgcgccggatattctgggtgcaggagtgctatgacgatctggagcacgactatctcgatgagatcgacgcacaggtgcgccgctatacccgtgccgcgacgcagaagatcgaaaacctcacgagccgggagcagaacgttcgcggcgacctcgacgccgtgctgaccgcgctctcgcacagccgcagggcggacggcctgaccgacaggctgcggccggtgtttcagctgtatgagcagtcgtatctgtcggaaaagagcctgtggtaccggaaacgcccgggaaagcggtcgagagccgctgcggtgctgatcgaggagaacgaaaccgacgccgcctctgccgcacaggcggccgcgctgctgcattcggaatacggccgcgccgccgtcgccgcctgtgtgcagggctggctgggagaccgggatacctgcctgtcggaggacattccgctcgagaatgaccgggactatgtgatgagcctgctcgccgtgctgtccggcggctcgaggcgggcggcgtatcaggtcgaggagctcggcggctcggtctgtgaaaacggatattccattccaaaggtgcagttcagccggaaggagaacgagaaatgaatctggattttataagcagcgcgaccgcgaaggagcttcagcagttcaagtcggtctgcaatcagctgctcagccgcacctttgtcgtgcgcacgctgtaccgcccgggcagggaacgcctgaacaacccggactatatctttctgtccatccattttgaggccgtgcgcgattatctcagtctgctcgactgggatctgcggcacgacgaggcgaacggctgcttttacgtcatcaacacggacgaggccaaccgcctcatcctctccaagagagagaccgccatcctgctcgcgctgcgcatgctgtacgacgaaagtcaggagcgtctggggctggagcaggacgcactgtgcaccgtgcgcgaggtgctcgaaaaggtcgtgaccgactacgccatcctcccggcaaagccgaacatggatgaattcagacgcgcgatgctcgtgttcgagaaccatgtcgttatccagcgcatcgagggcagatacaatcagccggactgccgctttgccattctgccgaccattctgactgccgtttccgcagagagactgcacgagacggcggctgtgctgagaaaggaggagaacgccgatgaagaagctgaagaaaatactgctgattaactggctgtatttcgacagggagctgatcgaggtaggggacgtgaacttcctgaccggcaggaacggcgccggcaagtccaccgtcatcgacgcgctccagatcgtgctcctcggcgagaccaacgcgcggaacttcaatctcgccgcgaacgagcgctcgcagcgcacgctggacggctatctgcgcgccgacatggacgagaacaatccgcgctcgcgccgcggaaaggatttttcgagctatatcgcctgcgagttttatgatgatgcggagcgcagcagcttcgtgtgcggcgtcatgttcgactgccgccgcgacggcagccgccgcgaccatttctttatctacaccggcacgctgccggaaaactgcttcatcgaggaaggggaggccatcgacctgccaggcctgcgccgctttctcaaggagaagtgccgccgggcggaggtctgcgagacccagtgggaataccgccgcaatctgctctcgcgctggaatgtacatactgagcaggtgttccgcatgctgaaaaaggcggtctccttccgcccgatcgtcgatatccagcagtttatcaccgagaatatctgcgatgttccggacaagccggacatcgaggcgatgcagcagaatatccgcgactacaagcgtcatgagcagatggcgcagcggcaggaggaaaagctcgccgcgctgaacgagattgcgaagctgtacggagagatgcgggacacggccgggcgccggaagctcgagtcgttccttgtgcactggtcgcgcagcgagacgcttcaggcgcagatcgacggccgcgagcaggaaaagcgcgcgtgcagcgagaaacgcgcggcggcgcagcagaagatcgaccgtctggcggccgaggtgcagcagaaggaggcgcagcggcaggaatacatccgcaaaaaggacagcagcaatgcctgccgggagcttgaggagctggacagggcaggacgccgtctgctcgacgagcaggaaaagctgacgcgcaggctggagaacgaggcgctcgagatcaagcgcgaggcgctgcgtctggagcatctcggagagacggtcctgagctgggacgaggaggtatcgctcgacgccgtctgcgaggcggcgcagcaggtgcgcggcgcgtatgagccgctgaggagcggcgaaatgagcattttcgcgcagccgcagagcgtgttcgagacggcgcaggaggcgacggacgcgctgatgaacgccatgcaggaggcctctcaccggctcggagaccgtctcacggaggcgcgggagcagctcgggaagaggaaaaaggtgctcgccggtctgcgcgataacgtcaaggactatccgcgcggcctgctggcgtgccgggcgcggctcgagagcgagcttgcgcagcaggtcggctcgccggtcgccgtcgacatcctcgcggacgtgcttgagatcgcggacgaagcatggcgcggcgcggtcgagggctatctcggcagtcagaagctgtatttccttgtcgagccggcgtattatccgcaggcgctgcacctttacgacagtatcaggcgcgacccgaaattccgcgccttcggccttgtcgacattggcagcctgcgcgaaaaggaaaagctccgtcccatggacggcagtcttgccggaaagatcgagaccgaaaacccgctcgcgcgcatctatgtggactatctgctcgggcgcgtgaagtgctgcgcgtcggtcgacgagctgcggcagtacaagaccgcgatcacggcggagggcatgctgtatcagggttatgttgcccgcgcgctcagccgcgagaggatggaggacgcctttatcggccgctatgcggtcacgctgcgcatccgccgtctcgaggaggaaacagcgcagctcgagggcgagcttgcacgcagggagccggtcttttccgtgctgtcccggcagaagcagccgctcctgctgccgtatttcgtgcagaaggtcgtgcccgaacggcagggtgattacctgcgcgtcgaggagatacgcgaggaaaatgcggcgctcgaggagcagcgcgggcatatcaatctgatgtggatcgaggagcaggaagcgctgatcgagagcctgagcggggagattcatgcgctgagccggcagaaggaggagcagatctcgctccgcggtcagctcgatgagcgcatccgtcagctgacggatgagatcctgcccgggcagtaccgcgagcgcggcgagatgcagaccttgctcgagcgggagtacaccgaggcgtaccgcgacgaaaccggcgtgccgcgctaccgcatggagcttgcgcggctgaaaaagccggaaaacgtgctccatgcgttttccgagagccgtgagcaggctgagaaggacacggagtccgcacgcagccgtctgttcgcggcgcgccgcgcatatgccgagcgctttgcgccgtgcccgttccgcacggaggcgctcgacaacgacgaattcgacgcggagcgccgtgcgctcgaggagagcgagctgccgcgctaccgccgcaagatcagggcggcgcgcgagagcgcaatggagcagtttcagaacgacttcctctcccggctcaagagcagcatcgagcaggtgcaggcacaggtgagaaatctgaaccgggcgctgcggcaggcacagttcggcacggacagctatcagttccgcgtcgaccgcagcccggattacgcgaattactacgacatgatcatggcgcccgagctgatggagggcgatattacgctgttctccgcgcagttccaggagaaatacggcccgctgatcgacaggctgttcagccagatcacgatggcggacgatacgcagcccaatgcccgcaggcagagcgagctgcaggaaaacatcgagcgctacacggatttccgcacctatctgaaatttgatcttgagaccaccgaccagaacggctcgaagcagctgctttcgcagaccatgggcacgaaatcgggcggcgagacgcagacgccgttctatatttcggtcctcgcctccttcgcgcagctctaccgcgtcagcgatacctcgagtctgggcaacaccgtgcggctcgtggtgttcgacgaggcgttcaacaagatggacagcgagcgcattgtggaaagcgtgcgcctgctgcgggggatggggcttcaggcgatcatctgcacgccgccggacaaggtcgcagacctcatgccgatcgcggaccgcacgctgctggtcgacaagcagaaataccgtatgcacatcctgccgttcggcagggagctcgcgcaggagtaagagccgcgcaggcgcatccaaaccgagggcgtgtatctcggctttgatgcgtccggagggagaaggtttccgcatgggaacgttcggacgactcgtgttctgcgcagtcagaatacagattgtcggaaaacgatagttttttcgacaggttcaaaccggggacaggctccccggtttttttgtagaggaaaagctccggaaacggacaggaaaacacgcctgcgggacacatcgcagaacggactgcacggggagaaaaaactgcatccttccttgcgatacggacaaatgtctttatgcagaaaacacaaaaatgaacgaattgattttttaataatcggtagattatctgaaattgttgaaaactcaaaaaaaaacg

SEQ ID NO: 12857 - DNA, 8152 bp, Unknown
  gut microbiota DNA sequence
gatggataggaaaacctccattccagagatgaaaaggagaaatcaccatgaaaaagacactcagtatgcttctggccggcgcaatgctggctgcggcgctgaccggctgcggttctcccgcttccaccggctccgacaacgcagacagctcgaccgacagctccgcttccggcgcagccttcaagctcggcggcaccggcccgctgaccggcgcagccgcaatttacggcaacgcctgcaagaacggcgcacagatcgcggttgacgagatcaacgccgaaggcggcgatattcagttcgagctgaactatcaggacgacgagggcgacgccgagaaggccgttaacgcctacaacaccctgaaggactggggcatgcagctgtccctcggctccgtaacctccaagccgtgcgaggctaccgcagcagagacttacagcgaccgcattttcgctctgaccccgtccgcttcctccaccggtaccaccgagggcaaggacaatatgttccagatgtgcttcatcgacccggcgcagggtactctggctgctgacaagatcgcagagaagaagctcggcaccaagatcgctatcatctggaagaacgatgacgtttactccaccggtatccacgacaagttcgtagaagaggcaaagaccaagggtctcgaggtcgtttccgacatgacctttaccgattcctctgcgaacgatttctccgtacagctgaatgacgcgaagagcaagggcgcggagctcgtgttcctgccgatctactaccagccggcttccctcatcctgacgcaggcgcataacatgggcttccagaccaccttcttcggcgtagacggcatggacggcatcctgacccttgaaggctttgatacctctctggctgagggcctgatgctgatgaccccgttcaacgcaaactccaccgatgaaaagaccgcttccttcgttaagaagtatcaggagcagttcggcgaaaccccgaaccagttcgcagctgacgcttacgactgcgtatacgcttacaagcaggctctcgagaacgcgggcgctaccccggatatgtccgctgaggacctgtgcgacaagatgatcgagcagtttacctctatgaccttcgacggcctgaccggtaccggcgcaacctggagcaccgagggcgctgtcaccaaggacccgaccgttgctgtaatcaaggacggcaagtacgtaaacgtataatccactgaaatatatttcatagcggattgctcaaaggcgagtgaaggagggctgttttgtaagccctcctttccgcctattcttctgcattccatctgtttttatggggtggggcgacggcttgacgcggctcgccgagccaccgccccatttcataagcaatttttgagagaaatatgatttgaggtgttccaaacatgagctttttgaaccatttgatcagcggcatcagtctgggcagcatctacgcgatcatcgcactgggctatacgatggtttacggcattgcgaaaatgctgaactttgcccacggcgatgtcatcatggtaggcggctatatgtgcttctgcgcgacgacctatctcggctggccggcatggatgggtgtcgtgctcgcggtcatcgtctgcacggtgctcggcatggcgatcgaaagactggcctacaagccgctgcgtgcggccccgtcgctcgccgttctgatcaccgccatcggcgtttcctacttcctccagaatgcggcgctgctggtctggacctccaacccgaagagcttcagctcggtcgtcggcggcagcgcgatcagcctgttcggcggtcagctccagatctcccgcgtcaccatcgtgaccatcgcggcctgcgtcatcatcatggtcgcgctcatgctgtttaccggcaagagcaaggtcggcaccgcgatgcgcgcggtatccgaggacaagggcgcggcgcagctgatgggcattaacgtcaacacgaccatttccatcaccttcgccatcggctcgggcctcgcggcgatcgcaggcgtgctgctctgctccgcctacccgaccctgatgccgacgaccggctctctgcccggcatcaaggccttcaccgcagccgtattcggcggcatcggctcgatcccgggtgcgttcgtcggcggcgtgctgctcggcatcatcgagatcttcgccaaggcgtacatttccactcagctgtccgacgcgatcgtgttcggcgtgctgatcgtggtgctgatcgtcaagccggacggcctgctcggcaagcacgtgagcgaaaaggtttaagggggaggcatcggatatgaacaagttaaaatcctatgcggcgtccagacgcggacgcgataccctgctttcgttcggtatcgtcatcgccgcattcatcatcgtacaggcgctcatcgcgggcggcatgatctcgagccagatcaagggcctgctcgtgccgatctgcgcgtatgtcgtcatggcgatctcgctcaacctgaccgtcggcatcctcggcgagctgtcgctcggccatgccggcttcatgtcggtaggcgcgttcgccggcatcgtcaccacgacctgcctcgcggacgccatcccgctcgctccgctgcgtctggctgttgccatgatcgtcggcgcggtctttgcggcgctcgccggcgtcatcgtcggcgtgccggtactccgcctcaagggcgactacctcgccatcgtaaccctcgccttcggtgagatcatcaagaacgtcgtcaacgtcatgtacctcggcagggatgcggacggcctgcatttcagcctggtcgagcagaatttccagctcggcgacggcggcaagatgatcatcaacggtccgatcggcgtatcgggcgttaccaaaatttcgaccttcacctcgggcgtcgtgctcatcctcgtgacgctgttcttcgtgctgaatttcattaacagccgcacgggccgcgccgtcatggcggtccgcgacaacaagatcgccgccgactccatcggcatctcggtcacgcactacaagctgctcgccttcgtcgtttccgcggcgttcgccggtgcggcaggcacgctgtacgcgatgaacttctcgaccgttaccgcggcgaagttcgacttcaacacctctatcctcgtgctggtattcgtcgttctgggcggtctcggcaacatctggggctcgatcatcgcggcggcgctgctcacgctgctgcctgagctgctgcgcggcctttccaactaccgcatgctcatctacgcggtcctgctgatcgcgatgatgctgttcaacaactcctcgctcaaaaagcgcatgctcgaaaagcgcggcatgaagcagatggagaaactcgaaaaagcggcaaagtccggaaaggagggcgcgtaaaccatggctatgctcgaagtaacctcgctcggcatttcgttcggcggcctgcgcgctgttgacgagctgagcatgaaaatcgaaaagggcggtctggtcggcctcatcggcccgaacggcgccggcaagaccaccgcattcaatatgctgaccggcgtttaccgcccgaccgacggcggcatccgtctggacggacagaacctcatcggcaagaagccgcacgagatctgtaaaatgggcgttgcccgcaccttccagaacatccgcctgttctccgaactgagcgttctggacaacgtaaagaccggcctgcacaaccagatcacctactcgttcgcggaaagcatgttccacctcggctcctaccgcaaaaaggagaagcagatggacgagaaggcgatggagcttttaagcgtgttcggtctggagggcgtcgcggattaccgcgcggccaacctgccgtacggcaagcagcgcaagctcgaaatcgcgcgtgcgctcgcgaccgagcccaagctgctgctgctcgacgagccggcagccggtatgaacccgaacgagaccgaggagctgatggagaccatcgaggtcgtccgcaagcgtttcggcgtcactatcctgctcatcgagcacgacatgaagctggtctcgggtatctgcgaatatctgtatgtactgaacttcggccgtctgctcgcggagggcacgccgaaggaagttctgagcaatccggaagtcgtcaaggcttatctgggcgaataagagaggaggaaacaagcttatggcaatgctcgaagtcaaggacatcaacgtttactacggcctgattcatgcgctgcgtgacgtttccttcgaggtaaacgagggcgaggtcgtcgcgctcatcggtgcgaacggcgccggcaagaccaccacgctgcacaccatcacgggtctgctgccgtcgaagggcggcacggtcaccttcgagggcagggacatcacccgcaagccgggccacgctatcgtgcgcctcggcatgagccacgttcccgagggacgccgtgtgttcgccggtctgacggttgcggaaaacctgcgcatgggcgcgtacacccgcccggcaggcgaaattccggagtcgctgaaaatggtctacgagcgcttcccgcgtctggaggagcgcaagaatcaggcggccggcacgctgtccggcggcgagcagcagatgctcgcgatgggccgcgcgctgatgagcaagccgcgaatcctgctgctcgacgagccgtcgatgggtctgtccccgctgttcgtcggcgagatcttcaagatcatcgaggacgtctccaaggcaggcacgaccgtgcttctggtcgagcagaacgcgaagaaggcgctgtccatcgcggaccgcggctacgttctcgagaccggcagggtcgtcaagaccggcagagcctccgatctgctgaacgacgactcgatcaagaaggcttatctcggcgagtaatttggaaaagagggttggttttatgaagccttatatcattacaatcgcccggcagtacggctcgggcggcaagacggtcggtaagatgctggcggacaggctcggcattccgttctacaaccgtgagatcatcacgatggcctccgaggacagcggcgtgaacgcgatgctgttctccgacgagcgcctcaagagcgatttcatcgcgcgtctgcgcgcccgttaccgcggcgatatgccggtgccgaacgactcctcgaagtcctacctcagggacgaggcgctgttctcgtatcaggtgaaaatcatcgagcggctcgccgatcagggcccgtgcgtgctcatcggccgctgcgcggactacattctgaagaatcgcccggatgttgtgcgcgttttcgtgcacgccgacccggagttctgcttcgagcaggcgatgaaggtcgattctctccctgaaaacgaggtcagaaagaaaatcgccgaaatcgacgagtatcgtgcgcgctactacaagcaccacacgggccgcgactggtacgacgcgagaaactacgacatctccatcaacagcggcgtgctcggctttgagggcgcggtcgaggagatcgtaaagtacatggaagtccgcagcgagttctgcaagtaaataagcgaaagggcgctcccgaataaggagcgccctttagactgtcgcgaaaacgtacataattgcaaaaggccgttcccgaggagtatgtgaggggacggccttctgctgtatataaagtgtatcggatgtggtcttgcttatgagcacagcccgcatttttcgcaggcggacggggtggcggcgcagccgccgagggcggtctcgcgcagctcgagcggaatgcggcggccgacagcgtacatggtgtcgagcatctcgtcgaacgggatgaactggcggataccggcgagcgacagctctgcggcaacgagggcgttcgccacgcctgccgcgttgcggttctggcacgggtactcgaccagaccgccgaccgggtcgcagaccagaccgagcatattcatcagcactgtggacgccgcgtcgagacactgctcgggagagccgcccatcagctcgaccgcggcgctcgccgccatggcggaggcgacgccgatctcggcctgacagccgccgaccgcaccggcaacagtcgcgttgcgcatggcgagatagccgatggcgccggcgttgaacagcgcgtcgatcagacgctcgtccgagattttgtagcagtcctgaagcgcgaacagcatacccggcagcacgccagcgctgcccgcggtcggcgccgcaacgatgaggcccatcgaggcgttgacctcgagcaccgccatcgcgtactgcgcggccttgtgcagcacattgccgcagatcgagcggccctttgcatcgtgctgcgcgagctttttcgcctcgccgccgatcagcccgcccatggacttgacgggcgttttgagcggcgtcatggcagaggcgcgcatgatctcgagcgcgtgcgtcatgcggtgcgtgatctcgtcgcgcgtgctctcgcccagctcgcattcgcggcggcgcatgatctcggagataggaagctgctgctgtgcgcacagcgcgagcagctcggatgcgtttttgaaatccataatctgctctcctccttacggttcgatgatcatgacgtcgcggacgttcgggttgtcgcggagcggctcctcgatgccctcggggaagcggccgtccgactcgacgatggtgtaggcggtatgtcccttcgcctcgcggaacaggcgcatgaacgcaatgtttacgcccttgtcgctaagcaccttggtgatgtgcgccacaacgcccggcttgtcctgctgcacgacgatgaccgtgctgtattcaccggtaaagtcgacctcgacgccgttgatgcgcgcgatgcggcatttgccgccgccgagcgactcgccgcggatggtcatgacctgaccggcggcgttctccatgcggatgtccacggtgttcgggtggacgtcggtctcggtttcacagggcgtgaacgagtaggacaggccgcgctcggtcgcgatggaaaacgagtcgcggatacgggtgtcatcggtcgagaagcccatgatgccgccgagcagggcgcggtcggtgccgtggccgtggtaggtcttggcgaacgagccgtacagggtgaaatccgcctttttgagcggcggcgcgatcattttgtgcgcgagatacgcgatgaccgccgcgccggcggtatgtgagctggagggaccgatcatattcggtcccagcacatcaaaaacactgataaaggacataggggattctccttaccgagcggcagatttgcagataaacttgcggtagatggtctccacgatcacgccgatcgcgttgtcaccggagacgttgcaggcggtgccgaaggagtcctgcgtgatgtagagcgcaaccatgatggcgcagatcgggccgctcgggtcgccggcctcggtgccgaagatcatgtacaggaagggcagggcggtcatgatggagccgcccggagcaccgggagacgctaccatggcaatgccgagcgtcatgatgaacggaatgaccgtgccgatggagatcggcagctgattcatcaggcagactgcggtcgcgcaggcggtgatggtgatcatcgagcctgccatgtggatattcgcgcacagcggaaccgtaaagttgcggatttcagcggaaatgccgtccgcctctgcgcactggaggttgaccgggatggtggccgcagaggactgcgtgccgagcgcggtcgcgtagccggggatctggttgcggatgagggtgagcgggttcttgcggctgatgagaccggcgatcacgaactggatgcagatgcagatcaggtgcatgatgataacgacgatgaataccttccagagaatgccgaggatggcgaaggtcttgccggacttggtcatgtcggtgaacgtgccgcagatgtagagcggcagcagcgggatgatgacgttgtgcaggacgcagtcgatgatgccggagaaatcggaaacgccgttgtagagcgtgtcgccgatggtcctgccgcgcaggctggacatacacaggccgagcacgaacgcgagcacgacggcggacagcgtgttcatcagcgccgggatctccaggctgaaatacggctcgagcgagttgccggcagtcgcggcgatcctgtcgagc

SEQ ID NO: 12858 - DNA, 55506 bp, Unknown
  gut microbiota DNA sequence
gagcgtcgagcagtaggcgagcgcgaccgtgatgagcagcagcctgcctgcgccgctcttgaggttcgcgatgcccatggtgacgtaggcgaggatcatcagcgggatgatgaacgacaggaactggctgaagaacgacgagagcgtcactacaaagcggcagaagccctccggcaggaactggccgaacaggatgccgatgatgatggcgatgatgagtttgggcagaagcccgagcttgaactttttcttttcttccatttcttttctcctccttgattttgcggcgcagaccccctcgttatacttctctgtctgctgccgtgaaagactgccgcggactcttccgcattttgggcacaaaaaaaccacttattttcggcaaaatgctgtaaaatagatggctgggtttgtggacaaagtgcaaaagagaaattctgtggcaaacttccaaattccttcttgacccgtttacgaatttagtatattctgtttatgcaattaagtcaaattcatatattctatcatttggattaaaattctttataacagacgaaggggaaaacacatggagatccgtcagcttgcaacgttcatccgcgtggcgcagttcaacagcttttcgcgcgcagcggagagcctcggctattcgcagtcggctgtaaccgtacagatccgccagctcgaggaggaactggacacgcgcctgttcgaccgcatgggaaagcgcatcgcgctgaccgacacgggcgagcgtttttttaatcatgcctgcgagatcatgagccaggtcaatcaggcgcgcctgtcggtcacctccacggcggagctgcacggcacgctgcatatcggcacgatcgagtcgctcgcgtgcttgaagctgccgaccgtactgcatctttaccggaaatacaatccgaaggtcaccatccgcatcacggtcggcgagccggagcagctgatcgaacagatggagcgcggcgagctggatatgatctatgtgctcgacgagccgctgtacagcaacaactggcacaagctgatggagcagcgcgaggagatcgtgttcgtggcctctgcgtcgctgagcggggagctgagcggccgcgagctgacgatcgaggagctgctcgagcagccgttcttcctcaccgagcaggataactaccgccgcgtgctcaaccgccgtcttgccgcgcggagcacgatactcaccccgtcgctcgagtgcggcgatacctcgctgctcatccgcatgctcgaggttgaccggggcgtgtcctttctgccgtggtacgcggtcgagagcggcgtacagcagggcaggctgatccggctgtcggtcgaggactgctatatctcgctctaccgtcagatcttctgccacaaggagaaatggcgcacgcgcgagatggatgaatttgtgcgtgtcgcgaagctcgcagacgagtgaaagcggcggggcggagagaccattttccgccctttaaaaattttttgaaaaatttcaaaaaaactattgacgaaacggcaaaaggtctgtataatacatattgttcgctgcggttgacaccgacgaacaacaacttaacaagatggagagttggctgagtggtcgaaggcgcacgattggaaatcgtgtaggcgtgatgagcgtctctagggttcaaatccctaactctccgccagaagtgagctgtaatcgaaagattgcagctctttttgcatccggcgataaaaacagaaaaaccgcccggaggggcggcaaattgacagggaaagtcgctgcatgatataatgctcttgccggtacaggcgatgcggttgttcctccggaacggaggtgattgccagtgtcaacgctcgaagtgcttgcgcttttgaacctgatctgcgtgattgtctttggtattttggaatacataaagaaataaccgcccccccgtagctaaaagagagcggctttttcttcgacttaaaatcgacaagaggaacgaccgccctccaacacagggcaatcgcctataccggtattatacttcaaacgttccggctttgtcaagacaacaccgggacggtttgcgttgtgacaaaccgaaaagacctgagaggtgatcgggatgggctacattcgccgtccttcctattataaagacttccactgcatcgcgtcggactgcacggaaaactgctgtatcggctgggagattgatgtagatgagcagacgcttgcgtactataaaagcatcggcagcgacttttcaaggcgtctgtgcgccgcgatcgcgccggcagacgagcaggcaggggagaatgcgcactttattctcgacgagcgggagcggtgcccgttcctgaacgagcgcaacctgtgcgaggtgtacctgaacctcggcgaggagcatatggcgcagatctgcactgaccacccgcgctactacgaatggtttgcaggcggtcgcgaggacggcgtggggctgtgctgcgaggcggcggcggagcttatcctgcaaaagcgcggctatccgcagtgggatgtgaccggcgaagcggacgaggagccggacgaattcgagcaggtgctgttcgccatgcgcgatcggctgttcgccattatcaagccggaaacgccggtttccttcgatgaaaagctggaccggctgcaccttgcctgctgtgaaatgcagaacgagtatgacgacctgctgttccctgtggagggggacgccgaatacgcagacgaggaggacgagccgttccgctggtcggccatgttctggtccgaagcgtgcctgaaggcgctgaccgagcgtcttatgtctctggagatcaacaaggacgactggcgcggactgcttgcagacgtacacgcgcgtatccccgagctgctcgcgcgccgcgcggatttccttgccgcctatgcagaccggctgtatgaatatgacgagctgctcgagtatttcgtctaccgccactttatgaagacgctgggcgacgatgtgctgatcgaaaaggtgcagttcgcgctcatctgcacgtgcttcatccagctgctcggtatttaccgctggctgaccgacggcaggctgacccattgggagcagatctgcctgtgcaaggcctgctcgcgcgagatcgaatacaatgaggacaacgtagaggccgtttcgcggtttctgacgatggattaaacagatgaaatcccctgcatcgaaacgctgtgagcgtcggtgcaggggatttttgtctcacggaagcgcatcgagcaccgcgtcggtcagatgaacgggcgacagaccgcactccgtgcagcgctgcgcgaacgcgcggataaattcctcgtcgcacgaaacatccgaaagcgtcagaagcggcagccatccgcgttcggtctcggtctccgcacgcagtccgaaggtcgtataatgcccgagcagagcggaaaaacagctttcctttaccggaagataacggcatatctgcatgaaaacccctccttttctccatcatacgccatgcagagcgcgaaggggcgcgaacgctgtcgaacagaaaaattttcgaaaaaattcatgagagattgaccgaatgaggtcaattttcgcggtttccgcgctatgggtagagggaccttcggcgacgggaggtgaaagcacatgacgaccgaggtgatcatcgcaggcatgagcctgctcgggacgctcgccggttcattcggcgggatttacgtttcgggcagcctgacgcagtaccgtctgcgtcagctcgaggaaaaggtgaaccgccataacaacctcatcgagcgcacgttcaagctcgaacaggaatgcgccgtgctcgaggaacgggtgcgcgcggcggaccggcggatcgacggactggaggaggaacaggcatgaactggaaggtaagaatgagaaatccgtggttctgggtgggcatcgtgagcgcggtcgtgagcgcgctgcgtctggacgtgaacgcactgacgagctggggagcggtgtggagctgccttgccggcattatcgaaaacccggtgcagcttgcaacgctttgccttaccgtgctgagcgtattcatcgaccccacgaccgccggtctgggcgacagcgcccgtgcgctgacctacaaaaagccggccgatttctaaagaaaacgccatcgctcgagaatgttctctctgcgatggcgttttgtctacctgtcgcgcagacggagtgcgcgtgcaggtctgcgcgtcgtgatgttgcggacgccttgcgtgaggaaccagtcgaggaaaatctcctcgttgaccgtccaggcggaaagggcgatgccgctgtccttcagcgtttcgatgaagcggcgcgtgatgagcacctgattcatgttgaccgtcgcgatgccgtgttcgcggcagactttcgtgatgatctcggcggcggtcagctcgaaatccggaatgttgcggtagttcaggtagaggtcggggacgtactcctcgatgttgaggtagacctcggcgcagtcgtgcagctcggggtgcgcggcgaagatgttaacatcgaccgagccggagaagatgaggcggccggccatgccgcattcggcggcgagcgccgcgacagccggttcaaggccgcgttccttgaggtcgcagttgatgcgcacgccgggctttgcggcggcgagggcaagcacctcgcgcagtgtcggcgcggtatggtcggcggcatcgtggccgagcgcgagcgttccgtccgcaaggcggcgcacatcgacctcgaacgcgtctgcgtcggtcgaaagggcgtaccgaacacaggcaagcgagttgtccggtgtaccgtccgagccggaatgcgcagtgattagagttttatctgacatgagaatcaacctcccacggaaatccaaaatatacggaaatctaaaatacacggaagccccaaaacgctcccacgcctaattataatcaaaaccgccccgccgaacaacccttgccaaacaatttttacgcggatttaagaggggcacataccttttcgcggttctcggacgataaaacagcgcaggtattcgcgcgaaagcgcgtattaaatagaatttgcgcagcaaattcataaaaaccgggagcatgtatcacggtttttatacttccagagagagaaaagtttctgcacaggaacttttctccgtccgtgttttgcgaagtcaaaacacagcttgtcggcaaagcgtcagctttgcgacagcttggcccagccgccgtgggcggcgtcgttcgggtattttttggcggtttccttgggaaccgccaaaaaaatatagggggcttttgaagccccctataaagcgtaagcgttttactgctcccagtccttttccttgaggttggtgtaaatatacacgcctgcggaaaccgagcagagcaggaacatgatgaccgacagcgcggccgaacggttgtaggccagatacttgttgaactggtcgaacagcgcgatacccagcatcttcggggagttgccgcccatcaggtacggggtagtgaacgaaccgacgttggtcatgaatacgaacgtgcctgcgatgatgacgtccttgagggacagcggcaggatcatagaggtgaacaccttgaacttgcctgcgccgacatcgcgtgccgcctcgataatgctgtccggaatagcacccagaccggcggtgatcatcattgctgcgaacggaatgttgaaccagaggttcatgatgatcatgccgcttgcgtggtacatcaggccgagcttgaggttcatgccgaagtgcagaccgatgcggttgatgagaccggagtcgcggatgatcgtgatcatggcgtaaaccgcgcacatcgccggtacgaaacgcggcaggaggtacagcgtgccgatgctctttgcgatgcccgaatggacgaagcgcagatagagcgcgagcaggtacgcaacgaccagcgcgatgacgacggtcgcgataacgacgaacagcgtgtacaggatgttcatgcgctgtgccggctcggtgaagaagtaggcgtagtttgcgagcgtgaactcgccggtcttttcgtcctgaaagctctggatgacagcggaaacgatcgggtatgcaacggtcagcataacgacgagaaacgccggcaggaccagtgcgtaagcgaccagtttttgcttcagggtcttactcattttatatcccctcgttcttggttgatgcgtggtgaaaagcacgggcttcaaggtcggggcggccccgcaggaccgccgcgatcacaatgtgctttttagccgatggagccgatctcgttgtcccagcgttcgttgaactgggtgccgaggtcgccgatggacaggatgcggaagttggaaacgtccagaccctggagatcctcataaccggtcatatccattttgctggtgtcgatcagcgggatagcggccatgtcgttgaccatgatctgctgtgcctgctcggagagcatgtagttcatgaatgcgtaagcgccttcctcgttggagccgaaggtcgggatggtcagagtctgtaaagagccggtcagagacgggttgatctgggtgatcttgatggtgtccttgatggcgccctgtgcacgctggctcagtaccatgtcagcccagttcgggcacatgtcgatctcgccctggttcagaaggtccagagtaccctggttcttgttcgggtaaacgatggagccgccggacttgtacatgtacggatggatggacttgaggaactcgaagcccttgtcccattcgccgacccacttctcgtcgccggaggtgatagcctcttccggcaggaagttgtagaccgaggtgcgagcgaaggagtcgcctgcgccgccggtgccgggagcgttgtaagcgaagcggcccggattagccttcatccactcgaccagctcgtccatggtcttgggcggggtcggaaccttctcggagtcgtaggcaaggataacggtggtgccgcggtacggctgagcgtaatcctgcgcgaccgcgctcttcgcctcaacagatgcagcgttcggaatcttggacttgtcgagctttacgaaggactcctcgccgatcttggacatgatcttcgccaggtcgtcgccgctccagtcaacgatgtcataatcggtgttggtctggcctgccttgccggcagctgctaccatgtctgcgagaccctgtgcgccggtaccggagagcatgaactgcagctcaacctgatactggtccttgtattcggagttggtgttgaaatcctcggtcagcttctcgaagatggagcggacgttgtccgagccggtcgcccacagagtaacagtggacttgccgccggaagcggagtcgccgccgttgctgtccttcgaagaaccgccgccgcagccggtgagggctgccgtcatcattgctgctgcaaggaagatcgaacctaatctcttcagtttcatttttcattctcctttttctcttatacatactctaaggggatcgacacgggtgtgaagctcacccgaatgtctgcgtttttcaggcgctcatggcgctgtgttcccgataaaggatgttgtggttaaaaattacttgtcgaaaacggtatgcttgccgatgtgcatgccgaccgtctgaccgacggacagcttctcgctgatgtcgcggtcaacgaagcacttgataacgttttcgccgcgctgtacgttgactaccacgtagtggccgagcaccatgatggtgcggacggtgccggtgaagtcgcccgagccgtcgatggaaacggtaacgtcctccggacggacggcgatggtcttgtcgtccttgtcgatgaagttcatctcgccgatgaaggaggcgacgtggcgggtggccggtctgtcgtagatctcggtcggggtgccgatctgctcgaacttgcccttgttcataacgacgatgcggtgggagagggacatggcctcctcctgatcgtgggttacgaatacgaccgtgatgccgaggtcgctctggatttttttcagctcctcgcgcatctgctggcggatcttcgcgtcgagcgcggagaacggctcgtcgagcaggagcagcgagggcttgaggagcaggctgcgcgcgatggcgatacgctgctgctggccgccggacatctggttcggatacttcttctcgcagccgctcatggatacgagagcgagcatcttcttgatgtctgcgtcgatctcagctttgggcaccttgcggagcttgaggccgaaggcgaggttttcataaatggtcatgtgcggccagaggttgtagctctggaacaccattgcggtcgggcgcttctcggggggcaggccgatgatggactggccgtcgatggtgatgtcgccgctcgtgacgtcgaggaagccgccgatggtgcgcaggatggtggtcttgccgcagccggaggggccgaggaaggtgacgatctcaccttcgtaaatatcgaggttgatgtgttcgacaccgtcgccgttgtcgtacttcttggtcatatccttgatctggagcttgatcttacgttcgctcatgggttatatatcctcctgtatttcgatggcagatgctgccttatttcatcttgaagccgccggagattgcttccggaccgatgtacttgcgcattgcgaagatcatgagtgcggacgggatgatcagcaggatggcaaataccgcgccgatctggaccgccgaggaatcgagcacgatgccgtacattgcgaccggcatggtctgaaccctggccatgccgacgagcatggtgccctgtgcctcttccatcgaaccgaggaaggtgtagagcgttgcgaccgagatgcccggcatcgccatcgggagcgttaccttgaagaaggtgcggatggggcctgcgccgacatcacgcgccgcttcctcctgctggcggtgtaccgcgcggaacgcgctcgacgggagccataccatgaacatcatggagttgatcatgtggatgatgacgacgccggtgtaagtacccatcaggttatacttgtagaacaggaccgcgatggaggtgtagatgccgagcttcgggaatgcgttggtcagcaggaaggacagcatgaacatcttacggccgggatacttgaagcgtgcgatggagtacgccgccgggatacaaagcaccatggaaacaccggtggtgatgatcgccacgatgaaggactgcgtgatcgaggaaacgaggctcttctggctgaatacgtagctccaccatttgaaaccccactgctgcggaaggatggccggagcctgatactcgtttgcgaaggcgagcatcagcatattgatcatcggtccgtagaagaacaggatgaacgccgcgagcaggacaaattcaaggaacttgcgtctgcctaccgcatggtagaaacgtttcggattgagcattttgaacattgaattcttacaccccttttttctttcgcccgtccggcaggatgctctctcttcatcgaccggagccggcacaactcatttcggaacgcgctgttttcccctgaaaaggacaaaaaaacagccagatataacatatgacagttctttcccactcggaaaagcacgcccatgttaccctgactcaaatctctgaaagcaacattccttaaccttgacctcagtatagcacgctcttcgggggtgtgcaagtgcaaaatggcaagaagttgactttttacacaaatctaacataatacgaacatttactttatgcaaagtgacggagaaaaagcagtaccaacccttccgcacgtaaaatcagcgggacgatatttgtgcagatttactgagctgcgcctgccggacggagcgctgtctgtgcagcatcaccgggacggttgcggttttgccgcgagatatgctataatgaggataccgatttgaaacaaacgaggtgcggcggcagccgcgccgatggaggatacaagaatggaacacaagagggagaggtttctggacgctcttcaggactgtccggtgatcgcggcgctcaaaagcgacgagggactcgaaaaggctatcgcgagcgactgcacgaccgtattttttctgtacggtacgattttgaacatcgcctcgcacgtcgagcgggtcaagcaggcgggcaagatcgttttcgtccacgccgacctcatcgagggtctgaccgcgcgggacatcaccgcggatttcatcgcgcagaacacgcaggcggacggcatcatttcgacccgcccgaacatcatccgcagggcaaagacgctcggcctgctgaccatccagcgctttttcctgttcgactcgctctcgttcgaaaacgtgctgcgccagagctcgaacgcggacgcggtcgatctgctcccgggcaccatgccgcgcgtgctcgagcggctgaagccgcagatccgccagccgatcatcgcgagcggcctgctctcggacaagcaggacgtcgtcgcggcgctctccgccggcgcgcaggcggtctcgacgacaaagcccgagctgtgggagatctaaaatatcggcacactgaaagggcaggtaaaaatttttgccgcccttttagcgattctgctcagaagaaatcgcttgcaatcaggcaaaacctgtgatatagtgaaaacagcaaaaatgaataagtttgtttgcttgtgagattagagtcaaagtaagccgttgccgcagagcgaatgcactgcggagtggttgctttggcttttttttgttgggaaaacggagggaaaagtatgtatgatgtaaccatcgtgggctgcggcgtggtcggcgcatcgcttgcctatacgctctcgcagtacaggctgcgcgtgctcgtgctcgagcgcgagaacgacgttgccatgggtacgacaaaggccaacagcgccatcgttcacgcaggctacgacccggagaacggcacgctcatggcaaagctgaacgttcgcggctcggagctgatggagcagctgtgccgcgacctgtcggtcggctacaagcgcatcggctcgttcgttctggcgttcgatgaggagcagaagcagcaccttgagcacctgctcgaaaacggcgtccgcaacggcgtgccgggtctgcgcatcctcgacgcggaggaggcgcacgagatggagccgaaccttgcggaaaacgttgtcgcagcgctgtacgcaccgagcgccgcggtcatcgacccgtgggggctgtgcatcgcagaggcggagaccgccgtgcgcaacggcgttgagctcaggctgagaagcgaggtcaccggtctggaggacaagggcggccatgtgctcgtacataccaaatccggcgattacgagacccgcgtcatcgtcaactgcgccggcggctggggcggcgacatctgcgtgatgaccggcgagaccgagtgggaggcgcagccgtcgcgcggcgagtattacctgctcgacaagtcgagcggcaatctggtcagccacgttatcttccagtgcccgaacaagctcggcaagggcgtcctcgtttcgcccaccgtacacggaaatctgatcgtcggcccgaacgcagtcgatgtcgacgcgccggaccgcagggagaacacgcttgcaggcatggacttcgtcgcggagaccagccgcaggagcgttccgtcgatcgatttccgccagtccatccgcaattttgcaggcgttcgcgcgaacacgagcgaaagcgacttcatcatccgcccggcgaaaaatatgccgcgcctgctgcatattgccggcatcaagtcccccggcctgtccgcagcgcccgcgatcgcggagtatgctgccggtctgctggaggacatgggcattgtcctcgaaaagaaggacgagtggaacggcagacgcgagcagatccgcttcaagcagctctccgacgaggagaaggcggctctcatcgccaaggacccgcgctacggccgcatcatctgccgctgcgagaccatcaccgagggcgagatcgtcgccgctatccactctcccattccgccctgctcgctcgacggcatcaagcgccgcgcaggctcgggcatgggccgctgtcagggcggcttctgcggcccgcgcgtgctggatattctcgcgcgtgagctcggatgcagtccgctcgacattcagcaggacggcgacggcacctttattctgatcggcaccaccaagggaggcacactggcatgaaatatgaactcgtgattatcggcggcggcccggcgggcctgtccgctgcatatgccgcatgggaagcaggctgccgctcaatctgcatcgtcgagcgcgaccgcgagctgggcggcattctcaaccagtgcatccacaacggcttcggtctgcactatttcaaggaagaactgaccggcccggagtatgccgggcgcttcatcgacatggtaggtcagaccggcgttgacgtccgtctggacgccatggttcttgacatcaccccggacaagcacgttcacatcgtttcctccgagggcggctatgaggaccttgaggcaaaggccgtcatcctcgcgatgggctgccgcgagcgcacccgcggcgcgatcgccatcccgggcacccgtccggcaggcgttttcaccgccggcgctgcacagcgctaccttaatatcgagggctacatggtcggcaggcgcgtcgtcattctcggctcgggcgacatcggtctcatcatggcgcgccgcatgacgctcgagggcgcgaaggtgctcgcctgcgtcgaggtcatgccgtattccggcggtctgacgcgaaacatcgtgcagtgcctcaatgactttgacattccgctttatctctcccacaccgtttcggacattcagggcagggaccgcgtggagcgcgtcgtcgtttccgaggtcggcccggaccgccgtccgatcccgggcaccgaaatgaccttcgactgcgacacggtcctgctgtcggtcggtctgatcccggaaaacgagctgagccgcggcgcggatattcagatggacccgcgcacgaacggcccggtcgtatacgaaaacatggagacctcgattccgggcgtgttcgcctgcggcaacgtgctgcacgttcacgatctggtcgacttcgtaaccgccgaggcggcgcgcgcaggcagggctgccgctgcgtactgcgcaggaaagcagaccgccgagggcaggacgctcgacatcaggaacggcagtctcgtcggctacaccgtgccgcagcacgtccgcatggacgccgacttcacgggcgtagacgtatttttccgtgtccgtgcgatctgcggcgcgagccgcatcgcggtcagggacgagagcggcgcacagatcgcgtccttccgccgcgagcatatggcgccgggcgagatggagaacatcagactgccgcgcgtcctgctcgaaaaggcacagggcgcagtcacggtatcggttgaggaggaacaggcatgaccagcattatctgcattacctgccccaagggctgccgcctttcggtggatgaagaaaacggctataaggtaacgggcaacggctgcccgcgcggcgagatctacggcaaaaacgagcttcagcacccggtccgcgtcatcacctcgaccgtcaggatcgagggcgctgcggtgccgcgcctgccggtcaagaccgacaagccgctgccgaaggagaagatgttcgaatgcatgcacctgctcgacggcatcaccgcgaaaagtccggtcagggtcggcgcggtcctcgcggagaacattctcggtacggacgtcaatatcgtcgcgaccaagtcgttataaaacggcacttttcaggtctgtaaaaaaatttgcaaaaaagtttacgcaaacgtttgcattcttgttaagaatatgttaatataaatatactcaatgacggatgagcacagggcgcatgttttgccgggcagcaatgcccgaacgaaccatgcgccggtgtttattttcattttttcagaaagtgaggcggacgtcagtgaacggagtaattccatatctgcgtgaaatgaattttgtgtcggtgatgttccgacttatactcgccatggtgtgcggcggcatgatcggtctggagcgagggcgaaaacgccggcctgccggtttccgaacatacatgctcgtgtgtctgggcgcggcgctgaccatgctgctcagtcagtatgagtttgcgatggtcatgggtccgtggaatggcattgcgcaggagcttggcatgaagaccgacgtttcgcgcttcggcgcgcaggtcatcaacggcatcggcttcctcggcgcgggcaccatcctcgtcaccggccgtcaggaggtcaagggcctgaccacggcggcaggcctgtgggcgtcggcctgcatgggtctcgccatcggcgcaggcttttatgaatgcgttgtgctgtgcacggtgctcatcttcctgtgcatgcgttttctcccggcgtttgagaattacctggtcgagaaagcgcgctttatcaacatttatgtagaattccgctctctggatgacctcggctcgatcatcagccgcatcaaatcacagggcgcgcgcatctgcgacgtggacatcaaccgcggccgcaccgagcgctcgatcaatccgaacgcggtatttgccatccggctgcagcagaagcagccgcatacgcaggtcctcacggcgatcgccgcgctggacagcgtatacacgatcgacgaagtctgaaagggggggacgaaatgctttcgatttttaacggagtccgcgatattaccatgctgtcggtcacggtgcgtctttgtctcgccgtgctgtgcggcggcatgatcggtctggagcgcgcgttcaagcgccgtcccgccggtttccgcacgcatatcctcatctgcctcggcgcatcgctcaccacgatgaccagtcagtatctgtatctgaatatgcactatttcaccgatatggcccgtctcggcgcgcaggttgttgccggtatcggtttcatcggcgccggtacgatcattgtgacgcgccgtcagcgcgtcaagggactgaccacggcggccggtctctggacgagcgcgatcgtcggtctggcgatcggcggcggcttctatgagggcggcatcgcggtaagcgtgctcgtgctcctggccgagctggtgttctcgcgcctcgagtaccgcattctggataatgtgcccgagatcaacctgtacatggagtattcagacaaggactgcctggagaacgtgcttcagcttctgcgccagaaccgcctgagcatctcgaacatggagatcacgcgctcggcaggcagcgaggagcacaacgcctgcgccatcttcgcgctgcacctgaaaaagggctgccgcacggaggagctcattcagaaaattcagcgcatcgagggcgttgtttcggtagaggaaatctaaataacggcataagctctgcaccccgtcacaggaaagcgtggcggggtgcttttgtatgttttcgggcaaaaaggaacggcctgcccatataagagcagaccgttcgagaaaaagagaatgagagaggttgtcttagtgaacgccttcctcggtcgcgacgcggcagagtacatccgcgtggttggaaatgatggcgtcaacgccgcggtggatcatatcgcgcatattttcctcgtcgtttaccgtccaggtgttgaccttcatgccgcggctgtggtacaggtcaaccagctccggctgatactggagcagcatatagcgcgggtgcatattgtccgcgttcgagcgctcgatgtacttgtcgatgtcgagatacggcttgtcgtagagcaggccggtcttgatgtccgggcagagctccttgaacttctgcatggaaatatggttgaaggaggagacgaatacgcggtcctgcatcttgtgcgcggagatggcgtcgatgacgcgctgctccagaccctcgtagaatacctcgtagttcttcagctccatattgagcagcatattggtctcgtcgcagaaatcgagcagctggtcaaacgtccagatgtgctgtcctgcgaattcgggggacttccaggagccgatgtccagctcgagcatctcctcgtaggtatggtccttgatgaagccggtgccgttcgaggtgcgctcgaccgaagcatcgtggaaaataatgagcttgccgtccttcgtgatatgaacgtcgctctcaaagccgtctgcactggtctcctcgaccgccttgcggaatgcgagcgggctgttctccgggtatttgcccgagaaaccgcggtgcgcgagcagcatgacctttttcatattcgttcgcctctttcgtaaaaataaaaaagcacataccgatactgagtccccggtatgtgctcgctcaacaaatctcatgcacatatacattatatcataaagccggcggaatgcaaacccttctttcgtgcattccgcatatttttttgtccgccgcacaccgggggcggtgccggtttatgtaaaatccgtgtaaaaagcgtgagccttgtgtgataccaccgaaaatgcgggtctgctctccgcattagcttaaggcaacaccgcataattaaagctgcggcgctttgcggaaatttttcaccctgattgcgttgcgatttcttgcaatacgaaagtattgctgcaaaaccgcgccttatcagagcacaaaatttactcgcaaatcgctcttgtccaattatgcggtattgccttacagaagcaaaagaaaacagcaaaggagttttgccttatgggataccagaccgtgtttcgccgctacgagaagaaatacctcgtgacgcaagagcagtacgaccggcttgcggcggtgctcgccccgcgcatggagcgcgaccgcttttccgagtccaccatcagcaacatctattatgatacgccggatttccggctcatccgccgctcgctcgaccggcctgtgtacaaggaaaagctgcggctgcgcacctaccgcacgccgcacgcggacacggaggccttcgtcgagatcaagaagaagtacgaccatgtggtctacaagcgccgcatcggcatgaattatcaacaggctgtggattaccttgcgggcgcaccggcgcccgaggcgagccagatctcccgggagatcgactggttctgccggttttacgagggaattcgcccggcgatgtgcatcttttacgaccggcttgcggtgttcgaccgcgaacagcccgacctgcgcgtcacgttcgactcgggcatccgctggcgaacggacgacctcgatcttgcctgcggcacgcgcggcagactgctgctcgacccgagcgtgcgcctcatggagatcaagatccccggcgcggcgccggtctggctcgcccgtgcgctctcggacgcaggcgtgttcccgagccacttttccaaatacggcgcggcctatcagaccatgcagcgcgaagaaaaaaccatccgatttaacgaaaaaggagaaatctactgtgcttgagactttatttggttcggttctgaccgccggcatcacggccgcctcgttcaccgtctgcctgatcgcggcgctggcgctcggtgcgctcgtcgcggcggtatatatgtataaaaacacctgcacgcagtccatggcggtgacgctcgcgctgctgcccgcgatggtgcagatcatcatcctgctcgtcaacggcaacctcggcgcaggcgttgcggtgtccggcgcgttcggcctcgtccgcttccgctccgcacccggctcggcgcgcgacatcacctgcatcttcctcgccatgacgctcggtctcgcgaccggcatgggctacatcggcatcgcggtcgtgaccggcgctgcgatgtgcctgctgctgctcgtctacgcggcgctgtccttcggccgcaggccggaggaggagaaggagctcaagatcaccatcccggaaaatctggactacaccggcctgtttgaggacctgttcgcggagtatacccgttcggctgagctgatttcggtccgcaccaccggcatgggcagcctgtacagcctgcattatcatgtgacgctcgtctcgtccgaggcggaaaagcagcttctcgatgccatccgctgccgcaacggcaatctggacatcgtttgcggcaaggtgccgcaggcgaaggaagcgctctgagcctgtcggaaaaacttcgttttccccgacaagctgtgttctgacgaacgcagaacacgagtcgtccgaaagttcccatgcggaaactttctccctccagaagtatccaaaccgaggtacacgcccccggtttggatggctttgcgaagcaaagcctgttaaatgcgcgctgacgcgcgagtgctgaatgcgcttgatgagcgacttcatcgacaaattgtttcacatttatgctattttgaatttaagaaagattctgactgatatgaaaaagaaattactcgcggcgctgctggcctcggcgctcgcggcgggcatgctgccgacctcggcgtgtgcggtatcatccgcctatacctcctcgaacgcgaccctcatcagcttcaccgactccgctgtgacggcggacggcgcatacagcggctatgagatcgagggtacggacgtctccatcacggcggcgggcacctatgtgttctccggcgactgcgacgacggctcgatcacggtcaaaaagggcgtcacgggcgttacgctcgtgctgaacgggctgacgctgacgaatgcggacagcgcggcgatcacgctgaacaagaccgccgaggcggcgctcattgcggcggcaggcagcgagaacacggtagccgataccgcgggcgcgaacgacgagaacgcggcggtcaaggtcaagagcggcgcgtcgctcttgctcagcggcaccggcacgctgaccgcctgcggcaacacgaaaaacggcatcaagggcgcgtccgacgcggtcattacggtcgatgagctgacgctgaatatcgaggcggcggacgacggcctgtcctgcgatgacgagctgaccatcaagggcggccgggtgaacatcacagcaggcggcgacgccgtcaaggcttccccggacacagacgatgccgaaaatccggataccacctcgctcggcaacgtcacggtttcgggcggcacgatgaccctgacggcggcgaatgacggcgtgcaggcggacggcgacctgacgatctcgggcggcacgtttgccgtgaccgcgaacggcggacacacgactgccctgatcgacgattccgcctcctgcaagggcctcaaggccggaaagacgctgaccgtttcgggcggcacggtgaacgtagacagcgcagacgatgcgctgcacgcgaacgatgtgaccgtttcgggcggtacgctgacgctcgcctcaggcgacgacgcggtgcacgcggacaatgacctcgtggtcggcgtgcagggctcgtcctcgacctcgaacccgaagatcgacatcaccgccagttacgagggccttgagggcacgaccgtcagcgtttacagcggcgacatcgacgttgcggcgtcggacgacggcgtgaacgccgccaatagcgatctcggcgagcgcagcgacaaatacgccatcaatatcgcaggcggcgacctttatattgacgccggctcggacggcctggactcgaacaacgacatcactatgacgggcggcaaggtcgaggtttacggcgcggacgcgatgatggacgcggcaatcgactatgacggcacgttcaccctctcgggcggcacgctgttcggcgcgggcatggagccgggcgcaggcacgcaggcgtatgtcgcggtcggtgaaacctcgccctcgggcggtcacggcggtatgggcggcggtcagggcatgacgcgcccggacaagactgacggcagcaccatgacgccgccggacggtcagcagagcggcacgcgcccggagaagccgtccggcgataaaaacggctggactggcggcaagggtcagtcggcgaaccgcgagagcgccctcggcatcaaggaggggagcgtcatcaccgtgcaggacgcttcgggcaagacgctctacactgcgacggcacttggctcgatgagcagcgtgatcttttcctcggctgacatcaaggagggcgaaacctataccgtgctcgtggacggcgcctcggtcggaaccgcgaccgcaaagctcggcacttcaagctctgacggcggcagctttgcgcccggtcagaatcagaacggcggcgcacagccgggcggcgtttccggcttcggtgacgttccgcagaccagctggttcgcggacgcggtcaagtacgtgagcgaaaacaagctgatgaacggcacgagcaccacggcgttctccccgaacgggaacatgagctgcggaatgctgatgaccgtattggcgcgttatgcaggtgaatcgacagatggcggcacggtttggtatgaaaagggcatgaactgggcaaagaacaagggcgtatccgatggttctgcgccgaacgcgagcatcacccgtgagcagctcgccgcgatgctctaccgttacgccggcgagccgagcgtgagcgccgacctgtccgcgtacacggacgcggtttcgatttcgccctacgcggaaaaggcggtcgagtggtgcgtggcgaagggcattctgagcggaaagagcgcgacgcgccttgcgccgcaggacaccgcaacgcgcgcggagtgtgccgccatgctccagcggtttgccgcgctgtaaattccaaaaaacgcaacacattcaacacagattcaacacaggcggacggtagactgattgcagaaaacaagcagaaaacaaaaggaggcggcttttatgcagtcgagcagtcaggcagtccgtgcgaaggaggatggaccgttcctcgagcgctttatcgaagcgcacgagggcttcatcctgcgcacggcgtcccggcacgccggtcacacggtgacaaggagcgatgatgaatactcggtagcgctcctggcgttctacgaggccgtcaagggctacgacccggcaggcggcccgttcggcgcatatgcgtcgctcgtcatcggccgcaggctggcggactactaccgcgcatcgcaccggttcgatgccgaggtcagccttgcgccgcagaccttcgacggaacggtagaggaggacgcggcggacgcgggcgtgcagctcgcggtcgtagagaagctcggagagatgcgcacggtctgcgccgccgaggagatcgagagcgcggacgagcagttcgcaaagtacggcttttcgttttatgatctggcgtcctgctcaccgaaatcagataaaacgcgccgcggctgcggcatggcggcggcggctctcagccgcagcagcgtactcgttgcctcgctccggcgcacgcacgagctgccgatccgcgcgctcgcgaaggagagcggcgtatccgcacgcctcatcgagcgtcacagaaactatatcgttgccgcggcgctgctgctggacggagactatccggtgctcagcagctatctcggcagcatcagaaggtatctggaagggcagaacagaagggaggcggcggtatgcgcgcagtcgtgaccgagatcagagaaacaagcgcggcggtgctgtgcgaggacgggcagatccggctgattccggcgcagaattttcgaaaagggcaggagatcacgctcagcgcgggcaggcgccgcatccgccgtccgctcatgtgggccgcgtgcgtcgcggtgctgtgcgcgatggcgacgacgagcgtttacgcggtgtgcgagccgtattcgagcgtgaccgtggacggggaggggagcgtggaatacacgctcaaccgctttgactgggtgatcggcacgcgcgtttccggcgaaaagccgccgaagggcgagtccgtgccgcccttcacgcacgcgatggacgccgtccggcaggcggtcgagcgggagtacgcgaacggacagaaaaacgtcagcatcacggtctcctcgcacgacagcggcagggcagagggtctgcgcgagatgctcgagaagcccggaaacgggcacggggacgatggggcggagcatccggcgccgcgcgtccggaccgcgtcgcccgcgagcgaaaagacgggagatgtgtgacgcacagtgaacaatcagcatcgtgcggcgcgcccgaaggccttgggcggtttgcctataaaaaccatgcgcaattcggctaatgcgcggaaaattttcgcgcggatacgggtctgcttgccaaacggcggtggggagtggtaaaatgattgcagaaacaaaaaaagcaagagaaaacctcctgatgagagagaaacccgtgctgaaaaggagaaaactgcaatgaaggatatcaaagtcggtattgtaggtctgggccgtctgggctcggtacacgcacagaacctcgcgttcaaaatcccgggctgcaagctggtcgctgcctgctcgctcgagcagaaggagctggactgggcgaaggactacctcaaggtagagtacaccaccaccgattacaagaagatggtcgatgaggcagacatcgaggctgtcgttatcgtttcctcgtcgcctgagcactgctggatgatcgagtacgcgctcgacgccggcaagcatgtgttcaccgacaagccgctgggctgctctctcgaggagtgcaagcgcgccgaggccgctgttgagcgtcacccggacaagctgttcttcctcggcttcatgcgccgctacgacccgtcctacgcagatgcgaaggcacagatcgacgcaggccacatcggcaagccgtatcttgtcaaggcgaccggtcttgacccggaggctctggtcgagagctgcatcaagttctccaagacctcgggcggcatcttcatcgacgctgcatctcacgacatcgacctgatgcgttggttcctcggcggcgaggtcactgaggtttatgccgcaggcaccaccttcaagcatccggagttcgctgagaacggcgacaccgagaccggcatggcaatgctgaagttcgacaacggcacggttgcattcctgcacgtcggccgtactgcgccgcacggctaccacaccgagaccgagatcgtcggcaccgaagcgcacattcgtgttgccggtgtgccctggaaggaccgcgtcatggtatacgaccagtacggcgcacgccaagagatcatcgagaacttcccgcagcgctttgcagaggcatatctgctcgagatggtcgatttcatcgactgcatccagaagggacgcaagccggagctgaccgtttacgacggcaccaaggctacgctcgttacctatgcgatcaccgactcgttccatacgggcaagccggtgactgtcaagtactaacgcacttgactccaggggggacgctgtcccccctggatacccctccggttccgcagaaaccggaggggatacccccctcgcccctgcacggcaggggcggctcgggacacgtgtcccgaggcagtggagtaaaagtccggcagagctggacttttacggggatttttatgcggcgctctgcggagcgcctgtcctgcctgttttgccgaaggcaaaatgcggcaggagattagcagtgagaagggcggtgcgccagaaagggcaccgccctttttctgcctttttcaaaaaagttatcgttcaggatgaagcttttacattttattcacaaacgacacttgacattagagcgcagtggtgataaattatgtttagcactcagagagatggagtgctaaaagaaaaaacagatacgaaaggagtccgcatcggtggagctgtcagcaagaaaaaagcagatactcaaggccatcatcggagactacatccgaacggcagaaccggtcggctccaaggcgctcaccgaagggcacgagctgccgttttcgtccgccaccatccgcaacgagatgagcgagctcgaggagatgggatatctcgaaaagccgcacacctcggccggacgcatcccctcgccgcagggctaccgcctgtacgtcgacgagctgatggaaaagccgggcgagacagcagacgacgacggtgcggctcttcagcagaccgtactcgcaaaggtgcgtgagctcgaccatctggtgcaggaggcaggcaggctgctcacctcgctgaccaattacgcatcggtcgcgatcacccccgcgctcgcgcagatctcgatccgccagttcgagatcatcgcggtggacaaaatgaattttgtcatcgtcgttgtgaccgactcgggcaccgtcaagaacaaaatggtccggacggtttcggaggtcaccaaggacgaggcggagcttctgacctatgtgctcaaccagaccctcaccggtctgccgctctcgagcatcacggccgagcgcttcgacatcgtgcgccgggccgcaggcctgaccgcgctgctcgcgccggtggccgaatacattgccgagctgatcgccgagctgagcgaccagaaggtctaccttgacggcgcaagcaagctgctgcgctttccggaataccgcgatacgaaaaaggcgcagacgctgctcgattatatggaggacgacagaagacatctgctgccggcgaccagaaagatcgacggcatccagtttttcatcggtccggaaaacggtgaaaatccgctgagtgagacctcggcgatctacgcaaaatatgacatcggcaagatcggacagggcgcgatcggcatcgtaggtccgacgcgcatggactatgcaaagctgtccgcccagctcagccgcttcgcaaagggactgaaccggctgatcgccgaaacgtttttagacgataaagatccaaaacactgacggaggcatccagaaatgagtaagaagaagcagccggaacaggctgagaccgaacagaccgaggcaaagcaggcttcggaggaaaagtccgaacagccggcggaggcaaagacgcctgcggccgactgggaggcgaagtacaacgacctcaacgaccgctatctccgcatggcggcagaatatgacaacttccgcaagcgcagccagcgcgagcgcgagcaggcgtacaccgacgcggtaagccgcgccgtcaccgcgcttctgccgacgtatgacaacctcgagcgcgcgcttaaggctgagaccgcggacactgagtataaaaagggcgtcgagatgaccatgacgcagctcgtcgagagcctcaagggcatcaatgtcgccgtcatcgacgcggcggcaggaaccgccttcgacccgaatttccacaacgcagtgatgcacgtggaggacgagtcgctcggcgaaaacgtcatcgcggaaaccttccagcagggcttccagatcggcgacaaggtcatccgtcacgcgatggtcaaagtcgcaaactaagcgtgaagagctcggagcggagagaagaaaacttcacttcgcactctgaaatctccacacggtacaaaatcgtaaactaaatcctaacttttaaggagtgtatttatcatgggaaagatcattggtattgacctcggtacgacgaactcttgcgtatccgttatggagggcggcgaagccgtcgttatccctaacgcagaaggcgcacgtaccaccccgtctgttgtagcattttccaaggacggcgagcgcatggtcggtcaggtcgcaaagcgccaggctgtcaccaacgcagaccgcaccattatttccatcaagcgccacatgggcaccgactaccgcgtaaacatcgacggcaagccgtactctccgcaggagatctccgcgatgatccttcagaagctgaaggctgatgcggaggcttatctcggccagccggtaacgcaggctgtcatcaccgttccggcttacttctccgactcgcagcgtcaggcgaccaaggacgccggcaagatcgcaggtctggaagttctgcgtatcatcaacgagccgaccgcagcagcgctggcttacggcgtagataaggaatccgagcagaagatcatggtatacgacctcggcggcggcacgttcgatgtctccatcctcgacatcggcgagggcgttctcgaggttctgtccaccgcaggcgatacccacctcggcggcgacgacttcgaccagcgcatcatcgactggatggtttccgagttcaagaagtccaacggcatcgacctgtccggcgaccgcatggctatgcagcgcctgaaggaagctgctgagaaggcaaagatcgagctgtccggcatgagccagacctccatcaaccagccgtatatcaccgcggacgctaccggcccgaagcacctcgagctgacgctgacccgcgctaagttcaacgagctgaccgcagacctcgttgagcgcaccatgggtccggttcgtcaggcaatgagcgacgcaggcctgtccgcttccgatctgtccaaggtcctgctcgtcggcggctcctcccgtatcccggctgttcaggaagcagtcaagggcatcaccggcaaggaaggcttcaagggcatcaacccggacgagtgcgtcgcgatcggcgcatccattcagggcggcgttctcggcggcgaggtcaaggacgttctgctgctcgacgtaaccccgctgtccctcggcatcgagaccctcggcggcgtatgcaccaagctgatcgaccgcaacaccaccatcccgaccaagaagagccaggtattctccaccgcagccgacaaccagccgtccgttgagatccatgtccttcagggcgagcgtgagatggcagcaggcaacaagaccctcggccgcttcaccctcgacggcatcgctccggctccgcgcggcatcccgcagatcgaagttaccttcgatatcgacgcgaacggcatcgtaaacgtatccgcaaaggacctcggcaccggcaaggagcagaagatcaccatcaccgcttccaccaacctcagccaggacgagatcgacaaggcaatgcacgaggctgagcagtacgcggagcaggataagaagaacaaggaagctgtcgaagtacgcaacagcgcagagcagctcgtgttccagtccgagaaggcgctgaccgacctcggcgacaagctgtccgcagacgagaagagcggcgttcaggctgagatcgaaaaggtcaaggaagcactcaagggcaccgataccgacatgatcaaggcagcgaccgaaggcctgtctaagaagttctccgatctggccggcaagatctatcagcagcaggcgccgcagggcgacccgaacatgggcggccagccgggcgcaggcgcacagagcggcccgcagggcgacttcgtagacgctgacttcaccgaagtcaaggacgacgacaagaaataattcatagaatgaggcatcagcagcacggggaatgctccccgctgctgaaagccgatgggagaggcgcgcttcggtgcgcctgtccgcgtgtacaggtgatatttttatggcagacaaaagagactattacgaggtgctcggcgtgcagaagggcgcgggcgaggacgagctgaaaaaggcgtaccgcaagctggctcgcaagtaccaccccgacctcaacaaggataatcccgaggcggccgacaagttcaaggaggtcaacgaggcgtatgaggtgctgtccgacaaggacaagcgcgcaaagtacgaccagttcggctttgcaggcgtcgacccgagctacggcggcggtgcaggcgcaggcggtttcggcggcggcttcgacatgggcgacctcggcgacctgttcggttcgttcttcggcggcggcttcggcggcggccgttcgcagcgccgcaacgcaccgcagcgcggcgaatccattcgccagaccgttgtcctgtccttcgaggaggcggccttcggctgcgaaaaggagatcacggtcgagcgcatcgagacctgtggcgactgcggcggcacaggcgcggccaagggcacgacggcggagacctgcccgaactgccgcggcaccggcgtcgtgacccagacccagcgcacgccgctcggcatgttccagacgcagggcgcctgcccgaactgccgcggcaccggcaagatcatcaagaagccgtgtccgaagtgcggcggtcagggccgcgtgcgcaagacgcgcaagttcaaggtcaacatcccggccggcatcgacgacggccagtccatccagcagcgcggtcagggcaacgccggcgcaaacggcggcccggcaggcgatctgtatgtaacggtcgcgatccgtccgcatccgatcttcacccgtgacggctcggatgtctatgttgaaatcccgatctcgttcgcgcaggcggcgcttggtgatacgcttcaggtgccgaccatcgacggccgtgtcgagtacaaggtaccggagggaacccagaccggcacgatgttccgcatgcgcggcaagggcatccagaatgtcaacggccgcggccgaggcgatcagtatgtccgcgtcaatatcgaagttccgaagaacctcaccgacaagcagaaaaagctgctgcgcgagttcgaggagacctcgaccgacgaaaaccagatcaagcgcaagagcttctgggataaggtcaaggacgccctgaaggacaaataaagaacaaagcaaaagagagtgcagacgaaaaagtccgcactctctttttgtattcacagtgactcgcagcgacgggagtaagcactctgcaccgactggccgcgcactgtcatgcgcggcgctttacgcaagcgaacctcagggcattacagccacccgtgagcgaaacgacgcccggaaccgagcccccgtaccccgtttcgccgcacatctccgatgtgtcggcgcaaaggaagattagggggagtcaagagggggataagaaaccatattggtgtcttatcccccttttgtctccgccgccagacggcggaaggtctaccctcagcagagggtaaagaagaaaaagaagcgggaactcattcccacttctcccagacctccggacagtacccgaccgtcgcctgtctgccgttccgcacgaccggcgttttcatcagcgtgccgtcctcgagcagcttttccttcctgtcctcgtcgtaggcgaggtacgcgagcgacgcatagccgcggctcttctcgtcgatgagcgcgtcaagaccgccgaccgcccgcagtacgctgtcaagctcgcccttgctcatgcccttctgcgcaagatcgatcatctggaatttgatgccgcgctccttgaaccaacgctgtgcctttttggtgtcgaaacacttgtttttgccgaaaatctgaatgttcatgctcgttctcctttgctctgctgaatcaagtatagcagaacgggaaagggaaaacaagcctcagctgcgccgcttcggcagcacgcgcaggatcacgctcatgagcgcggcgcagcgcccggtctcgcacaggatgagcggcaccgcgaaaaagacctcgccgtggcgtgcgaaatccccgatcgcggcaagcccggcggcggagaagttcggatagggcagcagggcggcggtatgcgtcccgagcagcagcaccgtgcgaagcgacagcagcgcaagcagcgcgccgcctgccgtgagtccgcgcgaggccgccccggcaagactgctgtcgcgcagcgagagcgcaaggatgagcgtgcccggcagcagcaggcgcagcagcgaccagaactgcggcaggagcgccgctgtcggtgcggcaagacgcgagagccgcagctcacctgcggtcagcagaccggacagcaccgctaccatccctgtaagaaacaccgcaggcagcgcccacatcgcgcagacattcagtccgctcagcgcgtgcgcaagggcgcagagcgtcagcgcgaggcagagtacccacagcggcacgcgcgtaaacacggtcgcgcggagaaagctgctcatgcgcgagagcgagcacacgagcggaaagagcgctgcgagcgcgagcaggagctgcacgcccggccgtgccgcgacagcgcccgagaggcgtgccgctccggcggcgagcagtccggacgccgcacaggccgccgctgcggcgtagagcgactgcgcgtccgtcgggaggtacaggatttcgctgagcggcaggagcgcgaacagcgcaccgcaccatcggggaaacagtctgtcaggcaaagcgctcgcctccgatcacgccgccgtcgagaaagcagctcagttttcctttcgtgaacaccgctgtcccggacggggcggtctgtccgaagcggtcgagcgaaagcgagggcaggatggccgtgccgtcggtctcgagcgcctcggtaacgcggtacagcggcatatcgggcagcgtgccggtctcggcggcgcggtcgagcaggtcgctcagcgcatagacctcctcgtcgttttcgagcaggtcggacgccgcgccgccgcgcacgacggcgcaccggagattgagccggatgtcgttatcccggcacagatattccgcgagcggcgtcatatcgtcctcggcggcctgctcgctcagcaggagcacctgcgcgtgcgacagatacagctcgcccgggagcagtccctcgagcgcgtgcagcgcgtcggtgaagctgtcgccctgtgcggcgagacaggagggaacggcggcgtcttcgggcgtgtcctgccggacgagctctgcggtgaggcgacagccgttcccggcgcggtcgagcgcgagtgcggagaccggagagggttcgcgtgcgcagccgcacagcagagcgagagggagaagaagcagcagctttttcatggtctcttcctccccgcagtgcggaaaaaggaaaaacggtcgtatttcatgcggtaccacggcacgcgcagccaggcatcctcggaatcggtctcgacgcgcggcacgaggttgatgaggtagggaacgccgcacgagctcatgcggcacagcaggacgagcgtgagcgagagcaccagccccacgccgtacagaccgcctgcggcggccgccccgagcagggcgaaccgcagccagagcgcggctgtctgaaggcggggagccatcagtccggtcacaccggccaccgctacgacgatgaccgtgggggcggcggaaaaccgcgccgagaccgccgcctgcccgagcacaaggccgccgacgatgctcatggtctgccccatcgcgccgggcgtgcgtgcaccggcttcacgcagcacctcgagcacgaagagcagcagcagcacctcccacccgaccggcaggggaacccctctctgcgccgccgtgatagcgaacagcagccgcgccgggacgagctcgcggtgatagagcagcagagcggtgtacaccgccggtatcgtcaccgagcagaaaaagccgagtgtgcgcagcacgcgcgatacgttggtccggagaaagctgatatagtagtcgtcgttcgactgaaagcattcctgaagcaggtgcggcgcggtcagcacgaccggactgccgtccacgacgagtgcgcaccgcccctcgagcagccgcgaggccgcgacatccggccgctcggtcgtgccgagggtggggaagggcgaaaatcggtggtcgcacaggcattccgcgatatagttcgcgtcgagcacgctgtcgagttcgaggacactgagccttgtccgcatctcgtcgacgagcggggcgggacacagcccgtcgatatagcacaggcagaccgcggtgttcgtgcggccgccgacgcgcaggaaattgaatttgagccgtgtatcgcgcacgcggcggcggatgagcgcaaggtttggcatgaagcattcggtaaagccctcgcgcggaccggacagcacgcgctcgttctccggctcctcgggcgaacgccgggcgaagccctttgtgttgacgaccagagcacgcgcgtcgccttcggtcagcacgagcgtgtcaccgtacagaaaggcggcgagcgccttgtccatgtcggtctcgacgcggcagtcatccgcttgcagaatgcgtccggcaagctcgtccgccgaggcgcggcgcctgtcggacagcaggacgggccgcaccagactttcgttgatagtgaacgagtccaccatgccgtcaaagaagaacatcgcgcagtgcaggccgttccggcccgtcgcctcgcgcacgatgaacgtgtcgtcgccttcgaataccgactgcatgagcgcgatgttgtgcgcaagattttctgtaaatgtgattttctgcataaagtcaccccataggttgataggatatgtatcagcaggggcgtgtactttgattttcgacagttacggcgaaattgtaggtttcgcgacggtatcaccccggaaacagtctttccggggcggcagcagattattcgtggtttacatccctgtcatctcatccgcgagcacatccgcgaacaggcgcacggcggagagcgcctcgggcagcgtgttgccggacgagccgacctcgacgagcagcgagccggggcttgcgtgctggtcgaagcgctgtgtgcgcaggttgaccggccgcatgagtgacggatatgcgcggttgagcgcgtactggagggtggaaacaaagttcagattgtcgcgccagtccggatgatacagccctccggcgtccgtgccgacgacgaacatcagctgcgcggtctccgcgccgtctaccgtgcaggaggtcttgtaggcctcgccctcgtcggtcaggatggagtcgcggtgcaggtcgatgaccaccttgacagacggattttcctcgagcgcctgctcgatcgccgcgagcgagcgatcgtaggaaccggcgtaggtcggcgtatcgaacagcgagcgcaggtgcagcgtctcgatgccgcgcttctcgagcgcggtgcacagctcgtcgcccacgcgcactacattgtaccgcgtgtcggtcgtgcgctcggtctcggtcggcgtataggggaaggccgcgtcaggagtatagctctcgctcgcgtgggtgtggaacacgagcacctgcggcccgtcgccctcggcgcggatgtgcgtgtccgaggcgagacaggcggcaacgtctacatcatagtcggtatcgttgttgatggtgagggtcgcggccttgtccggcgcggagagcacaggcgcggtattctcggggacggagggcacataaacgctctcgctctgcggctcgacggcgtcttcgtcccgtgcggcagccgccgcgcgcggcacatagacctcggccgcgtccgcgcgcacgccgaattcgagcgcggtgacgcaggagagaaagccgggactgcgggcgagcttcgagagtgtctcctgcgctccggcctcgccgcccagctgcgccgccgcaagcagcgcgcctgccgccgcgagcgcgcaccatgccgcaggccgcacgcctgcccggctcctgttccgtctgcgtcgattcatcctgtccgccctcccgaaatccgtttgatcaatcctatgcggcgcggagcggcggtatgtcagctgagatacaggtcgatctcctcgacggaaatatgctggagggccatgttgaccgcgtagccgatgagccgggcggtatccgcgacctcgcggtcgatgtcgcgtgtggtgatgatgaacggctgggacaggtcgtcgagcgcctcgcactgtgcgccgtcgagctgctgcgcgatctcatgggcgagcgagccgccgtccgcgaccgtgggtacgccgatggacagcaccggaacgccgagcgtctgcctgtcgagcgcggcgcgcgcgttgttcacgcccgagccggggacgatgccggtgtcggcaagctgcacggtgcgcaccaggcggctgaggcggccggccgcgagcgcgtcgatgacgatgaccgcacggggacgcacatggtcgagcacgcccctgacgatctcgccggtctcgacgcccgtctgaccgagcacgcccggcgcgagtacgctcaccggccgccaggatgcgaaaaattcgggcgagcgggagatgaggtgccgcgtcgcgatcacatggtcggccgagcgcgggccgaccgcgtccggcgtgatcgagcggctgccgagtcctgcgatgagcacgggggcggcgctgtccagcggcggcagcagcgtttcgatgagtgcggcgagcacgcgcacgctgcgcggaaacgcctcctcctcgcgccgcgaaagcgcctcgagcgacagggtaagatagcggccgcagggctttccgagcagccgcgcggcccgttcggtcgtgacctcggcctcgtggatgtgcaggccctcgcgctcatattcgcgctcgctgacgccggaaagctcgtctctgccgcgcagattttccagcagctcgaccgcaagatcggtccggtatgccataaaatcactcctttccggggagtatgcggcgggatgaaaaaaatatgtatttttctcgaaaaaatgcttgcaatttttgaggtttgatgttagaatagaaacactgacaaatagtaaaacaaaggaggtgttttcggaatgcccaacatcaagtctgctaagaagcgtgtcaaggttaacgcagtcaaggcgctgaacaaccagatggctaagagcgagctcaagaccaccctgaagaagttcgacgcagctattgctgccggcgataaggcggaagcgactgttgcttatacgactgccgtcaaggctgtcgatcaggcggctgccaagcacctcctgcataagaacaacgcatccaacaagaagagcaagatgaccaccaagctgaacggcatggcgtaagtcctgttccgacaatgcgaaacgagaagagtctgcaatgcaggctcttttttcatgcccgaaaaacatttagacgaatatcaaaatatatcttgactttcgcaaatgctgtgttattctatatttagataaacgtctaaatgaaaggggacggagcatatgaaaacgaccattgcgatctgctcggcgggactgctgctggcggcggtgctcatcgtgtggcaggcgcgggcgctgtcaaggcgcgagctggtgtgccggttctgcggaaagcagctgcgcctgccgtggaaccggctgctgctccggcagcatgtcgggaacgaatggtggctgttctgcccgacctgcggacgaaaaacatggttcaccgcacgaaagaggggagaataatgggctttcagaagagcttcaaggcgctcggagacccggtgcggcgcgagatcctgtcgctgctgcggcgtgaaccgatggcggcgggcgacatcgcggcgcatttcgacctgtcgggcgcaacggtctcgcaccatctcgcgatcctgcgcgacgccgggcttgtgctcgacgaccggcagggcaagtacatttactacgagctgaatatgtcggtcgtggatgagatactggagtgggtttccgcattgagaggagaggacagagatgaaaaaaacgaataaaacgaataaaaagcaggctgcggcgtgggtgctgtcgctgctgccgctggtgatgatcgcggcggtgtaccgccgtctgccggccgaggtgccgatgcactgggatctcgacggcgcggtcgattacggcgcaaaggcgcagctgtgggtgattgcggcgatggcgccggtgctcgaggcgatgttctgcttcctgccgaagatcgacccgaaaaacaaaaattacggtaagttcggcgacgcctatcttggcattcagcttgtgacgctgctgttcctcgcggcgataaccggcatctgcatcaccgaagcgctgcgcccgggcacggtcaatgtttcgggcgtggtatgcctgctcgtgagcctcatgatggtctacctcggcaacgtcatgccgcggttccgcatgaactggtactgcggcgtcaagaatccgtggacgctttcgagtgaggcggtctggacgcgcacgcatcgcatcgccgggcggatgttcttcgcctccggcctgcttggcgcggcgggggcgtttctcccggacagccgcgcgaagtttgcgatgctgttcgtaccgctcgcgctcgcggtaatcgttccaaccgttttcagctggaaaatctaccgcgaggagcaggaaaaatgacgaaaagaggggcggcgcgtcgcacgaaaaaaacggcgcagaccgtccctcgacaagtttatctataatttaacttgccaggtggggaacaatatgatataatattgcagaaagtttgcataggtggggaaccggaactgtccggggctatgcggaaaacgaagaaggcaataccgccgcggctttgctcgtgcggtgctgcctgaacccatccaggcaaggagaaagttatgaagagaacgtgtaagctggcagcggcagcgctgctcacggctgccgttacggtgggcacagtcaccgcttgcgcagcagcggaaactgcggtcacgaccgagacatacgcctatctgccggaccattcggtttacttttacgacgtagacgacggctattcgtgggcgttccgcgaggtggatacgctcgcggtcgcgggcgtcattcagggccggggcgaccatctgttttatccgaggaacgcgatcacgcgcgcggatttcatcgttatgctcgaccgcgcctacggcatgagcagcgcgctcgcgagcggcgctgtgacggcgcagcaggacttcagcgacgtcccgtccggccaatactacgcaaaatccgttgcagcggcgcgtgcgctcggcgtggcgaccggcacggcggacaaccgctttctgccgcagcagaccatgagccgtcaggacgcgatggtgttcctcaagcgcaccatcgaccgcacggagctgacgctgcgagacggcgcgatcaccggattttccgacgcggccgaggtcaaaagctatgcgcaggaggctgtcggcgcgctgacgagcgccaaggtcatcggcggcacgaacggcaaactcaacccgaacgcgcccgttacgcgcgcggaaatggcggtcatgctgtatcgtgcgctgcatctgaccgaaaacggcggttcgggcggcgcggtctaccacgagcgcaaggacacggtcaatctgtgcatcggcgcacagagctacagcgacgttgtcatcgagaactatgacccgtccgtgacctatgagggtctcgtgcagtattccggcctgcatcaggacggcagcacgatgtatgtgtccattgacggcgcacatgccatcgatcgcacggccgaatataaaaacgacacgtttacgttcgataccgacacggaaaatgacggcatcacaggcgattatccggccgctgcggactgcgtagcgatcgacgccggcgagccgtaccatcagatcgctgaaccggtcagcaccggctcggaataccgcacctgctatccgtccataagggacggcgaggtcgtcgcggtgtattatgtcaaataaatagagatagagaaaaccggctctgccgagggaaaacacctctgggagagccggttttttgtttgtctttatttttcggcggtaacatgggacgcgagcgcggcgtcgaattccggccagcagcggcgcagaatcgccggatggccgtcggaattgatgaagcagtggcggctgtcgccggtgcagcgcacctcgccggtcgccttgtcgaaaacgtcgtagtgcagcgtcatgcgcacgccgttgtactgggtgatcgcggcctgaatgctgaccgtttcaccgaatttggacatggtcttatactggcaggagacctcgaggacggggccgctgtagcctgcggcctcgatacggtcgtagccgaagccgagctgctcgagcagatcaacgcgcgcctcctcgaaccagcggatgtagttcgaatggtggacgatgcccatgccgtcggtctcgtagtactggaccttgtgttcacaggggttcatgaaaacacctcaattcttcgaatgattggctttacccgtctgctgacgggaaagagaaagagggggcgccctctttcgagagcgcccgacaggtaaatcgctgatttacttgaaatactttacgccgtttgcgaacagcggctgatacttttcgccgtagatattcttgccgacaaacgggctgtaacgctcggtatgacccatcttgccgagaacacggccgtccggagaggtgataccctcgatcgcgcacatcgaaccgttcgggttccacgcaatatccatggacggctcgccctgaaggtcggtgtactggaacgcgacctgaccgttcttgacaagctcatcaatgacgtgctgcggcgctacgaagcggccctcgccgtgcgagaacgcgatggagtgcagatcaccgacattgcaggaggacagccacgggctcttaacggacgcgacgcgggtggtcgcgtagcggctctggtgacggccgatgaggttgaaggtcagcgtcgggtcgtcgccggtcatctcgtcgcggatctcgccgtagggcaccagacccagcttgatgagcgcctggaagccgttgcagatgccgagcatcaggccgtcgcgctggcggagcagctcatggatgctgtccttgatgcctgcgtcgcgcaggaaggatgcgatgaacttgcccgagccgtccggctcgtcgccgccggagaagccgcccggcaggatgaccatctgcgcgcggcggatggcgctctcgagctgctctgcactctcacggagcgcatcggcggagaagttgcggactacgacgatttcagccgcgccgcctgcgttctcgactgcacgtgcggtgtcgtactcgcagttggtgcccgggaataccgggatgacagcgagcggctttgcgttcttgaccgccggagcggacgcattgcgctcggtgaaggagaccttggtcaggtgctcgtcggaagcggcggctctggtcgggaatacgctctcgagcttgccctcaaaggcggcggtcagctcgtcgatggtgatcttctcgcccgcgatggtgatggtctcgtctgcggtggtctggccgacataccactgtgccggcagctcgcaggaagcctcgacgaggatgccgccgaaattcttcatgtagagcgcatcggtcgggaagccctcgtcgaccgcgaagccgatcttgttgccgagggacatcttcgcgatgccctccgcgatgccgccggtggtcagagaccatgcggaaaccgccttgccggaggcgatgaggtttgcgacctcgttccagacgtgcttcatggtgacgtagtccggcgtgccgtcctgattgtacggcgcgtcgaagaagtagaccggatgaccggcttccttgaactcgggagagatcagacgggaagcgtcctgcggcgcgatggcgaaggaaacgagcgtgggcggtacgtccatgtcatcgaacgagccggacatggagtccttgccgccgatggccgcgaggcacaggttctcctgtgcggtgtacgcgccgagcagggcggacagcggcttgccgaagcgcttcgggtccttgcccagacgctcgaagtattcctggaaggtcaggtatgcggtctcgaaatcgcagcctgctgcgacgagcttggagaccgactcgatcacggcggcggaagcgccgagatacgggttctgctcggtgaagtacgggtcgaagccgaaggccatgacggacgcggtctcgcactgaccgttcagtgccggcatggtagcggccatgacctgcgtcggggtcagctgatacttgccgccgaagggcatgaataccgaggacgcgccgatggagccgtcgaagcgctcgaccagaccgcgctcgaggcagatgccgagggtggaggcgaggttcagcagcttttccttttcggaatcgcccgccggcgcgcaggagatggacggggtcgggagtgcgccgacctcggcgtcaacgtgcttggagcagccgttggtgttgaggaagtcgcgggaaacgtcaacgatcgtgttgccgttccaggtcatgcacaggcggttcttgtcggtgacggtggcaacgacgacagcctcgatgttctcctttgcagcggccgcgatgaaggcgtcggcgtcctttgcgcggacaacgacagccatgcgctcctgcgactcggagatcgccagttcggtgccgtccagaccgtcgtacttcttcggaacggcgttcaggtcgatgtcaaggccgtcggccagctcgccgatggcgaccgatacgccgcccgcgccgaagtcgttgcagcggcggatcatgcgggtaacattgccgtcgcggaacaggcgctggatcttgcgctcctcgggcgggttgcccttctgcacctcagcgccgcaggtttcaagcgattcctcggtgtgcttcttggaggagccggtagcgccgccgcagccgtcacggccggtcttgccgccgagcaggataacgatgtcgcccggctcggggacctcgcggatgacgttttcgatcggagccgcgccgacgacagcgccgatctccatgcgctttgcaacgtagcccgggtggtagatttcatgcacaaggccggtggcaaggccgatctggttgccgtaggaggaatagcctgcggcagcggtctggcacagcttgcgctgcggcagcttgtgctcgagcgtttcggagaggggaacggtcgggtcgcccgcgccggtcacgcgcatcgcctgataaacgtaggagcggccggacagcggatcacggatcgcgccgccgaggcaggtggctgcgccgccgaacggctcgatctcggtcgggtggttgtgggtctcgttcttgaacatgagcagccagtcctcgtaatgaccgtttacgagcgccttgaccttgatggagcaggcgttgatctcctcggactcgtcgatgttcttgaggtagccgcgctttttgagcaccttggccgcgatggtacccatgtccatcagcgtgaccgggcgctttgcggccttctcctcgccgtagacctcgacgcgcgcggccatgtagcggtcgaaggcgtcctgaaccatctggtcctcgaactttacgtcgtcgatctgggtgaggaaggtggtgtggcggcagtggtcggaccagtaggtgtcgaccatgcggacctcggtgatggtcgggtcgcgcttttcggtgtcgcggaagtaggtctggaggaacttgaggtcgtcgagatccatcgccagacccatgtggtgcagcatgtcggagagggcagcctcatccatgtgcgtgaagccgacaacgcttgccacgctcgtcgggatggcgtactctaccttgagggtcgagggcttgtccatggaggcttcgcgggtgtccaccgggttgatgaggtagccgcgaatcttgtccatgtcggcgtcagtcagttcgccttcgaggacatagatcttcgctgctgcgacggtcgggcgttcgccgccggtgagcagctggatgcactgggcgcaggaatccgcacgctggtcgaactgaccgggcagcggctctaccgcgaggacggtatgcgcgcctgccggacgggggaagtcctcgtcgtagcacacatcagccatcggctcggagaaaacgatgcccttggccttttcataggtctccccgctcagaccctcggcatcgtaacggcacaggtaccgtacatgcgtgaggtttttgatctcgaggaggtcgtgcagactggaaaacaggctgcgcgcttcgacatcgaagccgggtttcttttcggaataacaacgattaacgctcattttatcgtgtcctctcctttatgttgcaagataattttattctacctgtttttacgaaataaatcaatcgccaaggggtacaaaaactgaggatattcgactgtttatttatacctcgtaggaaaaaggaaaaatacgtttgtcccaaagagagaaacatgatatactggctctgtatagaaataaggcaacaccgcacaatgaaagctgcggcgctttgcggaaatttcgcgccctgactttgttgcgatttcacggtaatacgtcaagtattaccgcaaaaccgggcctcgtcagaacgcaaaaattactcgcaaatcgctcttgtccaattatgcggtattgccataaaaaacgaagggacggacagcctgtgaacatcagaagggcagaggagcgcgacgtttcgcgcattacggagatatacgcgcacgcgcgcgccttcatggcggaaaacggcaacgcgacgcagtggagcggcggctaccccggcgaggacgtcatccgcgcggacatcgcggccggcacgctgcatgtctgtgagcgggaagggaaggtcgcggcggtattcgcgtttatcctcggcggagatccgtgctacgcagtcatcgacggtgcatggcacgccgcgcgcccctacggcaccatccaccgaatcgcctccgacggcacggtgaagggcatggcgcgctttgttttcgactggtgcgcgcagcagatcgactatctgcgcatcgacacgcacgagaacaacaggccgatgcaggcggctgtcctgcgctacggttttcagccgtgcggcatcgtacaggtgcgcggcggcgcgagactcgcgtttgattatgaggtgagagcatgaaaacaaaggtgatcgtctgtacggagtacagcgaacaggcgcgggcggagctgctgacgcgcttcggcgacagattcgacattacgtttgccgagcacgcgagcacgctcggtgacgcggagatctgcatcggcgagccgccgctcgccctcgtgcagcaggcggaaaagctgcggtgggtgcaaatgacatgggcaggcacggatatttatacgcgccggacaggctttccggagcgcgtcacgctgaccaacgcttcgggcgcgttcggccgcacgatctcggagtacgttctcggcggcatcctcacgatgtaccgcaacttcccggcctaccgcgagcagcagaagcaggcggtatggcggacggtcggcgcggagcgcacgctctacggccgcaccgtgctcatcctcggcacgggcgacctcggcagcaatgtcgcaaagcgcctgcgcggcttcggcacggtgaacatcggcgtgcgccgcgcggcaggggagacgctgccgtattttgacgaggtgcgcggtatcgcggagctcgacgagctgctgccgcaggcggacatcgtcatcggctgtctgccgaatacgccgggcaccacaggcctgcttaccgagacgcgcctgcgccgcatgaagcaggacgccctgctcgtcaacgtcggccggggtacgctgctttcgaccgctgagctcgccgccgtccttgcggacggccatctgagcggcgcggtgctcgatgtgtgcgataccgagccgctcccgccctcctcgccgctctggggcatggagaacgtgctgctcacgccccacgtttcgggacgcggcttcggccacgaccgcggcaccgaacgcctcatctgggagatcgtcatggacaacctcgcgcggtatctcgagggaaaaaaactgcggcatattgtagacatgaaccgaggttattaaacaggaggactttttatggctgtcactgctgctttatccacatttttctcactgctgagcatcttttgcggcgcggcggcgctcgcgctgccggtcatcgcgctcgtaagacgaaagaacgcgccggcgttcgcggcggcgagcatgggattgtgtgcgatttcgctgctcggacagatattcgagtacaacaaccgtgtaaacgtgcaggactggagcgcactgctcgatacctcgtatgccgtgctgctctgcgcggcggtgctggtcgcgctcgcgcttgtgctcaatatcgcggcctgcctgcgcgccgggaaacagtaaatttatacttaaacttttacaggcagtatgttataatggaaaaagaaaactgccgtgccctgccggcacgctcgaccacactgcggactgtctccgcggtcacaggaggaaaaagttatggaaatcaagctctcaccgtctattctgtccgctgacttcgccaatctggcacgcgacatcaagatcgcgaccgatgcaggcgcggagtacgttcacgttgacgtaatggacggtcatttcgtaccgaacatcaccatcggcgcgccggtcgtcaagagcctgcgcaaagcgaccgacaaggtcctcgacgtacatctgatgatctccgacccggatcagtacctcgacgacttcatcaaggcaggctcggacatcatcaccgtgcactatgagtccaacggcgacaccctcgagcagctgaagaagatccgtgcggcaggcgtcaaggcggcctgcgtcatcaagccgaaaactccggcagaggcgctgttcccgctgctgccgtactgcgacatggtgctcatcatgaccgtagagccgggcttcggcggccagggcttcattccggagtgcatggacaagatcaaggccgtccgcgcggagatccagaagcacggctatcagtgcgagcttgagatcgacggcggcgcaaagctgaacaacaccgcagacatcgttgcagccggtgcagacgtcatcgtcgcaggctcggcggtattcggcggcgacatcgcggacaacgtcaagaagttccacgaggtgtttgaggaaggcgcagccaaggcggtctggacgaagtgaacgaaaaataacagaaaaagcgtgcagaataaccaaatctgcgcgcttttttctgttcctgttgacaaacagagagcaatgggttatactgaagatagtttttaacacactattaaaaactatgaagaaaagaggtgcaccatggcagatgcagggcttctccggcaggagaatacggcgctgctgcgccgggccatgcaggacggcgttttcagcaagaacgagctcgcgcggcagaccggattgagctttccgacggtcggacgcatcatcgacgatatggtcgagcgcggcgaggcacgggaggcaggcgtggcggcttcgaccggcggccgatgcgcgatgcggtacgagctggatatgcattaccggctgttcctgtgtctgcggctggagcaggatacgctgcactggttcgtgtgcggcctcgacggcgtgccgctcgagcagggagaagagacctgtccgggcgatgtgcgcgaactgctggacacgcttctgatgcgtgtcagggcgcgttacccacagctggcgtcggtcgcgttcggctttgccggcgcgatgcatgacggcgttgtaatggagtgcttctgctatccggagctgcggggcgtgagccttagtacgcatcttcacgataaatccggactgccgagcgcggcggcacgcgacatgcagatcgtcgcggccggttatgcggcgcagtgcagcccggcgccgcgcgccgcggtgtgcatctacatcggcaggatgggtgcaggcgcaggcatcgtgctggacggcaaggtctggagcggcgcggccggtttcgccggagagctgcactttctcccgatcgagcacaatatggaatacgcgcagacgcattttgcggatgcagatatgacggcgtatatggcgcaggtgatctgtgcgtgcggtgcgctcatcaacccggaccgggtcgtgctctacaccgatccgctgttccggaacagggtggaggacatccgcgccgcatgcgcgcgcatgcttccgccgcacgcagtacccgagatcgagctttcgcggacgttcaccgaggactatgaccggggccttttcaccatggcacgggatctgatggagggaaacgcatgaaatacttcgttttcgatgtagacggtacgctgatgaactcggcggcggtggatcagcagtgcctgaagcagacgctgcacgagttcggccgcgactatacctttgaggagctgcgcccgtccttcggcaagcccggacggcagacgctcgccgacctcggctttaccggagagaccgccgagcgcatcatggaccgctgggagggcctgtcgaaggagcgcgcttctgaggtgctcgccttcgacggcatcgaggcgctgctgcgcgagctgcacgcacgcggctgccgctgcggcatcgtgacctcgcgcacgcattatcagttcgactacggtttttcgccgctcggtctggacgggtatttcgatgcggtcatctgcatggaggacgcgccgcgccacaaaccggcgcccgacccgctgctcgaatgcctgcgccgcatgggcggcacggcggccgaggcggtctatatcggcgacagcgcgtgcgatatggagtgcgccgccgcggcaggcgtaaagtcgtgccttgcgctctggggcattcccgagggcgcgtgcatcagggccgacatcgagcttgcagctccggctgacgcactaaaactgatataaaaaacgaaaagggcggtatccgacgagaaatcggataccgccctttgactgtactgttatgctttctgtgtttcggcaggagccgtctcggtctgttcggcgaggcgttcctcgagccagcgcgaaatatcgccgtaggtctcgatgcggccgagctcgttgagcagctcgtgacgggcgtttttgtaaaaaactgcgtcgatgttgcgggagccgcctgcacgataaaggctgatgacgcggcgcacgccgtcgccgtagcggccgaccgggtcgcagtcgcctgcgaggaagaacagcggcaggtcgctcggggtgcggcggaaggttgcgttgctgttcgcgcgcgcgcagaggatgaacagatcgcggaaggcggaggcggtgaagataaagttacacttttcgtccgactgatagagagaaacgacctcttcgtcgcggctgagccagtcaaagaccgaattggggtggtcgatcctgcggttgtaggccttgaaggcgatgctgttcagcaggccgctgcggaaggtcacgccgcgcgtgcgtgcgatggagtctgcgacatgagccgcgctgagggcggcggcgttcgggccggcggtgccgatgaggatcgcgcctgcaagctccgtgccgcactcggacaggcacaggcggacgatgagcgagcccatggaatggccgagcatgaaatagggcaggtcgggatagcggtggtgcatcagctcacgcagatggagtacgtcctgaatgaggtatttccagccatcgtgcgcggcgaaaaagccgaggtcagccggtcgggagaccgaagcgccgtggccgatgtggtcgttgccgcagacgatgaagccgaggccgcagagatatttggcaaaggcggtgtagcgcgagaaatattcgcacataccgtggctgatctgaacgatgccgcggatatgggagtcctcgggcacgagaatgtagtaggcgacattggaaacgccgttcgcgcttttataaatattctgagtgcattttatattcataaacccacgtccgatcgcagaaataagagacaggccgccggaagctgacagacgctgtccatggttatgttaatatcataccacataaaagcggaattgtgcacattatttgataaagttcacaaagcgtttataaattcaacgaacgcgcctttatactttttaccgtctgccgacgataaagcctccgctgttccggcggcttgccgccgcaggcgggagatggctgccgatgggcaggccgggcatggccgccgcccggcggcggggggattgccggggtctcccggcggagacaaaagggggcaagggcaccgtatggttcccttgccccctcttgacacccccaaaccctcctgcggacgcgactccctgcggtcgcgcgtctaaaagcgaggggcccacaggggcgtttggtgctccaagggtacacgattgatcgaagcggagcttttcgcagcggaacgccgccgccctgcaccgtctggccgcgcactgttatgcgcggcaacccacgcaaagtaaattcagggcataacagcgtccccaaatctgcccgacgcccggaatcgtgcccccgtaacccccgtttcgctgcacatctccgatgtgtcagcgcaaaggaaggtaaggggagtcaagaggggacaggaaaccatacggtgtcctgtcccctcttgttcccaccggtgaacaccggcaccccgccgccgaaggcggccattgtccacgccctccgagggcgtaaagccgcctccagcgccgcaccgctgtatcggcggaaggtctaccgtctgccgacggtataaaagaaagggccgatgcccggtggggggacaatttgcaaaatgttcacatttgaaccattgacgcaggatgaaaaaacggcgtatattatatagtaatcccaaagcactgcgcgcggtgcgccgcgctctcccgacaaaggacaggtgaatccatatgccaacaaacaaggggcagaagtcccctaaaagaccgctgatcttctactacgctgtgacgctcatcgttctgatgctgctcaactggctgttcttcccgtctctgctcagcaggcaggtgaccgagatcggctacgacgagctggtcagcatggtggacgacggaaaggtcgaaaccgtttcctacgacagtcaggaccacgagatcgtttttgaagcgaaggacgacaagggcaaaaccgccatctacaagaccggcatcttcccggatgacgcgcttgttgaccgcctgctgaagggcaacgtcaagttcgccgccgagatccctacgcaggcttcgccgctcgtcagcatgctcgtcagctatatcgtgccgatcgtgctcattatcgccgtcggccagtggctccagaagaaaatgatgaaaaacatgggcggcaacatgatgagcttcggcaagtcgggcgcgaagatctacgccgagagcgagaccggcaagaccttcgctgacgtcgccggtcaggacgaggccaaggaggctctgaccgagatcgttgacttcctgcacaacccgaaccgatacgccgccatcggcgcgaagctgcccaagggcgcgctgctcgtcggccctccgggtaccggcaagaccctgctcgccaaggccgtcgcgggcgaggcgcacgttccgttcttctccatctccggctcggagtttgttgaaatgttcgtcggcatgggcgcggccaaggtgcgcgacctgttcaagcaggcgggcgagaaggcgccctgcatcgtgttcatcgacgagatcgacaccatcggcaaaaagcgcgacggcgcgggcatgggcggcaacgatgagcgcgagcagacgctcaaccagctcctgaccgagatggacggcttcgacggcaccaagggcgtcgtcatcctcgctgcgaccaaccgcccggagtcgctcgacccggcgctgctgcgtcccggccgcttcgaccgccgcatccccgttcagctgcccgatctgcagggccgtatcgccatcctcaaggtgcacgccaaggatgtgcatatgaccgggcacatcgacttcaacgccatcgcgcgcgcgacctcgggcgcgtccggcgctgaccttgcgaacatcatcaacgaggccgcgctccgtgccgtccgtctcggacgcagcgctgttgagcaggctgacctcgaggagagcgtcgagacggtaatcgccggtgcgcagcgcaagaacgccgtgctcagcgcaaaggagaaggagatcgtctcctatcacgagatcggccacgcgctcgtcgcggccaagcagaccaactctgcgcccgtcaccaagatcaccatcgttccgcgcacctcgggcgcgctcggctacaccatgcaggtggacgagggcgagcataatcttatgacgcgggacgagctgctgaacaagctcgccacactcaccggcggccgtgcggctgaggagctgatcttcggctcgatcacgaccggcgcgtccaacgacatcgagcaggcgaccaagctcgcacgcgcgatgatcacccgctacggcatgagccgcaaattcgacatggtcgcgctcgagaccgttacgaaccagttcctttccggcgataccacccttgcctgctcggctgagaccgccgcgcagatcgacgaagaggtcatcgcgaccgtcaaggctgcacacgaaaaggccatcaagattttgcaggacaatatggatgtgctgcaccgccttgcgcatcatctgctcgagaaggagaccatcaccggcgacgagttcatgagcatgctgtaaacagaaaagccgccccgaaggacggcttgacaacagcagaaataacaggtatactgaaaatacaaagaggcactgtcggcagacggttaaccccttagaagattttagtcactaagtgaccgcttactttctcagggtgaggcggtcacttagtgtatacgacgaatacgtataacacaaatgctgagcatacgaagaaacgaaagagtttcttacccatacgcaacaccccccttcacgaggaaaggggtcaaccgcctgccatctgtgacagtgcctgctgtcagtataacagacttcgacaaataacgcaagaaagcaaaggacagaacccggaaaagggctctgtccttttgtttttgtttattttctgtggcggcgctgataggtgctgtcattatagcgcgagcgggaggaacggcgccgtctgcggcggcggacaccgccaaagacaaggcccgtaaagatatgcagcaggaagaaggctgcggcggcgagcagcagtaccttgaacacgatgctctggaagaacgagctgagcttgtccgcgtagaacaggaccgtactgcgcgagatgtcgttgagggcgacaagctcgaccgtgccgtagtcgcggccgtcataggtataggtcacgctgccgatggtatcgccggccttgatgggagcggcgacctcctcggggatgtcggactgaagctcgagatcctttacgtcaagctccctgggcagcagggaaacgagatcgttcttcgcggtgaggatgacctgattggtgtcggtcgagagcttgactttggtgtaggtgacctcctcgccctgccgggcgagagtcttggaggtgaagttcttaaaaccccactggcacaggctcttggtatcggtgaagctggaggcgatggtcgggtattccttcgagctgctcgagcagccgagcacgaccgagaacagctttgcgtcgccgtattcggcgtagccgacgaagcagttgcctgcctgcgaggtatggccggtcttgatgccgaggcagtttgcgtagctccacggctggaacgagctgaagatcagctggttggtggtgaggatgatgcgctcctcgtgcagattggtctttgccatgcggtgctgcacggtgctcacgatgtcgcggaaggtcgcgtccttcatggcctgcttggcgatgcggtacaggtcgtgcgcggtggtgtagtggtcgtcctcgtgcaggccgcaggggttgcagaagtgcgtgccggtgcagccgagctcggcggcgcgttcgttcatcatgtcgacgaactgctcccagctgccgccgacgtggcgcgcgagcatgtaggccgcctcattcgcggagggcagcatgagcgcgtacagcagatccttgaccgtgacctgctcgccgagcttgatgccggcgttcgagctgtccgcggtcacgttttcgaagtcgctggcctcggcggtcacgaccgcgctcaggtcggagacgttctcgagcgtcagcagggcggtcataatcttggtggtcgaggcggggtagcgcttttcgtccgcgttcttctcatagagcaccatgtcgctttccgggctgacgagcagggcggccgtcgcgtcgagagcaggcgcgttcgcggccgccgccgtgaccgtcgggtcgctgtccgccgtcgtaaccgcagttttgtcggctgtatcggtgctgtccgcgctgtcagaggacgaggcgtcggtgtcatcctcgactgcaaaggcctgcggcaggggcgcggcgttcagcagcagcgccagaccgagcgcgagcgcgctcagccggcggagtatttcatttttcatcgtccgtgtcccccagagaaaagtcagcgttggtgaatttttcgcgcagaacggccggctttgccggaacgcggcgcagcgggtcatagcggaacgaacggcagtggtcggcggcgtccatcacgccgcgcttgcggcacgcgattcgctttccgtccgcgagggggctgccgtgggcacagtaggtgcagcgcggctcgatatctttacgcagcagcttgctcagcttcatgcgagagtcaactccttaaacactaataatctaattatagcgtatcgtctcgctttttaccagagtaaaatatgtacaaaacggtaacagccgcgagcacgcctgcggagacggcggagggcgaggagaccggtctcgcagagacgaaagccggaacacaggacgggaatgcacggcagagcgcggcgctgagggcggcggcgagagcgccgtgcaggagcttggcgcggacaaggccgggcagggcgagaccgttcgcagccgcaaccgcctgcatctgcatgaggacggacgcgccgccgaaggcgagcaggaacgaaacgagtacgaaaagcgtgcttttggggagaaatgacccggaaagcgcagccagaccgctcgtcagctcgagcaggccggacagcagccgcagcgccggagcgcgggacaagaccggctccatgagcgtgagcacgaccgagaaggtcacgagaaaggccgtgacgtcgagcgagatcgccgccgcatgacgcacggccgagcagaatgcgacggagaacggtctgctgtcggaaggttcgggagataccggtatcgtttgtccgttcttcgttccacgggaaacaaaaataccggtcaacagggcggagacggcctgtatgccgtagagcagcgcgccggttttcgccgaaccgaacagcgtgacgccggcaagcgcgatgcagaagccgggacttgcgcacgagcagaacagcgcctcgcgccgggcgtccgaggcggacagccgtccctcgcgcagcagcgaggcgcataccgccgcgccgaccggatagccgcccgtcagaccgagcacgacgggagcggctccggcctgcggcagagcgtaaatgcggcgcagcaggggcgcgagaaggcgcgagagtgcccggtcggcatgagagacggtcagcagctctccggccacgaagaacgggaacagcgccgggagcgccgagcctgccgcgagggcaaggccgcgccgcactccctcggcacacggccccgggaacagcagcggcagcacgagcagcagcacacagagaatgcgcaaggttatccacctcctgtggaaaagttatgcgcaaatcggaacgcatatgcgcatacagttagcgaagggggaatgcttatggcatttgacggatttgaactgttcgagccgcaggtcgagctgctcgggcggcatctggcgacgatagagaaccactgcggcatagtagagtatgacgagaccgtgctgcgggtgaaatgccgccggtgcgaggtgcgcatcgagggcgagggactgcatctgaccgcgctgacgctcggagagctggcggtcgagggagacatccgctcggtcgcgttcctgccgggaggggagggagcggaatgatcgagcggctgctgcggcggacggcgggggaggtgcgcgtgcgcgtgacgggcgcgagcctgccgcggttcctcaatgcctgcacgcagggcggcgtgcggctgcggcgcatggagcgcgtgtcgtgggacaggatggatgcgacgctgtcgctcggcgacttccgaaaactgcgctcgtgcatgggccgtaccggctgccgggtgcacattctcgagcggcacggcgtgcccttcgtgctcgcgcatctgctgccgcggacggcgctgctggcagggctggcggcgttctgcgtcatggcgtaccttgtcggcacgcgggtgtgggagatccgcacagacatttcgccctcgctcggcgaagacgcggtcatgagcaagctcgcttcgctcggcgtggacatcggcacgccgctgcgcagcatcgacacgccgtccatccggcggcagatgatggtgtgggacccggacattacgtttttcgcgctgaatctgcgcgggaacagcctgacggtgacggcgcacgccggggcggccgcgcccgaggtcgcggatgaagcgcacccgatgcgcatcgtcgcgtcgcacgggggtgtggtgcggcaggtgcgcgcgctgcgcggcgaggcgctcgtgcgggccggggatgcggtggagacgggagaggtgctgatcgacagtctcgtgccgccgacgagggagaacggtctcccgcacacggttcgggcggaggggacggtcgaggcatataccgtgcgccgggcgcggtcggtgcggccgctgataaaggcaaaaaaatcctattacaggaaaacgtgtcgacttatgtcgattagcattggaaaaatgacgaaaaaattgtattttggtactggtattgcaggggggacctgtgataaaatgatagaagcgaaaacatggcggctgagcgagagcgttcgtctgccggtgacggttttcgtgcagacctatcgatactatgacgcagagccggagaccgtgacggcggcgcaggagcgcacggagatggtgcgccgggcgctgggggcggtcatccgcgaaacagacggaggacgcgtgctttcgctgcgcagcgcgctcgaggagaaggacggcgcggccgtgctcgacctgaccgttcacgcggtggagcagatcggcgtggccgccgagggggacgcttccgagggcagcggcccttgactgctttgccgtcagcagacggctgaccttccgccgatacagcggctcgccggtggaggcgactttacgctcgaagtgagcgtgcacagtggccgccttcggcggcgggggggtgccggtgttcaccggcgggaacaaaaggggacgtaggacacctgcggtttcctatgtcccctcttgacacccctttgaccttccgctggccgctcagcgaagcattcgcggctaaacgggggagacgggggctcggttccgtgcgtcgggcaggttctgggacgctgttatgccctgaggttactttgcgtaaaccgccgcgcataacagtgcgcggccagacggtgcagggcggcgtcgttccgctgcgaaaagctctgcttccatcaagtgttgacccttggagcaccgaacgcccctgtgggcccctcgcatttagacgcgcgaccgtagggagtcgcgtccaaaggagggtctggggtgtcaagaggggaaagggaaccatcggtgccctgtcccctct

SEQ ID NO: 12859 - DNA, 21446 bp, Unknown
  gut microbiota DNA sequence
ccccggcactctccgccgccagacggcggcaatgccacgccatgtcatggcgaacatccccccgcccgggagggccattctcgcctccagcggcgcaccgctgtatcggcggagataacccctctgctgagggtaaagaaaaagggccgcattgcctgcggtaacaaaactgtaattatatcccttttaaggaaggtgtttctcatagatacgttaatccctgttgaacagaccgagctgctgatggcagtgttcggcgcgttcgacgaaaacatcaagctgctcgagcatgagctcgaggtctccgtcatcagccgcggacaggagctcaagatctccggcgagccggaaaacgtgggcgtagccacgcgcaccgtcggtgcactgctcgccatggcaggccgcggcgaggctatcggcacgcagaccgtgcagtacgtcatcggtcttgcgcgcgaaaaccgcgagagcgaggttcacacgatgagccgcgatgtgctgtgcatcacggccaagggcaagccggtcaaggccaagaccctcggccagaagcgctacatggaggccatccgcaagaataccatcgtcatgggcgtcggccctgccggtacgggcaagacctatcttgccgtggcggcggcggtcgcggccttccgcgacaagcaggtctcgcgcatcattctcacgcgcccggcggtcgaggcgggcgaaaagctcggctttctgcccggcgaccttcagagtaaggtagacccctatctgcgtccgctgtatgacggcctgttcgatatgctcggcgcggacaacttcaccaagtaccaggagcgcggctcgatcgaggtggcgccgctcgcgtacatgcgcggccgaaccctcgacgacagcttcatcatcctcgacgaggcgcagaacaccacgcccgagcagatgaagatgttcctgacccgtctcggcttcggctccaaggcggtcatcacgggcgacatcacccagatcgacctgccgggcggcaagcagagcggcctgcgcgaggcgctgcgcgtgctcgaccatgtcgagggcatcgcccagtgctatctcaccgaaaaggacgtagtacgtcatgagctggtgcagcgcatcgtcaaggcgtatgcggaatatgaaagcaagaaaccgaaggacaagccggaggcaaagccgcaccgcttcgtccgccgcagggaggaaaaataaacatgaagatcatcaaggaaccgtttatgcggcttgaaccggagcacttcatcagtgtcacgttcgagaccgaggtcaaggacgcggacagcgtgcgcgagctgatcgaaaagtgcgcgaagaacgtgctcgagcgcgagaacatcccgttcgacgcggagatcgacgcgcgcgtggtagacgcagaggaaatccgccgcctgaacgctgagttccgcgacaaggacgcggtgaccgatgttctgagctttccgatgttcgactattacaacggcgcgccgcgcgaggatctcgagcccgacccggagagcggccgcgtcatgctcggcgacatggtgctgtgctacacgcgcgcctgcgagcaggccgaggaatacggacactccgccgcgcgcgagtgcggctttctgaccacgcattccgtgctgcatctgctcggctatgaccacgagcggggcgaggacgacacggcacgcatgcgccgccgcgagaaggaatacctcgaggcgatcggcctgacgcgcgacgatggctaaaagccgtatccgtaaattccgcgagagcttcctctacgccgggcgggggctccggctgtgcatcacgggagagcgcaacttccgcgtgcacatgaccgcggcattctatgtgacggcggcggccgtcatgggacatgtaacgagcacggaggcggcggtgctgtgcctgtgcttcggcctgacgatgggcgcggagctgatgaacacggcggtcgagcggctgtgcgacaagaccgcgcgcggctacgaccggatggtgcgcgacgcgaaggacatcgcggcggcagccgtatttgtgtgcgcggccgcctgtgtggcggtgggcgtgtgcatcttcctcgcgcacggcgtgctggcggccgctctgcggtttttagccgcgcggctctggctcgcgatggtctttcttgtcaccgttccggcggctgtgtggttcgttttcttcttcggaaggaagcagtaattgccccaaacgggggtgccggcgcccgccgacaggggcaaaaggggaaaagggcaccgtatggttccctttccccctcttgactcccccaaaccctccttcgagccgctcagcaaagcattcgcggcgaaacgggggaaacggaggctcggttccgtgcgtcgtttcgcttatgggacgctgttatgccctgaggttactttgcgtaaaccgccgcgcataacagtgcgcggccggacggtgcagagcgcttgctttgcgctgcgaaaagctccgcttccatcaagcgttgacccttggagcaccaaacgcccctgtgggcccctcgcatttagacgcgcgaccggagggagtcgcgtccaaaggagggtctggggtgtcaagaggggaaagggaaccatcggtgccctgtcccctcttgtttccgccgccagacggcggcaatgccacgccatgtcatggcgaacatcccacggcccgggagggccagtctcgcctccagcggcgaaccgctgtatcggcggagataaaccctccgctgaggggaaaagagaaaaggacgcacatccgtgcagcagataaaagtttaattctttaggagatatttttcatgaaaataaccaagactgcggtcgtctctgtcgtcggccgcccgaacgtgggcaagagcacgctcaccaacaagctcgtcggccagaaggtggccatcgtctcgagcaagccgcagaccacgcgcacgcgcatcacgggtcttttgaacaaaaacggcacgcagtacgtctttctggacacgccgggtctgcacaagccgcgcacacagctgggcgactatatgtgcaaggtcgtgaccgacacggtctccgaggtggatgcggcgatgctggtggtcgagccgatcgcgaacatcggcccggccgaggaaagcctgatcgcgcagatcaaggcacatcatatgcccgctgtcctcgtcatcaacaagatcgacacggtcaagaaggaggagctgctgaacgtcatcgcgacctacgccgcagcgcacgagttcgaggcggtcgtgcccatctccgcgcgcacgggcgagggtctggacgacctgctgggcgagctttcgaagtacgccatcgagggtccgcagctgttcccggaggacatggtctccgaccagccggagcgccagctcgtcgcggagatcatccgcgagaagatgctccgtctgctcgaccgcgaggtcccgcacggcgtagctgtcggcatcgagcgctggcacgagcgcgaggacggtctcgtcgagatcaacgcagtcatctactgcgaaaaggcgagccacaagggcatcatcatcggcaagcagggcgcgatgctgcgcgagattggcaagcaggcgcgcggcgacatcgagcgcatgctcgacgcaaaggtctatctcgagctgtgggtcaaggtcaaggagggctggcgcaacaaccagtatcagatgcgcaacttcggctacgaggagcagtaacccgtggcagaggtgaagctgcgtgcgctcgtgctgcgcgaggtggacttcggagactgggacaggtatctcaccgtgctcgcggaggacggccgcagggtggaaatcctctgcaagaacgcgcggcgcggcaaaaagacaaatccggcggcgcggcagctgtgcttttccgagtttatcctcgcggagagaggagagaagtacgccttgcgcgaggccgacctcgtgcactcgttctttgtccttgctgaggacatcgagcgctacgcgctggcctgctacctgtgcgaactgacttcggcgctgagcgacccggggcttgagagcccggcgctgtgcaggcttctgctgacggcgctgctcgccctcgagcggaaaaagcgcgagccggcactcgtcaaggcggcctttgagctgcgcgtgatggcggagagcggctacgcgcccgatttaacctcgtgcggcgtgtgcggcgaggtgatagagaacccgccggtgtgcttttccgttcgggcgggcacagccgcggacgcaaagtgcgcggggagagtcggcggttatgcacagcttgtggacagtaccctgcgggcgatgcttcatgcgctgacagccgagccgaacaaggtgtatgcgttcgtactcagcggacccgccagagagcagttctgcggcatggccgaggagtatgtgaagtaccacctcggacgagaattcgagagcctgcggttttatcggtcattgcagatgccgatgaagtgatggtatataaacgcgtagagagtcgtagaaatacgtagagaaatatacaatatttagaataatagtgtattcttctacgacattctacgcatttctacactaatactcatctatcccaataaacgggtgacagaaaggagcagcagtatggatcgcaaagcagtctccatgtggaagataacgagaaatctgattcttacagacgtctgtgcaatcgccttgtactggctcataccgagcgcaaagatgctcgtgctgccgcttggtgtactgtgcgccatcggatatatgctgtggctgggacggtgcttcctgaacgactgcaaggccaatctgccgaatgaggactatcagcgcattgccgccgagttcggccttatctggttctggaaccccagtcggagaaaacagtggcagtacaccgccgaggaaagcggcgagaccggtgcggcgctgctgcgcatctggcgcgggaatatggtgcttgtcatcgtgtcgctggcggtcatggcggtgctggtttggatggggtaaacgtatagaaatgtcgtaggggtgcgtgggtatgtgaatgtatattggtaatccatcaacgaaaccctacgcaataggttgaaataattcctaaattataattgagaggatttgaaatgaacaaattaggcgaaaaatcccttaaaacactggaatactacgaaatactggaaaaactggccgcgcaggcggcctcggaggcggccaaggaaaaatgccgcgcgctgcggccgctggacgaccgcgagcaggcggagctgtggatgcgccagaccacggacgcgaaggaccgcatggtgcggcagggcagcccgtccttcggcggcatccgtgaggtgggcgcgatcctcatccgcgccgaccgcggcggcacgctcaatccgcgcgagctgctgagcgtggcgagcctgttgcagaccgcgcgccgcgcactcgcctacgaggcggagagcgaggaaaagagtgcgctctcgccgatcttcggcctgctctcgggcaaccgcagcctcgaggaggccatcaccaccgccattgtctccgaggaggagatcgcggacggcgcgtcccccgagctgctctccatccgccgcgagctgcgccgcatctccggcagggtccgcgagacgctcaaccgcatgatctcgggcgagcgctccaagtacctccaggagaccattatcacccagcgaaacggccgcttcgtcgtgccggtcaaggccgagcaccgcggcgacgtgccgggtctggtgcacgacacctcgtccaccggcgctaccgtgttcgtcgagccgcagcaggtcgttgagatcaacaatcagatcaaggtgctcgagggccgcgaggaggccgagatcgagcgcatcctcgcctcgctctctgctgaggtatccatgtacaagggcgccatcgagcaggattacgacgcgctcacgacactcgattttatcttcgcgcgcgccaagctctcctttgagatgaatgcagcagcgccctcgctcctcgagagcggcagccgtgtgcgtctgctgcgcgcccgtcatccgctgctcgacaaggacaaggcggtcgctatcgacatcgccatcggcgacgactacgacaccctcgtcatcaccggcccgaacaccggcggcaagacggtatccctcaagacgctcggcctgctttcgctcatggcggcgagcggtctgcacatcccggcgagcgaggagtccgagatcggcctgttcgagcatgtttacgccgacatcggcgacgagcagagcatcgagcagagcctgtccaccttctccgcccacatgaagaccatcgtctccatcatggactgctgcggacagggcgaccttgtgctgttcgacgagctgggagccggtaccgacccggtcgagggcgcggcgctcgccgtcgcggtcatcggctacgcccgtcagatgggcgcgtgcgtcgccgcgaccacgcactacgccgaactcaagaccttcgccctcacgaccgacggggtggagaacgcctcgtgcgagttcgacgtacagtcgctccagccgacctaccgtctgctcaccggcatccccggcaagtccaacgccttcgccatcgcggcgcgtctcggccttcagccggtcatcatcgaccgcgcgaaggagcaggtttcgaccgaggatgcacgctttgaggacgttctggctgagcttgagcgcgagcgccgccgcatcgagaagatgaaggaggaggcgcagcgcatgaggagcgccgcccagtccgagcgcgataagatgcgcgccgagcgcgacgccgccgaggaacgggcggataagatgatggagggtgcacgcagccaggcggacaatatcctcaagaacgcgcgcatgacggcggagaccgtgttcgacgagctggaaacgctcaagaagcagtcgcagaagaaggcgagcgaacagaatctcgccgccgcaaaggcggctctgcgcggcgtcatcacccagaccgagaacgagcagcgccggggcatccagaagcgcgtcgtggacgcggaggaggtccgtccgctggccaagggagaccgcgttcgcctgctgaacgtcggcggcgtcatcgcgactgtgctcgccgcgcccgacagggacggcagcgtgcaggtgcaggcagggccgatgaagatgacggtcaaggtcaacgaggtacgcctcgtcgaggagaaaaaggcggcgcccaagccgaagatgcagccgcgccgcgatgcaccgcgccgggagctcaatctgcggagtgccgagagcgaagtagatgtgcgcggcatgagcgcggaggaagcgctgttcgaggtggacaacttcctgtcgcgcgcgatcatggccggacttccggccgtcaccgtcatccacggcaagggcacgggcgtgctgagaaatgcggtgcagcagcacctgcggaaaaacaagcgcgtcaagtctgtccgcagcggtgtctacggcgagggcgagcagggcgttactatcgtagaattgaaataattccccgtcggggacaggcggtttttgttctttaccctcagcagagaggagaccttccgccgatacagcggtgcgccgctggaggcgactttacgccctcggagggcgtgcgcattgccgccgcccggcggcaggggggatgccgtgcccacggcgaggggattgtcggtgcccaccgacaggggcaaaagggggcaagggcaccgtatggttcccttgccccctcttgactcccccaaaccctcctttgcgccgcgactccctgcggtcgcgcggcgaaacgggagaaacggggctcggttccgtgcgtcgggcagattttgggacgctgttagaccctgaatttcccttgcgttatccgtagcgctgtcagtgcgcggccagacagtgcagggcggcagcgttctgctgcgaaaagcttcgcttccatcaagcgttggcccttggagcaccaaacgcccctgtgggcccctcgcttttagacgcgcgaccgaagggagtcgcgtcctaaggaaaggtcggggagtcaagaggggcagggaaaccttggtgtccctgccccttttgcccccgccgccgggcggcggcatcctgcggggcgcttattcctcctcgccgagaagctccatcacgtcgaccactgtatccccccgggatgcctccacatgcacatgcgtgccgatcgcttcctccgccggaatgcctgccgcgcacacgcccagcgcctctcccgacgagaccgcctgcccctcgcgcacgcgcacctcgctcagaccgcggtacgtggtcctgaggtcgcctgcatgcgcgagcgtgacgcacgttccgtacagtccgtcctcaaaaacagcctgcaccgtgccgtcggtcagcgccaaaacgttctcccctgcctcgcaggcgaaatccgtgccgctgtgcacgcgccagtctccgagcgtcggctgaaacagcagcatatcgcccgaaaacggcgtcagcaccgcgccggccgtcggccgggtatacaccggcgcggaaaccgtgaccgccggtgtcggctcgggcacggaaacaggctcttcggcctcggcggtcgtttcttccccgctctccggctcctccgccgtcacgggaacatcctgcacggtcaggtcgggaacatcctccgccggcgtgatgaccggcgcgcccgtctcgggaacggcagtctctgcactcgacccggcgtgcatccagagcacccacgcgctcgccgcgatgatcagtccgcacacggtcaggatcgtgtaaaatccgcggtcggacagcgcggcgatatgtttcggttcataatgtttcatggtttttccctccttttatccgcagtatgtccgcgcggctttccgcttatacaaaattagccttcgctaactaaaaaacttttctttttgcgataaatgtggtataatatctatcaagcgaaaagcaactaatgaaatggagcgacaatcatgactaaaattgatattatctccggttttctgggcgcaggcaagaccacgctcatcaagcgtctgctcgcggacgcgctcaagggcgaacaggtcgttctgatcgagaacgagttcggcgagatcggcatcgacggcggcttcctcaaggacgcaggcatcgttgtcaacgagatgaacgcaggctgcatctgctgctcgctcgtcggtgatttcggcaaggcgctgcacgacgtcgtcgaccagtatcaccccgaccgcatcctcatcgagccgtccggcgtcggcaagctctccgacgttatcgcagcggttcagaacgcgcaccttgacgttcagctcaacagcttcgtcaccgtcgttgacgcgctcaaggccaagatgtacctcaagaacttcggcgagttcttcgagaaccaggtcgcgcacgcaggcgctatcctgctctcgcgcaccgcagagtgcccggagaagcgtctcgacgagaccgtcgccatgctgcgcggcctgaacgagcacgcacgcatcgtcacgactccgtggaaggatctgaccggcgagcagctgctcgcgaccatggagggcagccgtgatctggttgccgaggtgctcgaggagatcgcgcacgagccgcatcacgagcatcatcaccatcaccatgaccatgatgagcacgaccacgaccacgaggagcatgagcatcatcacgatcatgaccatgacgagcacgaccacgagcatcatcatgagcacggcgaggactgcacctgcggctgccatgaccacgagcaccatcatcacgatcatgaccacgagcaccatcatcacgaccacgacggtcactgctgctgcggccacgatcatgaccacgatgcggacgaggtattcacctcctggggccgcgagaccacgcacaagtacaccgaggacgagctcaccgcagcgctcaccgcgctcggcgatgttacgctcggcacggttctgcgcgcgaagggcatcgttccggcggcagacggcggcgagtggctgcactttgactatgttccgggcgcacccgagatccgccgcggctcggccgactacaccggccgtctgtgcgtcatcggctccgaactggacgaggagcgcatcgcttccctgttcggcgtaaactaagggaggaacccccacatggctaacaatcccattccggtatatgtctttaccggttttctggagagcggcaagaccaagttcatccaggagatccttgcggacccgaacttcaccgaaaacgaagtgaccgcgctgctgctctgcgaggaaggcatcgaggaatacgacgaaaagtggctcgcccactacggcacggcgctcgttccgatcgagtccgaggaccgtctgaccccgaatatcctcaagcgcatcgagcagaagtacaaccctgaccgcatcatcgtcgagtacaacggtatgtggaagctcgagtcgctgatgcaggcgttcccggcgcgctgggagctgtaccagatcatcacgacggtcgacgcgaccaccttcgaggtctactcgaacaacatcggcccgcagatgttcgagcacatcaccaccgccgacatggtcgttttcaaccgctgcacggacgcgctcaaggagatgctctacaagaagaacatcaaggcgatgaacccgcgcgcggccatctacctggacgatctcaacggcaattccgaggactactcgcgcaatatgccgctcccgttcgacatcgacgccgacatcatcgacatcaagccggaggactacggcctctggtacatcgacgcgaccggcgagccggaaaagtacgacggcaagaccgtccgtttcctcgcgcaggtctaccgcggcaaggatgttccggcaggctcgttcgtgcccggccgcttcggcatggtctgctgcgcagacgatgtgaccttcctcggcttcatctgtcgctatgacagggccgaagagctcggcgtccgcgactgggtcacggtcacggcgtccgtgacggtcgagacgctgccgcagtaccgcggcgaaggcccggtgctccacgccatcgaggtcgttccggccgaaaaggcgaaggaagacatcgtttatttcaactaaaagataaaagaaccccctgcatgacattttccgtccatgcagggggtttttacgtaaagcttcagtggataacgttcttctccatctgctcgatgcggcggagttcttcctccgccttgcgctcgacggcggccttgagccgttccagctcttccagctcctcgtcgatgtggaactcgtcgcgcttgcgcatctcgtcgctctggagaggctccgcagcagacgcttccgcgttctctgcggcgagcgacggcgcgcttcccttctgcttgtcctctttctttttccgttccagctcgcgccgcttgtccagacgggagatgtacaggaactttcgaatgacgaacagcacgccgaccgacagcaccgccagcaggttttcctgcggcgaggtatgctcgacgatcatctgacgcgcgatggcaagaagcatgacgtccaccaccgagtcgatggtgtagctcgtgatcatcttgagcatctccgcgccgatcaggatcaagcaggcgtcgctcatgcggtcctgcaggtaatgcgcgtcgccgagcagctcggcgatgctggtcgtgccgatcagaccgatgcccgatatgatgcatccgatcaggataaggccgccgaccaccatctcgatcatggtcgcgcagaacgacaatcgttctctgaactggttcttcatctctttttctcctcttgctgctactctttctctcttctgttttttgacaaaatcttaacaatttatctgtgaacattatagcacacgccctcggccgatggcaatgcaattcgacatttttcataaaatagccaaaaataccgacgaatttttgtcacaaaaaaggacacagcccgcaggtctgcgtcctttctgctctttactgttcttccggcggctcgaccagcgtatagtttccggtctcgccgctgccgatcacggtcagcacatcctcatgcagcaggaagcgcgtttcgccgtcctcggaggctgcgctgtcgcggtcggccgaggccgtgcccgtcacgccgtccgagaacgtgaaggtgaatgttccctcgccggtctgctcgagcgtgaccgacgcgcccgaggaggcggcatagcagcccgcccagtcggtctccgtgtcccccggctcgctgagcagggcgtcatactcccccagaacgccctcgccgtgatagctgtaccggtcgcccgtcacgcggtccacggccacctgcccgactgcgccgccgtccgcgcggcggctgacgtcgaacacggcaaacgaatgggtttctccctcgacctcgcattccagcgtttcgcgcgacggcgctaccgcatagctttcgctgtcgaactgctcgcccgcgagcttctgcgcctcatacacgctgagcagctgcggctttttctcctcttcccggagcaatcccgcctgctcggcgcgctcgagcgcctgcgtctgcggattgacggtcgcggtcgtttccccggcacagccggtgaggcatgccgcaagcactgcggcggcaacaggccatcgtttcatggactgcggtctcccctctctcaaaatctgccggaaggccggaaaaacggctgcgctgacgcagccgtttccgctttcgggcgttgatacacctatcatacagtattttactgatttttgcaacggtaatctggcgggtttattcggcagaagccgggttttcctccgtgttctcgccgctgccgccgccctttctgcccttgccgcccttgcggtgcggcaggtgaacgagctttttcaggcgctctgcgatgctgtcggtcagcgagtagtagaccggcgtgatgaacagcgtcgcgacggtcgagatgaccatgccggtcatcatgacgacgcccatcggcttcatcatctccgagccctcgccgttcgagaataccatcggcacgaggccgaggatagtggtcatcgcggtcatcaggaccggacggacgcggcgcgggcaggcgttgaggatggcggtgttcttgtcctcgccgcgctcccggcgctgaagggtatagtcgatcaggacgatggacgaattgacgaccgtaccggccagaatgataacgccgagcagcgcgaccatggaaacgtggtttccgctgggcgcgagcagcatcatcgagccgagcaggccgatcggcaggatcagcatgatcgcgatcggcagcgcgaacgagttgaactgggtcgcgaggatgaagtagacgagggcgatcgcgaccgcgagggcgagcatgagcgtgccggtggtctcggccatctgggaagccatggtgtcgccgtcgccgatctccacgccgtccggcgtctcgtaggagccgagcacctcgtttaccttttcggtgatggcgttcgcgtcgccggactcgctttcgccggtgatggtgacggtctccttctggttctttcggacgatggactgcgggctcagctcggtataaacgtctgcgaccgagctcagcggcacattgccgcccgttgcggtcggcagctgcatcgagcgcagcgcgtccagactggtcgcgacgtccgcgtcgcccgagaccgtaacatcgtattcctcgccgttcatgcgcagcgtggtcgccgtcgagccggtcagctcgccgcgcaccagaccgccgatggcggccggggtcagaccgaagcgcgaggcgttctcgcggcgcaccttgaccgcgacgcgcggcgtctgctcgccggcagaggactcgacgttgatcgcgtccgggatggcggagagcttctccacgaggtcgtccgccgtcgcggcgagctggtcatagtcgtcgccggtcagctccacgctaatgtccgagtcggtggacatgctcatggattcgcttgcggagaccgtgatctcgcagccggcgatgtccgcaaggtcgcggcggagctgtttggtgatctcctgcgcggagcggtcgcgcttgtcgaggtcgacgagcgaaaccgtgacgctcgcgccggaggcggaggacatgatggaggtcgagtcgccggtcgagtagtagatctgctcggtctccggcaccttatccatgataatgcccgcgatgcggtcctggatggccgcggtatcctccatggtcgagccgttcggcatggagaccgagaccgaaacctgaccctggtccatctccgggataagctccatgccggccatggcgatgctgatgacgctgacgacgcagatggcgagcgtgatggcgatgccggcccagcggtgggtgatgaggaatttcaggctgctgcggtagcggcgcatgagcggcttttccacgatcgtggtggccttgagctcatccgagcccgccgaggcggccttgctgaccttggacgcgccgagcagcatatagcacagcagcggcacgagcgtcagcgcgatgatgagcgagctgagcagcagcgcgacgatggtgatgcagaattcccggaacatcatgccggtcatgccgcccgacagcgcgatcggcaggaatacggcgatggtggtcagggtggacgccgtgaccgaggtcatgacctcgcccgtgcccttcgtgcaggcgtcccagcggctgtagccgtccgcgcggtagctgaagatgttctccagaacgacgatcgagttatcgacgatcatgccgacgccgagcgtaatgccgccgagcgacatcatgttcagcgtgatgccgcacacgttcatgataaggaaggtaaacaggatgcagcacggcatcgcgatggtcagcgacagcgtcgcgccgaggtcgcgcaggaacacgagcaggacgaccgctgcgaacagcacgcccatccagatgttctgcaccgcgttgtcgacggtcatgttgatgtagtcggactggtccataacgacgtctgcctgaagcgcatcgttttccgcgatgacctcgttcaggcggtcgaccgcgctctgcgcgaccttgacggtgttcgagccggactgcttgttgaccgagagcatgatgcactcctcgccgtcgaccttggcgatggtcgagcggtccttgggctgcatggaaacgtccgcgatctggctgaggcggaccgtgccgccggccgggagcgagatgagcgcgttcttgacgtcgttcagcgaggaatactcgccgtccgtgcggacggcaagcgtctgcgagccgttgtcgaggtcgccgcccgggatggccatgttgtccgcgccgagctgctgtgcgaccgaggtaatggtgaggttgtagcccttgaggcgtgcggcgttggtcttgaccgcgacctcgtcctcgtagccgcccgaaacgtcgacagatgctacgccgtccagacgctcgagcgccggggagatctcgtcctccgcgatggactggagcgccgcgagatcagagccgcgcagcgcgacctgcacgaccggcatggagtcgatgtcgatgctcatgacggtcgggtcggaggcgtcgtcgggaagctggctcttgacctggctgaccttgtcgcgcaggtcggtcatcgcgtcgtcgaggtcggtggagtcggtgaactggacgatgagcatcgccatgttctccgacgaggtggactggagcgtatccagaccggacagaccggccaccgcgctctcgagcggcttggcgacctgctgctcgatgtcctccgggcctgcgcccggataggtcgcgtacacgatcgccgccggaacctccatggacggcatcagcgcgagcggcagggtcgaaaagctgtaaaagccgaacacaatgaccatgagatacagaaggatggtcattacgttgtgcttgataaaggttgctgctactttcatcgggccttaaccctccccgccgtcactggtgacgacacggacggcagagccgtcggacagataggactgacccttggtaacgacgcggtcgccctcgctcaggccggaggtgatttcggtctgggtcttgccgacaagaccggtttcaaccgtgacgcgctttgcggtcgtgccgctctcgtcgacggtgaacaggtagcgctcgttgtcgttgccggtcagcacgcactcggtcggaacggagagcgtgttctcgcggcgatcggtgtagaagatgacggtcgcgaacgcgccgatggccggctcggtgccggacggaaccgagaccgatacgtcatagagattagtctgctgattggccgctgccgggagcgagacgatcttcgcgctcttgacctcgtcggacaggacggagatctgcacgcccgcgctgtcgccggtgtgcaggccggcgaacacatcctcagagaccgatgcgttgatcttgacgcggctgtcctcggcgatgacgaccgccggctgtgcggaggaggccatgccgccctgcacgacgttcaccgccgtgaccgtgcccgcgcagggcgcggtcacagtgccgtaggaggcctgcttgttgatctgatccatgctcgcctgaatctgggcgagggacgccgcctgctgcgcgcgcgcctgctgcacgccggcctgcgcctgcgcaaggccctgcttggccttggtcagatcctgctcagcggccgcgcctgcctcgagcagcgcctcggtgttctcgacggcgagctgcgcctgctcgacgccgatctgcgcgttctcgatggccttttcggtcgcggttttggtcgcattgtatgactcgcgcagcgaggacatggtcgaggtgaccgacgaggtgtccacgttcagcagggtctgtcccttcgtgaccttgtcgccctcgctgacgctcagcgtcagcacctgaccggcaagcatcgggaacacctgcacctcattgtccgcagcgaccttgccgttgaccgagtattcggtgctcatcgcgcccttcgtcacctcggctacctcaacggcggtgcctgctgcggtctgctcctccccgtcgtcgctcgtctggctgccgcagcctgcgcagagcgccatggatgctgcgagcagcgccgctaaaatacgttttttcatcggtctcctccttagtttgcctgtttcctcagttcgcgctcgacatcacgccgcgctttgcccactcgtaattgttgtatgcggtcagcaggtcggtacgcgcgttttccgctgtctcctgagcggtcatgtacgtgtcctgcgcctcttcgtatttcagccgcgagatcatgccgcgcttgtattgcagcttggagaccgcgaaggtcttctgcgcctgcgtcagatcgccctgcgcggcggtcatggcggtgaccttctcctgcatggtcttgtacagcttgcggaacgagctctttacgctctcctcagtcgcgtcgcgctgaatcttcgccgcctcataggcgtgcagattgttggtgacgtcgttctcgtagtcgtcggacgccttgcgcacgctgtcaccggcggaccagatggaatagctgttctcgagcgcggatgcgaggtccttctcgtagtcgacagcggcaagctgctcatttgtcacgcccggcagcgcctcgatggtgatctcggtgccggtcgggtagccgcactggatggcgagcgtgttcctgaggctgtccgccgaggtctgtgcgctcttctgctgcgccgcgagcagctcacgctggctctgcaggccggagagcgtgttcctcgtggcgatgccgagggcgacctgctttttcgtctgcgcgatggtgcggtcgagctgctgcaggctgcgctcggtctgcgcgagcgaatactgcatggacgcgagcgagatgtaattgttctcggccgacatgcagatggtgtccgcgttgttctgcatctggcggcgggtcgaatcgaccgtctttttctgctcgtcctttgcgtcgtcctcgtcgtcgtcgagatcgttatactgccgataaaggctctcgcgctgcgcctgcagcacattgatctgcgcgttgatcgatttgagcagctccgtatccgtgatgccgtcccgcgacttcttcagctccctgatctgccggtcataggcgtcgatctgctgcgacagattgaaatacttgttgatgtactggtcggaaacgtcggtcttttccgcgctctccaccgtctgctgatacgagcggatggaaacgtttccctcgcgcacggtcttttcgagcgtgtcgaaggtcagcttgaccggcgctttcacctcggtctgcgccgtggtcgtggtctgtgcgggcttcgcggcgtctgcggcgtaagccggggcacacatgccgcacagcagagccgcgcaaagtcctgcggcagctgctcttttcatatatgtatcaacctttcttaaatagcgaaatgggatttatcaaacgttgaggcaataccgtacaattgaacaagagcgatttgcgagcaaattttgcgtactgacgaggcgcggttttgcggtaatacttgatgtattaccgtgaaatcgaaacgaagtcagggcacaaaatttccgcaaagcgccgcagctttcattgtgcggtgttgccttaaacaccggtcgggagcgtcagcacgccctgctccgcccactggcacgccgtgtagttctgcgctaccttgagctgcgccagcttgacgttgatttcagccgaggccacgctgtcctgcgcggactggtagctgagccggctcatcgtgccgagcttatacttgacggaggccagacggagatcgtcctgcgcctgcgtcagcgcgttctgcgccgccgtgagcgacacgcggctgtccttcatgttctgaatgaccgtggcgtaggccgtttcgaccgattcctgcgtcaccgcaagctggtcctccgccgccttcacggcctcggccgtgccggaaacgtccttgtcgtagacgttctgcgccgcacgcagcgacacgcgcctgctccagatgtcaaagctgttctttttcgcgttctcgaggccggtcttcgcattgatccggtcgagctcaccctcatagggcatgatgagcgtggacggctcaacgatcgtatccgcgtccagtccgcacagctgcgaaagcgacagaccgatctgctcgcgcatattggcgagcgtctgctgcgaattgaccagctgcacgcgctggttctccaccgtgtcgagctgaagctgaccgatcatgccgcggctgcgctgcaccttcatcaccgcgagattgcggtcaagggtcgcgatgccgtttttcaggctctccatctggcagtccagcgtttccatcgtatacagcaggttctgcgccgccatcgccatctggttcgcgatgctgtccgcctggcggcgaagctgatacgcctgatcgtcgagctgcgagagcatcgcgagcgcactctgatactgcacgctcaccgacaggttcatgttctccgcattgccgcgcagcgcgatgatctgcgcctcgtaggcctttttcgtgtccccgtccagctttccgctctccaggatcttctcaagcgtgtccgccaacttgctatatgccgcgccgggactgaccgtgctccccatcgacgacgaaccgcccgccgcgtcctcgatagcggaggcgttcctgcgcaggatgcgcactgtgctgttatcctcctgcaccgcctttttcacggccagcacgcccatctgccggaccttgagcgcgggcgcctccgcgccgatgccggcaggcgtctgccccgccgccgtctccccggccgcgagcgccggtacggccgaccctgcgagcagggtgcaggcgagcagtgcgctgatgacttttcgtttcatataaataccttgtctctcctctcgcttgcggagaacgcgcgcccccatgcgtgctcttgcaatattaaagcagttctctcgtgatgatgctcgtgtggatatattctatgctccggcgcggcgattcgcccgtgcgcagcgtgtgcgcgagcacctcgatcgcgcgcgtggtctgcgcggagaagtcctggtcgatgatgaagtccagtctcccctcctcgaggtatttgcgcgcatagggcgtcaggtcatggcagatcacatggatacggcgcgccggcctgacacgctcgagcgcgtccatgcagccgcgcacggactcgttcgccatgtagatgccgcgcagccgcggatgacccttcgcgtagtacagcacgccgtcataggtcagctcgtacttttcgacgctctcgatgacgttcacgaccacgtcgtcgccgcgcagctcgtgcagccggtcgagaaaaccgcgcacgcgcaggtcatgcgccgcaaactcgcggttgcccgtaacgacgaggatctcaccgccctccgcatagggcgcgatcagtcccgccgcgacgcggcccgactttaccatatcctgaccgatgtgatacaggcggcggctctggcagacatccgagtcgcaggtcacgaccggcacgccggaggcgaccagacggtcgatctcctcgcgcatgacgagcgtgtcgggcgcggtgacgatcaggccgtcgatgccgcgctcttccatgcggccgatcgcctcgaagtacgagcgcggagaacggttcttcagctcctcgaccagcacggtgatgtcgttcaggccgcggttgtgcaccgcggtgcggatgccgtcgcgcatgcggcggatgaagaacgcatcccagctcggcaggatgacgccgatgcggtacacgccgcggcccgcccgggccgcctgccgctgcgtcggtgttttgtagccgtattcgctgatcagcttctgaatgcgctcgcgcacctcgggcgagacgttcggacggccgtttaccacgcggtctaccgttccgcgcgatacgccgcactgatccgcgatccactgtgcagttaccttcatagcaggattctcccttttactctctcgtgcattttttgttcacagcacgaaatcacggtaaattgtgcattttagttcacgattgcacggtttattctatcataccagacaaagcttcacaagcaattctgtgcattttagacactgcgcgcgaatttgtcgcattcggttgtgcattttttgtttttgcacaacgcacggcttttctgcacgtttttgcacgtgatttcctgcacttttcaccaaacagacatgcaaaaattgggcggtacgctaaaaatgaaatccccacttgaagcacgatggcaagtgggatataataaagttatccaaggggagagctgcggaatgcggtctgcgctgtgcagactgaccatccggagcctcgacctactgaaaaggagagaattacaatgggcattctgaaaatcggcgtagttggctgcggccgtatcggcaagctgcacatcaacaacctgatca

SEQ ID NO: 12860 - DNA, 799 bp, Unknown
  gut microbiota DNA sequence
gactgctgcttttttcatgatggtaacatcctttccttttgtgctgtatttcgctgctgcacgttcacggcgagctgcgcaatgctcgagcccgcgtgcagacgttcgcagtagatctccgtgcaccgctggtatttggcaaagaggtcgcgcgcccgctgctcgtcgccgtacaccttccagaggccggcgtacttgaaatcagccgcgtggtgctcgatgaatcctttgacgtcttccggcggatagctcagaaacaggccgatctcgtgggggaattcgtcgtacgcgcgcagacgctcgatgagcttcatcaggcactgctcgctgctgccgcagacatagcctgcgtgccgcagaatctccgtcgccagccggtcctgcagatcccgctccagatcgcgtgggcggtacagatacagcagcgcgctcttgtccgtgaatcgcagcgggaggaggcagagtcctttgggaaccagcacctggttatactggcggatctccatgagcaaagtctcccggttttcatacggacaggggaacaggctgccggtcttgatcccggccagtgtcggcgcacagagccgtacgacgttttcctccgacatggcttgcctccttatctgtggttgtttaccggttttcgcgcagtgagcaatgctgcgcggttgttggttaaaaccatctaactcatgtgtgaaaagctgcgcgtttcgttgctttctggtgttatgatactgcatgatacccccggcatccgctccaaatcatcggaacatggctccaaaatgaaaaagtt

SEQ ID NO: 12861 - DNA, 5527 bp, Unknown
  gut microbiota DNA sequence
gtcagcgcaaaggagggtttgggggagtcaagagggggcaagggaaccatttggtgcccttgcccccttttgcccccgccgtgggcacggcgttccccggccgccgaaggcggccatttctcgcgccctgagatagggcgtttttcgcctccagcggcgagccgctgtatcggcggtaccgcttaccctctgctgaggggaaagagtgaagggcatatgcccttcttttgctataatcatactaatccgcaaggtttttgaaaaagtttgcgaaaaaggattgacagaagccgcacggtcggttataatcatagcattcccagtgaaataatatgatttaaggagacgcggtcatgcgatactacttcgaaaagctgctgcgtgccaatttccgttgcggacgaatgtgatcctttcttgtgagtcacggccccgggcggctcgtgcacaggacagtaaaacaaaaagaaaacacttactgaaacaaaaaggagaacatgatcatggcagagatcaagaacaccgcaaattgggcatttgaaaccaagcagcttcacatcggtcaggagcaggcggacccggtaaccgactcccgcgcagttccgatttatcagaccacctcttacgttttccataacagccagcacgcggccgaccgtttcggtcttgccgacgcaggcaacatctacggccgtctgaccaactctacgcaggacgttttcgagaagcgcattgcagctctcgagggcggcgtcgcagctctggcaaccgcctccggtgcagcagcgatcagctacaccatccaggcgctcgctcaggcaggcgaccacatcgtagcgcagaagaccatctacggcggcagctacaacctgctcgcgcacaccctgccccagttcggcgtcgagaccaccttcgtcgacgcgcacaacctcgcagagctcgagggcgcgatcaaggacaacaccaaggctgtctacatcgagaccctcggcaacccgaactccgacattccggacatcgaagccatcgctaagatcgcgcacaagcacggcctgccgctcgtcatcgacaacaccttcggcaccccgtacctcatccgtccgatcgagtacggcgcggacatcgttgtccattccgctaccaagttcatcggcggccacggcacgaccctcggcggcgttatcgtcgactccggcaagttcgactggaaggcttccggcaagtacgctccgatcgctgagccgaacccgagctaccacggcatctccttcgcggacgctgtcggcccggctgctttcgtaacctatatccgcgcgatccttctccgcgacaccggcgctgccatctctccgttcaacgcattcctgctcctgcagggcaccgagaccctgtccctgcgcattgagcgccatgtcgagaacaccaagaaggtcgttgaattcctcaagaaccatccgcaggtcgagcacgtcaaccatccgtctctgccggagcacccggatcacgctctgtacgagaagtacttcccgaacggcggcgcttccatcttcaccttcgacatcaagggcggcaaggatgcagcgttcaagttcatcgacaagctccagatcttctctctgctcgcaaacgttgcagacgtcaaaagcctggtcatccacccggctaccactacgcactctcagctgaccgctgaggagctcgaggatcagggtatccatcagggcaccatccgcctctccatcggcaccgagaatatcaacgatattctggctgaccttgagcaggcattcaactaaaaattaacgaaaacgaaaaaggagagcgcatcgttccagactgcgctctcctttttgcactttcaaattaaagctgcgagaatacctcgccgatcggcgcgtgaatgaccagatcggctctgcggtctgccggagtaggagacttgttgacgagaacgagcttgttcccgcgataatagtcgatcagaccggccgccgggtaaaccgcaagcgacgtgccgccgatgatcagcatatccgctttggagatgtattcaacgctcttgttgatggtatagctgtcgagcccctcctcatacagaacgacatccggcttgatcgtgccgccgcagctgcacttcggaatgccggtgccggaggcgatcttctcgaccggatacggcttgcggcagcgcatgcagtagttgcggagcaccgagccatgcagctcgagcacctccttcgagccggccttctggtgcagtccgtcgatgttctgcgtgacgaccgcgcggcatttgccctcgcgctcccattctgcgagcttgaggtgcgcggcgttcggctgcgcgtcgagcgcgagcattttcgcgcggtagaaccggtagaattctgcggtctcgctgaggaaaaacgtgtggctgagaatagtctccggcggatacttgtactgctgattgtacagaccgtctaccgaacggaaatccggaatgccgctctcagtcgaaacgcccgcaccgccgaaaaagacgatgttgtcgcagccgtcgacccattccttgagctttgcgatttcagaagtcatggaaaattccttctttccttcccgtttttacttgacgatgttgcagacgccttccctgcgctcgtgcggctgggtctcctttgcgatgtagccgatggcggcggagcaggttacgatgtggtcctcgggcgtgccgtactcggtcagcagggcgcggacagccggtacgtcgcactggtcgcgcacctgattgatccagcaggagccgaggccgagctcggtcgccgcgagcatcagattttcgatagcggccgcgccgttgagcagggcgttacggtcgtcgcgctcgcaggagatgttgatgatgaccggcgcaccgtagaaattgtactcggggccgcggttgtccgcctcagcgatggcgcgcgcgagcttcagcgtcttttccgggttgtaaacgaccgagaaatgccagttatatctgcccatgccggacggcgcccactcagccgcttcaacgatccggcggatctgctcgaccggcggaagctcgggcttgaaggcacgggtggaacggcgggatttgatgatgttcataagctcagacatggaaatgacctcctgtttcacggccggaggaagtcctcctccggcatgtgtctgcgtgtttttgtacgatgaatacagtataacgctttccgggcgcgttttcaagacaatatgaacaaaaatacagagaaatgcagaaaaactctgtaaaatcacgttgttttgtgctatactgattaagattgtataattggaaacaatggcacgaaagccacgtcatatggaggaagcttctacatgatcaatatcagcgaactgagcctgaacttcagcggcgaaccgctgttcaaggacgtaaaccttaaattcacgcagggcaactgctacggcgtcatcggcgcgaacggcgccggcaaatccaccttcctgcgcattctgtcgggcgatctcgacccgtccaccggcacggtatccatcgcgcccaagacgcgcatgagcgtgctcaagcaggaccactttgccttcaacgacgagaccgttctcaacaccgtactcggcggcaacgagcgtctgctcgctgtcatgcgcgagaaggacgcactttacatgaaggacccgttcaccgaggaggacggcaacaaggcagccgagctcgaggccgagttcgccgagatgggcggctgggacgccgagaccgagaccagcctgctgctcaacggcctcggtctggatgcggacgccattctgtacaccgagatgaagaacctcggcgacgtcgagaaggtcaaggtcctgctcgcccgcgcgctgttcggcaagccggacatcctgctgctcgacgagccgaccaaccatctggatattcaggcgatccgctggctcgaggattttcttgcggacttcgagggcaccgtcctcgttgtatcgcatgaccgtcacttcctcaacaacgtatgtacccacatcgtcgacatcgactacggcaagatcaagctgtatgtcggcaactacgagttctggtacgagtcctctcagctcgttcagcgcatgatcaaggatcagaaccgcaagaacgaggagaagatcaaggagctgcagaactttatccagcgctttgcagcgaacaagtccaagtcccgtcaggcgaccagccgccgcaagctgatcgacaagctgaccgtcgaggaaatgccggcgtcgtcccgccgctatccgtgggtcgcgttccagcaggaccgcgaggccggcaaggatattctcgaggtccgcggcatctccaagaccatcgacggcgagaaggtgctcgacaacgtttcgttcatcgtgcgccgcggcgacaagatcgcgttcatctcggacaacgagcttgccatgaccacgctgttccagatcctcatgggcgagatgaagccggacgagggcagcttcaagtggggcgttaccacctcgcagagctatttcccgaaggacaacaacgagttcttcgacggccacgaggagaatatgctcgactggatcgcgccgtactcccagaccgatacgctggagtccacgctgcgcggcttcctcggccgtatgctgttctcgggcgacgatgtttacaagccggtccgcgtgctgtcgggcggcgagaaggtccgcctgatgctcgcgcgcatgatgctgttcggctcgaacgtgctggtcgtcgatcagccgaccaaccacctcgatctggagtccatcacggcggtcaataacggcgtgcgcgacttcaagggcacggtgctgttcgcgtcgcacgaccatgagttcgttcagacgatcgcgacccgtatcattgaaatccgcgagaagggcgtactcgacaaggaatgcacctacgacgagttcctcgacttccgcgagacgtataagggctaagcccttattattcctgccgccggaggcgaagcttttttctgcttcacctgaagcagacggcaggccttccgccgatacagcggcgcagccggtgcaggtgagaatagctgccgatgggcaagccgggcattgccgccgcccggcggcaagggatgtcggtgcccaccgacaggggcaaaaggggacaggacaccaagtatggtttcctgtcccctcttgactcccctgaccttccttcggacgcgactcccttcggtcgcgcgtctaaatgcgaggggcccacagggacgtttggtgctccaagagtacacgcttgatcgaagcggagcttttcgcagcgacggggttcgcgccctgcaccggatggccgcgcactgctatgcgcggcggataacgcaagctgacttcagggcctgaaagcgtcccaaaagcgaatcgacgcccggaaccgagcccccgtaactcccgtttcgctgcacatcttcgatgtgtcagcgcaaaggagggtttgggggagtcaagagggggcaagggaaccatttggtgcccttgcccc

SEQ ID NO: 12862 - DNA, 25332 bp, Unknown
  gut microbiota DNA sequence
ttcccgccggtgaacaccggcatctccgccgccagacggcggcactcccccgccgccgaaggcggatactgaccacgctcaccctgagcataaatccccctccagcggcacgccgctttacccgaagcagaaacagtcgtttttcatacaaaacaaatagactttctccctcttctatggtatactattcttaaatagtatagttaacactctatgctatcacccattcattattgataattattatcaaataaaattatttatttattttgacaaaaaactattgacatttgtgtggaacagagctatactatagttgttccaagagagaaaggaaggaacaagttgagaatcactcacgaggcagattacgcgattcgcgtaacctattgtctggcacttaccggcggcaagcagtgcgccaaggatatttccgagctgacaggagttaccctccgtttcgcgctcaagatcctccgcaagcttacgcagtccggtatcaccaagtcctacaagggcgtcgccggaggctatgaactcaaccgctccccttccgaaatcagtctgggtgaaatcattgaatgcatcgacggcccgatcgcaattaaccattgcctcgccaacgaatttcagtgcacccatgtgggaagtcagaatgaatgcgactttcaccgcgtgttctcggagatcaaccggtctctgcgcggtcagctctttgcgataacgatggatcgcttccttccggctaagcttttacagaacaaataaattccaactacctattcaggacaagaaacaggaggaaatcatcatgaaaaagtttgtatgcaccgtttgcggttatgtttacgaaggcgaagcagctccggcagagtgcccgatctgccacgcaccggcagagaagttcaaggagcaggctggcgaaaagacctgggcagctgagcacgttgtaggcgttgcacagggcgctccggaggacatcatggctgatctgcgcgctaacttcgagggcgagtgctccgaggtcggtatgtatctggcaatggcccgcgtcgctcaccgcgaaggctacccggaaatcggtctgtactgggagaaggctgcttacgaggaggctgagcacgctgcaaagtttgctgagctgctcggcgaggtcgtaaccgactccaccgagaagaacctccagatgcgtgttgacgctgagaacggcgcaaccgccggcaagttcgatctggctaagcgcgccaaggctctcaacctcgacgctatccacgacactgttcatgagatggctcgcgacgaggcccgccacggcaaggctttcgagggtctgctgaagcgttacttcaacaagtaagaaagtctgtatatccgcgctggagccagtctcggtaatggcgaaaagccagtgattccagcggttttcagcacaaaagatacgcagcaacagaaatgcggttcacagtaaagtgtgagccgcatttttcgtctgtatccatacccgaaatatgccggggcagacaaacagcacagtctttctccgtccgcgcggtctcgcatccaggcaggaaggctgtacctgtctgcgcccgtcagtccgcgaaaagctgcacccagtaaagcgtgccgtcgatattgacgctcgcagagccgatgcgcgagtaactgctgttcagaatgttcgcgcggtggcccggcgaattcatccacgcattcacgacctcggatgcgcttttctggccggaggcgatgttctcccccgcccggagataggtcacaccgctctcgctgagcgccgaactgaatgacgcacccgacgggcgtgtatgcgaaaagctgcgcgcgatctcgcgtgcgcgcaccgctgccgcatcgctgagcgcaccgtcctcgacgagcgcggcatagccgttctgactgcgtgcgctgttcgtcagacgaacgacctcgctcgcggcactgctgctccggatgcctgcgctcacactgctgctcccctgtaccggccggtccaaatgagctgcgccggcggctcctgtaagcgctgcggccgccagcgcggcgaaaacaattttctttatcctgttcatgtgctttcctcctgtaaaacggcggctctgcgtccgctctgcggcaagtataccatgttttacaaccgttctgcaatggaaataccggctatccaagccagtttatgccgttttcggaaacatttcattcgttttacagcattctaaaaaatatttgcatttgccggtttgatgcgtcataatgatagtgggaaaatttttgcaccgaaatgcacacacatacacctcttttcggttttaaggagatgaaacaccatgctgatccccccttcccgtccctggcatcgtgcagagaacgcggaggaattgcttgcgctctcaaagaaactcggactcaccccgaagaaggctgtcgaacccaagccgcttgtttaccgtgatctgctgaacggcacgagcgagccgtgcgcgctcgtcggcagcgagggcgaacgctacgccatcattgacatcggcggcggtctgcacatcatccatatcgactgtcttgccgatatgcagtccggctcgcgcaccagacgtaccgaggccgaaccggattgcccggtctatacggtcatcgacatcgaaacgaccggtctcgaccgccagaccgctgagatcattgaattcggcgcgctgcgcattgagaacggaacgccggcagcacagttttccatgctcgtgcaggcttccacgcccgttcctccggtctgcgccgaactgacgggcatcacggatgatatgcttgccggacagcctgagatccgcgaagcgctcgcggcatttgtcgcatttatcggagatacgccgctcgtcggtcaaaatctgctggattttgatctgccgatcatcaaccgcatctgcgaggagcagggcatttccccgctccggaaccggtgctgcgataccctgctcacggcacggcgctgcctcacgctgtcgagctacaggctcgaagcactggcgtcggcgctgggcgcagagcagagcacggcgcaccgtgcgctcggcgactgcgaaacgacataccgcgtgttcgaaaggctcgctgaggattatcctgcggcagttcaatggacacggccgccgcgcccgcgcaaaacagctccgtctgcaccgcgtccgcgcgttaccgcgtcgcagcttgcgcattttcagtcgcgcccaaaggcaaaggacatcgtcccggcgaccgacctgttcgacccggcacatccgctgttcgacaagacctgcgtgctgacgggcgagctgctgaagctgagcgaccgggaagccatgcagcgcatcgccgactgcggcggtaaaaacgccgataatgtgacaaaaaagaccgattttctcattgtcggcggcggttcgcccagtgagaagaagagcggcaaggtccgcaaggccgaggaatatattgaaaagggcattccgatccgcataatcagcgaggaagaatttcttcaaatgtgagggccgggttttcccggcagagataaaaggggcagggacgccaaggcttccctgcacagggacatcaaccaaataccgttcatgagcagagcatgaggccaccggaaatcacccggtggcctcgctttgcatgatacaggctgacgcccttatttgccctgataggcgcgatgtaagcgataaataactaaaatgccgacagccaccagagagtggcttccggcattttgtcagggtgctttcttgcagacatcgggtaggttctcggaccagggcatcagattaaggaaggcttttcagtcattacacatccagataattttcttagcggcataacatgaccaggacaatcgtttccttatatttcgttttacagccgatagccaagcagacgcgagatgttatgcgccgtctgccgcgcctcccggatcatgacctcctgatcctcccgcattcggtaatctgggccggaaatgctcacagccgccaccaccttgcggttcatatcatagaccggcgccgccacgcagatcagccccgcttcaatctcaccctcatccatggcatatccgttgagccgggcctggaccagctgggaacgcagctggtcggaatcggtgatggtgttgctggtcagcggataagccttgcggttcatccactggcagtaatcgtcgatgtatgcctcgttctggcaggaaagcatcgccttgccgctgctggtggcataggccggcgcccggccgccaatctgtgtgttgcagacaatggagcggtgggtctccactttatccagataaaaaatatcgtgctccagcaacacgctgagattaatggtctcatgcacagtgtcgctcaggtgctccagctccggcctggccacccgccgaaggtccgattgacccagaatcgcactggccaacagcatcagccgcggccccacccgatagctcttgcggacagggtcctgcaccaaatactgccgctccgccagcgtggacacctgacgaaacaccgtggtagagggcatatccagatggtccaccagcgccttcagcgtccattcggtctctctgtccatgaaacactccaggatctgtaaggcgcggaggatactggacacttgctctttcgccatatatttctcttcctttcgcgcaaaacgctcattttttaagatgcttggcaaataaacggaaaaatcctatgatattagtataccataagagaggctgcttgtgaatctttttcgtcttaaattccggaattaaagtccgtactatggaactttttgagtttctcccttctcccttgcctatacagcccagacagcggctgaaaataaggacttagaaaggaaatgaaacatgagcaaaaaagcgttgtcatggacggcgataccgcagcagcctatatctcttacgccttcttccaccatgcggaaaaggccattgccacctgcaaatcaccgccggcgatctggcggcggaaacagggagcaccatcgccatgcgctgagggcctctttctctcccggattccctgggccttccatattcaaaaagcggcccgctgtctgaatacagcgggccacttttttgctttttgcagaggaaatttactcaacaccctcccggcgcagcagctccaggatcttggcgtcatcttccactgtcgcgttgggcatggggaaagtgccggtgctgctggcgaccacgccgcgcagcttgcaggcttctttaatgaccggcaggaaggggctgcggaccgcatagagatccatcaggcggtcaatggtctgctgtcccctggcgatcccgtccagatcattttcccggaacgcccgcacccaggcggagcagacctcaggcaccacgttgctcaaagcgccgatgcaaccgttgcctccagccagcacgttgtgggcaaagttgtcatcaaagccggaataaatctcaaaggaggggatctgtgacttgacgaccttgatcagctcccgggtgtgatccataccggaaatagtatccttcatgcccacgatgttgggatggatcttggccagcgccagcaccgtttgaggcgagatggtatagccggtgttgtcggggaaattataaatgtagatattgccatgaatttgagctgccaggcggtcgtagtattgcagcagcgcctcagcgccgaagtgaaagtaatagggcggcagaatcatgacggcatcggccccggcatccaggcagaaattggagaaatttacaatctcgtccgccaccatgtggctggtgccgataatgagcttaacccggcggttcaccgtctcaatggcaaacttggccatctcccggcgctggtccatgggcatggcaaaaaattcgctggagctgccctccaccaaaatgccgtcaacaccgttttcaatcagattgttgaacaggtgctcctggctttcaaaatccaggctgccgtcttcgtgaaagagcgtgattgcaggcgtcagatatgctgcgttcataatagaacttcctttcttgtctgccggcaaaaatgttctgccgtttttttggttccgtataacggaatcatattccaaattaactttacacaaaactatgctattaacatcacaaatatagtatagtcttttccctccatttgtcaaggggtttttccaaaacacgcaaaaaaaaccgggcccgcactgcgggcccggtcagaggggcattgaaaaaacttacacgaagttgcacacacgggcaatggccatctccgtatagcccagggactcggccttggtctgcttgccgcaggccacctcctgggtcagcttcagcagctcgtcacccaggccttccagagtcttggtaccatagatgatgggagaagcgtccacgtcaatgttgtccaccatgttggcataggtcagcttattgccggtaatcttgatgacgggagccaaaggattgccggtgggagtaccgcggccggtagagaacaccacgatctgtgcgccgccagccaccatgccggcaacggaagaggggtcattgcccggggtgtccatgatgaccaggccctgcttggcctccacctgcttgccgtagtcataaacggcattgacggggctgtgaccgcccttgtggatgcagcccagggacttctcctccaggcaggtcaggccgccggccttgttgccgggagaggggttgccctcgcggacttcctcgcccaccagctgcaacgccttttcgtagcggtgcacgatctcataaatccggtcatggacctcgggcgtagcggcccggcgggccaggatgtgctcggcgccgatgaactcagtggtctcggacaggatggaggtgccgccctccttgacgatcagatcgctgagctgtccgatcagggggttagaggcaaggccgctggtggggtcagagccgccgcactccgtgccgatgataagctcggacatggggaattcttccctttgcagcaaggacgcctcttccaccatttccttggcgtagcggacggccatatcaatggccttcagggtgccgccggcctcttggatgatgacctgcttcaagggcttgttggtgcgttccttaatggcctccaccaccagatccatctggcagttttcgcagcccagggataccaccaccgtgccgtagacattggggttagcggcatagccggccatgacatccatggtgaactgctggtcggaagccacctgagagcaacccagctggttgttgaaggtcacgctgcccaccacctgctgagagatgatgcgagtggtatcggaggcgcagacgctggcaggcagaatcaaaaccttgttgcgcacgccaacgcggccgtcaggacgcttataaccgtagaaattcatattgaaatcctccttttctcagcctttggcatccaggttttcccggtgctcttccagattgtggcaatggacatgctcgccggccttgatatcgcgggcagccaagccgatatgctcgccgtacttgacaatgggctggcccttggcaatgtcgcaggcagccagcttgtgataaatggtgacatcctccagagcggtcaggctcttttcctggcctgcacagttataggtaacggtatcacccttggcgatgggctcaatggcaacgatcacgttgtccttcgccgcttcaacgatcatagcattcagcattgttattaatctcctttcagtcctctatcttttcagcaagtgccttctttaaaaatcagtccttggcaaacagagcagcctgcgcctcgtccttggggaacttgggacaaccatacttcttggcccaccaggaagtgatgatgggaaccagaatggcggtcaggatggcggaagcggccacctgagaggtcgcaatgtccgcccagggagcccaggtggcgtctgcggcagcaatgacagcgggaacagccacggcgttgcctgcggtagtagcaacggcccagccggcatagccgggacggcggctgataaatttgtcgcacagcatgatgaaggcgccgccgatcaggcaggtgataaggcccagcaaaataccctggacaccgcccttggcgatgttggtcaggttcatgccggagcccaagcagaagcccacgaagggaagcaggatgctgccggcgggagccaggaagtcagagagatccttgtcaatgttgcccaggatcatacccaccaggatggggccgatggcggcaaccagagccatgagcgggatgtcggcaaggccgcctgcgcccatagcgatcatggtgagcatggggccgtcgttgatggccagcagaggcatggcggcctggtcaaccgtatcgccgtagctgttcatcagggccaggtatacagaaccattggagttggtaacagcggagatgatggccagcgcgctcaggcccagcaggccctcgggaccgcagagcttgcccacaccgataccgatggcggcaccgatgatgaacttggcaatcagcagcacgccgccgcgcttgacgacgccgccgatctcgcggaatcgcagggtcgtacccaggcagaacagctgaataccgatcgccgcgttggcaccagcgctggtgaagattgcggtggtaaaggaaccgattccagtgacctgcgggaagaaagtattgatgaacgcgcccaacagcataggcacgaccatcataccggcggggatttttttcaggaacttcatgatcatgggctttttcctcctcgtttttattcttttctcccatgtctccacccgttttttcagatattccgcacagcggaatatcgttccaaaacgagggcgaagtaaattcccctcgagggggaactgtacttctcgtacaaacgcattatatcttttttcgattcacttgtcaagaaattgtcaggccaccgccttattttcagcaattgtgcatgaaccacgtctccaaaatctgtcgaaaaagtcaataaagagtctcttgtcagagacccttttccaccggatgcgctttcagatatgcccgccactccacgcattccgcggtatggagatggatgccgtcggaggtcagttcttttcgcaggcaatcgttcttcacggtcacggcctccgccacattcaaatacaagcctttgcgcaatgcgcttacgctagcgcgtccagaaggtggatctccccccgctgtctcctgggtgccttggtaaacacggattccaccgtggcgcccactgcgtaaaggtaggtttcctcctctgtgtcttttacttattagacgggattcgaccggaaaagtcgatacaatatggcgctgttgacaaagtcacgcaacagccctcgctttacagcaaaaaaatacggctgtccggccatcgacccggtggtcatcgtgaagtacctgctggtggggttcctgtacggcatcccgtcggagaggcagatcgagcggcgtatccagaccgacatcgccctgcgctggtacctgggcctcgaccgggtgccggatcacagcaccgtctcgcagctgcgccggcggcagccaccgggactgctttttgctcaaatgcagccgctgcggccgcatctgccatctggactgctcccatctaaaggcactgtatgaccatttggagcgagaccatcattttcacattgatccctgcggcacgctcttcaccgagctttgcgagctttgtgtcagagataaggatttccatggaaccgactgaactgctctcctgccgggatgtctccctgggctatgagaggcaaagcgtcctcacctatctaagccttaccatccgggcgggcgattacctttgcattgcggaggcggaaaacgacacctatgacatcccccaaacggtgagctacatcgtcagtgtggaggacggcggaacgttttccatcagctatgcccgcaagcaatacagcttgacctataacttgaacgcagaggacgcaacatggggttcggaacccggtgttaaatcctatcgtctgggcgctgcgctcaagctcctgacgcagttgcaggcatcgcattttgatgtcaaaatactgcttgctggggtaaaccccaggcccccaggccgtctgcgggcgggaacttctcggcagcattgccgggaagtgagcatataaaaccgggttcggtgaaattaccgaacccggtcagacccatcttgtcaagccttacttaccagattatctcccgcaccgctcgaatcagcatcaccacccatgaaagcgccgagagacccaccagcacaaagaaaatcccgtccgccagagcggtatgggccagataccacgggcggaataccgtgatgaccaatgccccgtacagcagcggtacggacagccgcagcgcctgcgccagacagatgatccctcccagcagcgccagccccagcgataaaacagcagccatcatgttccatgcctccttcttcgatttgcggcatgttaccatcggcagacagactttacaagggtctgtctgccgattttttcgctttgggtgtcaataagacacccaaggttggacggcgagggtgtctattgcacacccttgaccttaaatcttttgcaggagcttttgattccggggtattcaccacgctgtttttcgggaggaaacttccaaagaccggcgttccagcagatgatctcagatatggaaaacggcgggatcgggatcattgtgaccaaggatctcagccgcctcggtagaaatcagctccacacaggactctacatcgaggaacgcttccccatgttcggcgtccgctacatcgccatcaatgacaatgtggacaccgacagcagcgagagcaatgacctcatgccgttcaaaaatttgtttagcgagtggtttatatggaagcaccgcaaacccaggacacagcggaaccccggcaggcatcgtaaacacgatgacctgccggggtatcccaggaatcacttgctacccctgtgagggggaacaaaggcttccctgccccttttgcctcccgtcccgggagggtataccgtcatcagtcggtaaaaatttttcaaaggatgccccacagctgtgaataccactgtgctgcctccggtacggcaacacccccaagacggtattccgctgccagcgcacatttcgcgcggtacgaccgcgcatcctcaagccaaacctcctgctccgtgccgcctcgccagaaattatagtgcggcgcctgtgccgcttcatcataacggacaggcgcgccgacctgcacggcctgctctgcggcctgcgccccggcaagcggacgggcacgctgtccccgatgccacggaagcgcccattggagaccgactgccggcaggctgcacagcagctttttcgccgggatttcgctgaccgcataccgtaccgtctcattcattctgccgatgtccgcgagcgcggacggcgcaccaagcgtgaccgaagcatttttcagcacacaaagatccgcgtttctgccgagcgcccggaaatcatgcgcttcgcagagcagtccggtctgtccccgacaggttttcggcggcagggcaagcagcagctgctgcttttccgacgcaagctgtgccttcagtgctcgtacaaagtccgagaaagcatccctgtcctccggcatcaggtactcgaaatcgagcaggatccccgcccactcccctgccgctgcattctgcgcggcactgcggatcagattcgcgcgtgcagccgtatcgcgcagcacctgacgggcgcgttcgcccgagaaccggccgttctcgtcctgcatcgtcagcacgaacaccggtctgacgccgtaccgccgtgcgagccgtaccggaatttccgcgtgtatgccggggatgcggcccgtgcggtcaaagccgaacgatgcgaccgctaagtaatccagctgcggcagcacacggcgcagcatccttgcatccgcgccctgccgcacgctgcccagaacgattttccgcggatatgcgccgctgtccgcaagatagagcgtctgtccgggtgaaaccctgtcctgtcccatgagaaacggattatcgcgccagagctgccgcacggtcgtgccctttgcctccgcaatcgaggcgagcgtatctccgcgccgcacggtatactgccgtccgccgaccgggacgagaatgcactccccgggtgtcagacggttcgggtcgcgcagctcgttctgccgcagcacagccgccagcggcacaccgtagtgctgcgcaatacggtaaaggctctcccccggctgaacaacatgaatttccatctcctcacgcacctttccttacaggctatgccgcaggtcagccgtgcgtcacagaccgtaaaagcgcgttttcacgcacaaacagcatttgccctgcaaatgcaaaaagagcgggcagctcgtttgaactgcccgctcttttcattcgatttactttttgtgaggcgtctgattgtgagcgccgcagccgccgcagtgcgcacagtcgccgccgcagccgcccgacttcttgacgaacaccgcgcgtgccgcgaagaacacgatcgctgctacgataataccaagaataatatcacccatgatatatgcctctttctaaagtcaacagttagtttgcgtctacgctcatgcggcgcaggccctcggtggagtcagccttggccggcttgcggaacagcaggaagatgatcagcgcgatgaacgcgatggcaacgaccgtgccgacaccgaaggtcagctcgccggtgatcagaccgccgatctgataaatgatggtggatacaacgtaagcgtaaacgcacatgtagccgatcgccagtgcagtccacttgccgttgttcatctcacgcttgatagcgcccattgcggcgaagcacggtgcgcacagcaggttgaacgccatgaaggcatacgcgccgacctgcgtaaagtccgcagccagctcgccccagatctcggagccgtcctctgcaacctcgccgacgaagtgatacagctgaccgaaggtagcaacaacgttctccttcgcaaccagaccggagatcgcagcaacggtggatttccaggtgccgaagcccggcagcgtgaagatcggagcgatcacagagccgatgcgcgccatgatggagttgtcaatatcggataccgcgcagaacgcgccgccttcccagccgtagccgagggtgaaccacatgaagatggtggacagcaggataacggtgcctgccttcttgatgaaggaggagccgcgctcccacatggagcggaatacgttgcctgcggtcggtacgtggtaagccggcagctccatgacgaacggagccgggtcgccggtgaagatcttgaacttcttgagcatgatgcccgagatgatgatggacagcacgcccagaacgtaagcggagaatgcgatggtgccggagccgccaaagaacgcgcctgcgaacattgcgatgatcggcagcttagcgccgcacggtacgaagcaggtggtcatgatggtcatacggcggtcgcgctcctgctcgatggtacgggaagccatgacagccggtacgccgcagccggagccgatcagcatcgggatgaaggacttgccggacagaccgaacttgcggaagatacggtccatgatgaacgcaacacgcgccatgtagccgcagtcctcaaggatcgcgaggaagaagaacaggatgagcatctgcggaacgaagcccagaaccgcgccgacaccggctacgataccgtccataacgaggctgtaaacccagccttcctcgttgacgcccatggaggcgaacagcttctccagcagcaccggaatacccggcacccatacaccgaaatcagccgggtccggctcttcagcggtcatggtttcctcaaaggttgcgaggtttacgtcctcggtggtaacttcgccggagtcctcgtcctcgaactcggcagtaccgacaacagagcttgctgccgggtcagcggcaacagcagcagcggcggactcgatggcagcctcgtccggctcctcggcgtcaagcgcctcggtcagggcgaaggtgtctacgcctgctgcgtccgcagcttcgagccatgcatcgcggcgggtgatctggacgtcgtactcggcggttgcttcctcgtagtcggcagcaccgatggtgaacagatgccagccgtcaccgaacacaccgtcgttcgcccagtcggtaaagataccgcctgcggtggtgacggaaacgtagtaaaccagccacatgaccagtgcgaaaatcggcagagcgaggattcggttggtaacgatgtggtcgatcttatccgaggtggaaagaccggttttctttttctttacacagtccttgaccagcttgccgatatactgatagcgctcatcggtgatgatggactccgcgtcatcgtcaagctcctcctcaacggcggaaatgagcttctcgatcttgtcctgcacgtccttgccgagcgtaaagcgcgcctgcaccttgctgtcgcgctcgaacagcttgacagcgaaccagcggcgctgtgccggctcggtaacgtctgcaatcagcttttcgatctcggtcagcgcgttctcgatggtctcggagaacgcatactttgccggagcgttcttcgccgcagcggccttctttgccgcctcgacgagctccttggtgccctcgcccttgatggctgcggtctcaacgaccggaacgccaagctccttggagagcttcttgacgtcgatcacgtcgccgcgcttcttgacgatatccatcatgttcagcgcgataacgaccgggatgcccatttcaagcagctgggtggacaggtacaggttacgctcgatgttggacgcatcaacgaggttcatgatggcgtccggcttctcgtttacgagatagtcgcgtgctacgacctcctcgagcgtgtacggagacagcgagtaaatacccggcaggtcagtgatcgtaacttccttgtcgcccttgaacttgccttccttcttctcgaccgtaacgcccggccagttgccgacatactgcgtcgcaccggtcagatcgttgaacatggtcgtcttgccgcagttcgggttgcctgcaagtgccaaacgaattgacatgtttgttcccctttctcgtcagcgtgtgctaactcaattagtacacgctaacccatatctaaaaaaatttttaactgattttgctgttttccgcactttagagttgtctaagagcaactcacagaaatgacggaactcagtcgacgaggatcatttccgcgtcagccttgcgcagcgaaagctcgtagccgcgcacggtgatctcgaccggatcgcccagcggtgctaccttgcggacgaaaatctccgcgccgcgcgtgatgcccatatccatgatacggcggcgggtcgcgccctcaccctcgatcttgcggacggttacggtagcgcctaccggcgtgtttctcagatttctcattgttgtttaccccctgttcagaccatgatacgcgacgccatctgctcggaaatcgcaacgcgcgcgtcctttaccgacacgatcacatttccggcgagagacgacacaacgatcacctttgcgccctccacgaaacccagattttgcagaaacttgcgtgtttgatcctttccccggatggcttttaccgtcgtttcgacgccgatatccatcagtgtaagcggcatgatagtgaccctctcctttgctgtgatctatgtcttttcggtttgggttagtagatactaacccctttaacatatgcagtttaccaccgctaacctatcttgtcaacctcattcagttaactttggctaatctatacaacgctgctatgagttcgtctgcgctaattgtatattctcgcaaaaggacagaacggcataattgcaggatgtccgtttccatccgtcatttccgggaaaatatctccggacaggaggaagcccgcagtcgttgttccggacaactgcgggctctgttacgggtacgccgggcagcgtaccaggtttggggtttcccccgggacaagaaaggatatttgtatcataaccgccgccgtcgcggcagttacgaccgaaaattattcgtttgaaactacaatttcaaacgagattggcttcaccgggctgcgcccggataaagccagggtcgcaatctgcgcgccgcaagcgacacacagcattgcttttctggtatgaaaagcacgggcaaagctcgcacttttcatgggttttctgcgaaaaccctatctaatacgtactccgcgcgggtggcgggaacgctcgggtattggtaaattgaaggatatgctatggagatgcagtgtcaatcgaatattagaatgctgcgaagcccttgccgaactccttgcactttgccagcgcatcgtcgtccggggtctcgttgacgatcaggccctcatcggtgtagatgacagcgtttgcgtcgttggtacgctgtacccagtcgcgcatccactggccgtcgccccagccgtaagagccgaacagagcgaccttgcggccggaaatcttgctctccagctcggtgaagaacgggtcgaactcggtctcctcgagaacctcggcgcccattgccgggcagcccagagcgatcttcgcgtaggcggaggcgtcgtttgcgttggtgtctgctacgttcagcaggtcgcactccatgccgccctcgcggatgccctctgcgattgcgtttgccatctgctcggtgttgccggtctggctccagaaaataactgctgctttgctcatgtcagtttagctccttttagttgtttttagtagtaaatatatgctgtacgcatttatgccgccgcgaaaacctcgagcagcgtttcgccctgctctactcgttttgttactgcgtgacatacccgcgataagcggtcaaacagacgggatgccgcttctgcatcaccgtaaaccttccagtagccgctgagcttgcagccgcgaccggaatatcgaataaacccgaccacatcctcgatcggatagcccagaaacaggccgatctcatgcggaaagccgtccgtgcaggcgatgcgctttctcagcactgcgagcagttcgggaagcggactgccggccggatagccaaagtgtcggagcacatgctgcactctttcatcctgcatatagcgttcgagctgcgcctcgttgtacacgagaagcagataccgtgcacggcacgcacagacgatctcgaagcgcattccgcgcggcgcgaacgcttcgcggtaggtctcgagctgctccggcagatcaggatagatcgtgcggtcgcaggaaacaagatttgcaggcttgatgccggcgagtgccggtgagcagtacgcggcaagcagtcggtcgagctggttttccatggtatctgacgcccctttcttctcactcttatcctgtccatctccggcctgtttcatccggcgttttccgaacagcgcggccgcggttagccatacggccacgcagtccttatatggtctgttatgttcggatcaatgcgcaaaatacagaggaagttgtttcatcttatccgtaccgttcggttccgtacgaacggtaccggtcatcgggcgtatcagtaagcctcggctaacctgtatataagttagcatatgctaacgataaagtcaagcgtttttttgaaaaaactccaaagatttttttcagtgttagaaaccgcctgtcaggcaggccacgccgccccccccttctccttaccctcagcagtgggtataccttccgccgatacagcggctcgccgctggaggcgactttgcgctcaaagtgagcgtgtccatttgccgccttcggcggccggagaatgccgtgcccacggcaggggcaaaagggggcaagggcaccaggtatgctttcctgtcccctcttgactccccttaccttcctttggccgcggcgcccttcggtcgcgcggcgaaacgggggtacgggggctcggttccgggcgtcgggcagattttgggacgctgttatgccctgaatttactttgcgttatccgccgcgcataacagtgcgcggccattcggtgcagggcgcaaacgccgtcgctgcggccgacaggcatgatgcagatatctcccagacgcaaaaagagcacagatttgcatctgtgctctttcgggtgatgtaaattttactcgatcactcgcagcagggtatcgacgtccttgcgtgcgggagcctgcggctgctctgccggatggccgatggcgatgatcgcagcgacctcttccccctccggaagctcgatcaccttgcgaacctcgctctcctcgaaaacgcccataatgaccgtgccgagaccatgtgcgtgcgccgcaaggcagaacgcctcagcggcaatgccggcgtcgaacgactgccagtgcgtgcccttggaggtcgagaagctgccgtcgcgctcaaagccggagcggccggtgatcgtcgtcaggataacgagcgccggtgcgtgcgaggcggtcttctggttgtacgcaaaatccatcatgcagtcggacgcgagacgcgcgatcttctccttgtccgtgacgaaatgatagcgcgcggtctgcgtgttcttccagctcggcgcataggctgcggcggcaacgacctccgccatctgctcgcggcttaccgcttcttcggtgaatttgcgcacactgcggcgcgttttgatacattccagtgcttccatgacattttctccttgtttcaggcagcatcacacgagccgggcatcagcgtcctgcgcagaacgctcctgctcagccgtgcggtattgtctttgtttttctttatcatagcaaacagacgggataaatgcaaccgctatcccctgtcctccatgattttcacaaaatacttgcgcgtgcgcgggccgtcgaactcacagaagtagacgccctgccagataccgagcagcagcttcccgtcctcgatgaggatggtctcgctcgcgccgacggtcgagcatttcaaatgcgcatccgagttcccctcggcgtgccggaacgccgcgcggtcagggaacgccgcgtcaaggccgagcgtcaggtcatgcttcacgtccggatcggcgttctcattgatcgtgatcgcgccggtcgtgtgcgggcagaaaacgaccgcaatgccgctctgaatgcccgactcgcgcacggcctcgcgcacggtccgcgtgatgtcataatagccctgccgttcggttttcagggtaaaggtctgggttttcatgctcattcactcctgttttcgtgcagataggtcgcttccagatcggaaagatgcagctttaccgcgagcggatacttctcgaaggcgtgcgcaagggcgaagctgccgcccttgaccgactcgtcaaagccgcccatgtgccaccggatggccatggcctcctcggtgcgcaggcgcatgaagcgctcgatcagatatacgcttttctcgccgtggccgtagggaaactgatcgtcgaccgtgtataccggcaccttttcccattcgccgcggtcatttttgcgattccgcagctcggtcttgtaaaatccggccttgcacagatcgtgcagcagcgacacgatcgtaaagctctcgatgtcatcggacgccggatcgaagtgcttggaaatgagcacattgtagacgttcatcgaatgatcgagcaggccgccctcatatgctgcatgaaagcgcgtcgaggcgggcgcagtgaaaaagtcggtcgtctccatccatgcaagcagcttttccgcgccgggacgctgcacattcttgcgaaaggttgagcggaacagctccttattctctgtgttgtccatatttttcctccatttctgtccgggcgagccgcagcagggtctcccgccggtttcggctctcgtcgtcgagtaccgcgtccagaagatagctcagcatctccccgatggccgcgccgccgaggccgagcgcctgcatatcgtgcccgttcaccgcgagctgccgcagagacagacaggcgttctgccgcagcacctcgttcagcattctttctgtcgcgcacagcgtgccgacatcccacggctgcgtgttctgaccgaccgcatccccttttttgatcatgagcaggtcgcggaaccgtgcctctccaaggcgtgcaagactgcggcggacgagcttttcgctgtccccgagcgggcggtcatgctgctcgacgagcagcagaatgcgctcggtgtcctgcttcgagaaccgcaggcgcggcagcagcgtggccgcaagcgcgcggctttgcttcgggtggcctcggaagtgaccgatcccctgctcgtctacggtcttgcaggccggttttccgctgtcgtgcagcagcatcgcccaccgcagacagggatcagacggaacctgcccgaccgcgcgaacggtatgcccccagacgtcgtaacagtgatgcggattatcctgtgtgcagccgaacatcggcacgagctcaggcagcgccgcgccgatgatgtcgttgtatttcagcagcgtgcgctgcgcccaacggccgcacagcagccgcgtcagctcctcgcgcacgcgctctgctgcaacgcaggaaaggcggacgagctgccgccgcatcgccgcagcggtgttctcctcgatcgcaaagccaagctcggacgcaaagcgcacgccgcgcagaatgcgcagcgcatcctcagtaaagcgcgtatccggatctccgaccgcacgcagaatgcggtttttcaggtcgttctgaccgccgaacgggtcaaaaagcccgcgttcaggatgccacgccatcgcgccgaccgtgaaatcgcgccgcgcgaggtcctcacggatgctgcgcacaaagcgcacgccgtccgggtgacggccgtccgaatagctgccgtccgtgcggtaggtcgtgatttcgagcggactgccgtccagcatcacggtcagtgtgccgtgtttgagaccggtctcaatgacctgttcgccctcgaaaacgcgcagcatctcctccggcgctgccgccgtacacaagtcccagtcgtgcggccggacgccgcgcaggctgtcgcgcacacagccgccgaccgcccaggcctcaaacccggcctgttccagacgctcgaccgcgcgcgccgcatactccggcaggtgcatcatttgtcacccttgtcctgaccgagcctgtaggaggtgccatccggattgatgactaccgtgttgtcgagctgactcttgaggttttttcggaaatccgcgatatattccgcgcggagcgcctgctgctcctgcttttccgcctcggtaaggccttccgtctttgatttttttgcaagcgcgttgatacgcgcgatcttttcgtcagtcataaaaaatcctcccatgtgtttatcttattataaaatagctcacccttttcagcaagtgtcaattcggagtttttgccgtcccctttttgaccgttagcagacggtataccttccgccggtacagcggtgcgccgttggaggcgaaaaacgccctccctggaagggggatgttcgccatgacatggcgtgtgcattgccgccgcccggcggcgggggcaaaagggggataagacaccgaatggtttcttatccccctcttaactccccctcatcttccttaggacgcgactccctgcggtcgcgcgtctaaaaacgaggggtccacagggacgtctggtgctccaagggcatattcttgatggaagcggagcttttcgcagcggaacgccgccgccctgcaccgtctggccgcgcactgttatgcgcggcaaatcgcgcaaagtaaattcagggcataacagcgtcctataagcgaaccgacgcccggaaccgagcccccgtaacccccgtttcgctgcgcgaccaaagggagtcgcggcgcaaaggaaggttcggggtgtcaagaggggcaaggaaaccacttggtgtccttgcccctcttgccccggccggtgggcaccggcgtctccgccgccagacggcggcattgcacacgccatgtcatggcgaacatcccccggcccgggagggccagtctcgcctccggcggcaagccgccggaacggcggaaccgcttaccctctgctgagggtgaagattgaagggccttgcttcggtcttgaccctctcccccctccgtgttacaataaatgaagattatcataccttaaatcctacaagaaaggtagtttattatgcaaatcgaaacaaaatgcctacatgaaggctacaagccggaaaacggcggccccggcgtcatgcccatcgttcagtccaccacctaccgcttcgactcgaccgaaaagatcgcgtcgctgttcgatatgccgaccgagtgcatctactcccgcttcgccaatccgacctgcgacgccgtggagaagaagatcgccgctctcgagggcggcgtcggcgccatgctgaccacctcgggtcaggccgcttccctgctctccattctcaacctctgctccgcaggcgacagcttcatcgccgtctccaccatctacggcggcacgatcaatctgttcggcgtcaccctcaagaagctcggcatcgagtgcatctgggcggacgcggaagcggatgaggaagagatccagaagctcttcaagccgaacaccaaggctgttttcggtgaaacgctcgccaaccctgctctgaccgtattcgacatcgaaaagtgggcgaatatcgcgcacaagaacaacgttccgctcatcgtggacaacacgttcgcaacgccggttctctgccgcccgttcgagtggggcgcagacatcgtcatccactccaccaccaaatacatggacggccacgcagtacagggcggcggcgttatcgtcgacggcggcaagttcgactggactgcttccggcaagttcccggacttcaccgaaccggacgagagctaccacggcgtcgtctacacccgcgatttcggcgcgatggcctacatcatcaaggcccgcatgcagctgatgcgcgacttcggctgctacccctccgcgcactccgcattcctgctcaacatgggcctcgaaaccctgcccgtccgcatgaagcagtattgcgagaacgcgctgaccgtcgcaaaattccttgaggccagcgacaagatcgcctcggtgcgctaccctgccctgccgggcaacgagcacttcgagcgcgcgaagaagtatctgccgctcggcacctcgggcgtcatgtccatcgacatcaagggcggccgcgctccggcaatgaaattcatggacagcctgaagctcgcgtgcaacgaggttcacgttgccgacatccgcacctgcgtgctgcatccggcttccgagacccatcgccagctgaccgacgagcagcttgttgccgcaggcatcgagccgggcatggtccgcatttcggtcggtctggagaacgtcgaggacatcattgccgaccttcagcaggcgctcgaccagatctgagaggagcctcccatgcgcattcgctctattgaaaaggctgaccgcgagtttttcatcgaccgctgccacgccttctaccgtaccccggcctgcgaccatgaaatcccgcagcagaacgccgagcgcacatttgagctgctcatgcacggcacgccctacgcagactgtctgatcgctgaggacgacgacggcacgccctgcgcgtactgcctgctcgcactcacctggtcgaacgaggccggcggcctgtgcgtctggctcgaggagctgatggtggacgacgagcagcgcggcaagggcatcggcagccgcatgatcgccgccgtgcacgaaaaatacaacaccgctgcgcgttaccgcctcgaagtgaccgagagcaacgtgcgcgccattgcgctctacaccatgctcggcttcgagggtctgccgtaccagcagatgatcctcgatacgccgccgctggactgacttttttcagccgtgtttctccggaaatgcggctgattttctttacctgccgcctgttttctggtataatcaaagtacagaatttacctgtaagggaggcggaagccatgaaagacaagcttcgtattctgcttcgcatcgcgctcgtgctgctcctcgtgggcggcgtcacggtcggcgtgctctacgccaatcgcgacatcggcatcccgaccgaccagcttgagcaggccatgcgcgaaagtcaggacattccggatgactggacggtgcagaccagcgccggcgacacgaccgccgccgggattgcatacgctcccaaccacagcgactattccttctcgctgtatattgaccgcgatacacaccgctttttcactaccggctggttcttcaccatgagcggcagcctgtttgagatttcggattttgtcgcggcctttacggtgaacgaccgtcccgagaccgcgtatatttcgatgaacgctgagaaaattgaccgcgcggtcattgacagcggaaccgaaacgcgcacgatcgagctcgacagcacgcagccgttcgtgctcgtcctgccgcggagcagcggcggcgtgacgttctacggcgcagacggtcagccggccgaagtccgaattgtccgatgagcctcaggacaggggtgcgcctcatttcagctttggaatgcagcgcttttagctgctgaaaggagtatgtcctatgagatttcttatggttttcgccatgacgcttgccgcgtgcttcggcgcgtcgttatgcggcggatgggtggtgtttgagcttgcctcaaaactctggcctgtcattgtgttcttctcgctcgtcatctccgtccctgtcacgcttctgctccgccagtcagagcgcatcgacctgctcgaagagcgtatcgaggtgctcgaggcggaacgccgcagttcggacacgcctgcggaataactgtgaattcttcacaatatcttcaaattcttcctcttgatttttcggcgtttcgcgcatataataaagtcagaaaaggacccgtgttcccgtttttcaggaggtgtttccgatggtccctgacgaaattgaacgatatgcgggcagtatcctgaacgatccgcgttttcagaagctgcgctcctttgagcaccacggacctgcaaacacggtctacgaccactcgcttgccgtcacacgcgccgcttaccgcattgcgtgcgcgctccatctttccgaggaagagaccgcgtcggtcgtccgcgcggcgct

SEQ ID NO: 12863 - DNA, 23666 bp, Unknown
  gut microbiota DNA sequence
ccgccgcaccccagggcaccttctcttgccctttcagggcaattcaccttgtgcggacgagaggggggtatcgtttccggttccggagaaaccggaaacgtatccaggggggacagcgccccccctggaagcccgcaggcacggaaaaagaccgcctgcattcacagacggccttttccacaaagagtaggtaaaaagagtaaagaaagaaaaaataatgagagatataagcagattaacgggcgaagcggttgtagaacgcttcctcacggtcacgacccatcagcgcagaatctacacgataaccattggtaagcatcgctgcaagcgtctcaaaataaccacgagtgttcttcataaggggttgacctccgtttcaatgaattcttttaattttgtccggtttcccttgacaagtattattatagttattttatataaaaatgcaattcggattttgtttaatataatcaaagaaaatcacttggtttttgtatattaagcacaaattaaaaagatgcaaaatgtaagtaaagcacaaatactggatatttgacggaaaatatggggatatgggaacatttccgggggaaaagccgtgttatgagtgaaaggaggatgagcgacatgtcagatggattgcgcgaggacgcatttctggaggatgcgatggagcgatacggcgacgccgtatatcggctcgcactctgccgtctcggctcccgcgcggatgcggaggacgtttatcaggatgtttttctgcgtctgctgcgcgacacgacggcgttctgcgacggtgaacatctcaaggcatggctgctgcgcgtgacgctgcactgctgcattgatctgcggcgctcggcgtggtggaagcgcaccgcgcctctggaagccgccgcagatgccgccgcgccgctgagcgaggagaagggcgcgctctggcaggcggtcgaagcgctgccggccgatctgcgtaccgccgtgtggctgcactatgtcgagggctacggcacggacgagatcgcggaaatcgtgaactgccgtccggcgacggtacggacaaggctgcatcgcgcacgcaaaaaactgcaaaccgaactggaaggagagctgaatgatgaacatgtgggacgaaatgaagaatatcaaggcgccggacgagctgaaggcgcggactcgcgcggcggtgcgtgaggaaaaaggcagagcgcggcagccggtccgcagcatgaggggcggcatgaagcggctgctcgcggcagcgtgcgcatttgcggtcgtactcggcggcgcggccctgcacggcagacagaccggaagcgatcccgtgacggacatcgcgcacacgttcggtctggtggcatatgctgccgatacgggcgagatgcgtcagccgaaggacagcaggatcgtgttcgactgcggcagcggcgcagacgacccggacaagggatttttctccggctgcctgttcaaggcgacgggagagaatatcaaaaccgtgtccgcgtccatcgacaatggcgcgatttaccgcacgaaaaccgtgaaggatacctcggacgaccgcgacgaatgggtgcgcaccatgtatcagggcacgaaccccgccatcgacggcgcagaccggatcatggtctggggcagtgacgaggtgcatatgtatgccgacctgtgctggaagctggacaacggctttatcgacgagtatgacccggacgttagctacggcctgtggctgccctctgagccgtcggagaacgagaacgcggatttgcagcaggagtggcacgagactgtggaccgtctggagggcacgaagctgaccgtgaccgtgacgttcgcggacggctctacgcagacgcgcaccatgaccctgcacaccggcaagctcggcatcgaatttaacgatgacacgagcggcccgcagctgaacggcgaggtgctgaccgacgcgcaggcggaggagcagggctacctctacggcgtgtacggcgagctggactgagcggcggtgattcttgacaacatacgggagaaagcctataatattggtaggaatataagcagggaaggtatccgatatactgttcaaaaaaatgaaacaggcgtgggcggactggctgaaccgcatggcgaaccagaacaaggttgccttcggcagcgaaacgctcgactgctgccgcgtcggccgcgaaaaccggcagaaaaataagaaataaagaaaaaagaccggggcgttctgctccggtctttgctgtctgatgggagcttaaagccccatttcctttttcatcttctcgagctcatcctcgacagcggcattttttgcgccgtccgcatacttcttttccagctcagcagccgggtcgagcggcgtctcgttcagcgactgcatcgcgttcgagcggtcgagcatcgcgtcggccttgtcctccatgcgggcgatcgcgtcgccgagcctgctctcgtccgcgccggtgtggctgcccatcacgttcgcggccttttcctgcgcacgggcgagcgccatcttgctctgaatggcctcgcggcgctggcgcagcgtttccgcatcggaaaccagcttgtcgtgcacctgacgcatgcgcatcgagttttcatgcgcgacgtcgtacatcttctgaagctcctcgatgcgcttttcgagctcctgctttttcgcgaggaatacgcgcgcgtcatcctcgttgctcagctggagtgcgcggcgcgcaaggtcggcgttttttgcgctctcctggcgcttttcttcgagctgacgctgaatgcggctctcctccgccatgacagcggcggtttcgcgcttgacgtccgcaaggtcgctcatcagctggcgcatatactggtccatcattttcgccgggtcctccgcgcggtcaagcaggtcgttgatgttcgccttgatgatcgtggagaaacgttcgagaatactcatttttcttcgttcctttccgttttattgtgtatgtgtgtctgtattttcgtatttttttgcgcgttcggccgcctcgtctgcgccgaagctctcgagcggcgtgctccacatcttctcatctgcctgccgctgccgctccttcgcctcgcggcgcttctggagcgaaaagacgagcagcgcgatgacgatgatggccgcgatgcagaccgcgatgggcacaacgggcgactgggtcacggtcatgatgcggtccgccgttttggcgaacgcattcgagaagatctcttcctcgctgaccgaggagtcgttgtaatagcggtcgagatagtcggcaaggatgctgaccgcttcattatccatcacggttttcgcctgtgaaccgaccgtatagccgcagttatagccgccgcggccgtcgtcgcagaacacgagcagaaaatgaccctcgtccgtaaacagctgcggataaagcgcttccgcgcggctcttaaggtcgggaaccgaggtgctctcgccgttcggcaggatgtacacatagggctgcacgccggtttcctgatagaatttccggagtccggcggtcagctcgctctgattatggatccagtcgccgtcagcatcggtatagtagccggtctctgtgacggcgttcgacgggagcgcttcgcgcgcgacggtggacttcgcgatgctgctcgacggcgtgcccatcaggaagaacccgatgccgccgaacaggaacagcacgagaagcacgacgatgagcgtcgtgccgcagcccgagccgccgttgttgttctgcccgtttccgtttccgccgccgtttccgccgccgccgtagtaacggcgcgagttgtcgatgatgatagggccggtgcggtagggcctgcgcgggggaggcgggggtgcgccccagccgcccggtctgccgccgccgaaattaccgccgccgcttcgtccaccgctgtggcttccgccggaaaaaccgcccgaggagcgtccgccgcccgagaaaccgcctccggaaaaaccgccgccgccgctgccgcctgatctgcccatatgtattcccccgtttgtatgatttgtttactgctcgtccttcaggatctccagcgccttgcagcgctcggaaagctgacagatgacgtcgcgccgcgtgacgatgccgcacagcatgccgcggccgtccgtgaccggaacaaagttctgtccggcgaccaactcgaccagatcctccatgcgcgtgtcgatcgtgaccgaacggtgatggatgcggcgcgtgacctcggagagcagcatgtttccggcctgttcgggcgtgtgcccgagcagcaggcgcagaaaatcgccctcggtgatcgtgccgacgtagcgccccttggcgcttaggaccggaatggcggtaaaaccgctctcaaacatccggtcgagcgccgttctgaccggatcggtgtcgtaaacataaactacttcagccttcggcttgagaaaaaaagatacgttcatatgcgttacctctcggcggcccggagccgcctgctctattacccggcccgaatcggcaggcccatactctcttaactacattttacgatgaaggtcgaataaggtcaaccggaaaaggacaatacttacagtttatttacaatttgacgcagctctcttgtggaacatgactgactgcgcagaaagttttcaaaaaaagcggcggcagctcttgaccgcagcgcttttaactgataaaatgtaaaagcaacggacggaaaatcgtccgctgcaatacgctgaatgcgtaaaatcgttagaaaagaagggctttccatgaaaaagagattactcgcagcgctgatggcaggcgccatggcactgagcatgaccgcatgcggcagcagctccggcagcgatgacagcaatgcggcttccggcggcgatggcgcttcggccggcagctacaaggtcggcgtcgtacagctcatgcagcacgttgcgctcgacgctgcgaccaagggcttccaggacaagctgaccgagctggtcgaggcagacggcggcaaggttgagatcaatgttcagaacgcatccggcgagtctgcgaactgctccaccatcgtaaacggctttgtttccgcaggcgacgacctcatcatggcaaacgcgaccgcagcgcttcaggctgcacaggccgctacctctgatattccgatcctcggcacctcggtcaccgactacggcaccgcgctgggcatctccgactggaccggcaagaccggcaccaacatctccggcaccaccgacctcgctccgctcgacggtcaggctgatatgctcaaggagctgttcccggatgcgaagaacgtaggtctgctgtactgctcggctgagccgaactccaagtaccagatcgacaccatcaagccgctgctcgaggcacagggctacacctgcaccgagttcgcgttcaccgactcgaacgatgttgcatctgttgcgcagaacgcagcttccggcagcgacgttatctacatcccgaccgataacaccgccgcatcctgcaccgaggcgatcgctaatgtcgtgatcccggccaaggttccggtcatcgcaggcgagcagggcatctgcagcggctgcggcgtcgctacgctgtccatcgactacaacgagctgggtcaggcgaccggcgagatggcatatgagatccttgtcaagggcgcaaacccgggcgacatggaggttcaggccgctccgaccttcaccaagatgtacaacaaggcaaactgcgagaagctcggcatcaccattccggacgactacactgcaatcgaaggctaaaagatttcgatcatctcaaaccgctctctgaaaagagggcggttttttcatatcggtctgacagccatatgtgtttcgcgctttgcacaaattcttcacaacaaaggcaggctgtgctataataataatgtatcgctgtcagcagaccgctggcgaagtctgggggaaacgttgttgaagtcaattccggagtgtatgttccattcgcgctcgctcgcgtgcaaaaagccatacggcgccgcgccggccgggaagaaggtcgagttcgccgcctatccgcgccgggagcagggcatctcccacatgacgctgtgggtcgaggaggacggacagcaggccgaggcgtacccgatgcggtggttcagtctcgccggggcgcgggatgaatacggcgcgtccttcacgccgccgcacgccggtctgtactggtactggttcaccttcgatacggcggacggcccgcgcttctgcgcgcgcggctacggcggacgctgcgaggtgctcgacagcatgggagaccgctttcagctgacggtctacgatccgtcgtatcagccgccgcgctggttcggcgagggcatcacctataacattttccccgaccgcttctgccgggaccgcgacccggtgcagccggagggtgagggcatcgcgccgcgtgtgctgcacgaaaactgggacgatcttccggtctaccgccctgatgagcacggggagatcctgaacaacgactttttcggcggcacgctgcgcggcgtgctgtccaagctcgactattttgagagcctgcatgtgcgcacgctgtacttcaacccgatctttcaggcgtactccaaccatcgctacgacaccggcgactataagcgcatcgaccctctgctcggaagcgaggaggacttcaaaacgctgtgtgagcaggcggaaaagcgcggaatgcgcgtggttctggacggcgtgttcaaccacaccggctacgacagccgctacttcaacggccgcggccgctatgactcgctcggcgcacatcagtccaaggactcgccgtactgcccgtggtacgaattcagcgagtggccggacaaatacggctcgtggtgggggatttacaccctgccgcaggtcaacgagcgcaacccggactaccagagctttatcttccgcgacgcggacagcgtggtgcgccggtggctgcggctcggcgcgtccggctggcggctggatgttgcagacgagctgcccgacgattttatcgccggactgaatgccgccgcaaagcaggaaaaaccggacgctctcgtcatcggcgaggtctgggaggatgcctccaacaagatcgcctattccgagcgccgccgctatttcggaggcggagagctggacagcgtgatgaactatccgctgcgcgacgccatcctcgcctatctgaacggcggcacggccgagcattttgcggagaccatggagacgctgcgcgaaaattatccgcgcgatgtgttctataatctgatgaatatcatcggcacgcacgataccgcgcgtgcgctgaccgtgctgggcgtgatgagcgaggactggaagaagagccgcgacgagcgggcgcattatgagctgccgcccgaccggctggagaccgcgaagcgccgtctgcgccttgcggccgtcattcagttcaccatgcccggctcgccgaccatctactacggtgacgaggccggacggcagggatttgaggacccgttcaaccgccgcacctatccgtggggcgcggaggacagagagatcctcgcattctaccgccgtctgtgcgaggtccgcgcagacagcgaaacactgatacgcggcgagctgcgcttcgacacgggcgaaaacgacgcgctgctgcgctatgagcgcacgctggggcgctcgcgtatcatcatactcgtcaaccgcagcagacaggaggtgcgcacgggcgtgaacgcgctctacgcgctcgatctgctgacccagagggaatttgactgcgaggacagcagcggcatcgagatcaccgtgcctgcggagaccgcgtatctgctccggtgcttcggcagcgcagaataaggagaaggatcatatggatatgagagagacccggatttccggcgaatatttttttgaaggacgcatcatgaaggcgcgcgtcgacgaggtacgcctgccgaacggaaagcaggcgtcgcgcgaggtgtgcgagcatgtcggcggcgtgggcgtgctgcccatcgaccgggacggcaatatcatcctcgtgcgccagtttcgctacccgttcgacacggaaacgctcgaaatgccggccggaaagatggatcacggcccggaaaacgccgaggaatgcggcgtgcgcgagcttgcggaggagaccggctgcacggccggccgcatcgtgccgctcggcgcgatgtatccctcgcccggctttctgaccgaggtgacgtatctgttcgcggcgctcgacctgaccgagggcgagacgcatccggacgaggacgaattcgtcgagaccgtccgcctgccgatcgcggaggtggagcggctgatcgcggaggacaggctgcgcgacgcaaagaccatcgcggcgatgtaccgcgcacggctgaaaaacctgttttgagacctgtaaatcatgaactcctgatcgtttaagggggaaaggtatggataagaaaaaaatcctcgttgtcgaggacgaaaaggcgatcgcggatatcctggtgttcaacctcggccgcgagggctacgataccatggcggcctatgacggcgcggaaggtctgcacaaggcgctcaccgagtcgcccgacctcattctgctcgacgtcatgctgcccgagatggacggcttcgaggtctgccgccgcgtgcgtgcgcagagcgacattccgatcatcatgctgaccgcgcgagaggaggaggccgacaaggtcatgggcctcgagctgggcgcggacgactatatcacaaagccgttctccatgcgcgagctgatggcgcgcgtcaaggcgaacatgcgccgcacgctttcgggcgaggagcgcgaaaagccgcagacggaggctggggacggcctgcgcatctcccgttcgagcggcatggtctacaagaacgggcgcgcactcgagctttccgcccgcgaattcgatatcctctgctttctggcggcctctcccggccgtgtgttctcgcgcgaggaactgatggagcacgtctggggctatgactactacggcgacctgcgtgcggtggatgttgccatccgccgtctgcgcgaaaaggtcgaggacgagccggcaagcccgaagcacatcattaccaagcgcggcatgggctattactttgcggagggctgagcgctctgctccaatccattcccatgggggtgtcattttgtttcgttctctgcatatgaagctggtgcttattctggtcctgatgatcgtgtcggtcatggccgtcgtcggcaccttcctcatcaacagcgtcagcacgttctacatcgacagcttttatacccagatgcagagcgtttttacgaccgataccatccgctccatgcaggaggcggcggcagcgccggacgcggaggggctccggaccatcatcgatgcccaccgcagccgtctcggcatcgacgactaccgcaactattatatcctcgacggcgagggccgctttgtggacggctccaaccccaacctcagcgtcacgcgcacgcgcaacattatcgcggcgatggccggcgaggccggcacgcgctcgtcggtctcggacagcgtgatggacatcgcggttccgctcgaccacgacggcaacggaacggtggactatatcgtgtatatcgcggacgacaagcaggagatctccgacctgtcgtggcgctttttccagatcgtcatgcaggcgatgatgttcggtctgctcgcggcgatcctgctgtccttcctgctgtccaagaccattacgaccccgatcgagcgcattaccgagggtgcgcggtcaatcgcggagggcaacttcgatcaggacctcggcgtgcagtcgagcgacgagatcggcgagctgacgcgctcgttcaactacatggcgcgccgtctcaagacaacggtcggcgaggtgcagggcgagcgcgacaagctgaacaccctgttcctgcacatgaccgacggcgttgcggccttcacgaccgacggacgcctcatccatatgaacccggcgaccgaaaatctcctcggtgtgcggatgcaggacagcctcacgttcgacgagatgttcgaggatctggagatggtcggctcggatgagactgcgatgcgcacctttctcaccagcgagatcacgcgccgcggcagggtgctgtccgtgacgctcgcgccctacggcgcgctcgacggcaagggcggcgtgatcgccgtgctgcacgatatcaccgagcagcgccgtctggacgacgcgcggcgcgagttcgtggcgaacgtctcgcatgagctgcgcacgccgctcaccaatatccgctcctacaccgagaccctgctcgatgcggccggagatattccgctcgacacggaaaagcagttcctcggcgtgatctcgagcgagagcgagcgcatggcgcgtatcgtgaccgacctgctgacgctttcgcgtctggactacggccgcatggagctgcgcatgacacgcttttcgctctccgcgctgctgcacaaggtcgcggacgcgatgaaattcaccgcagaggacagcggccatgagctgacggtcgacgcgccggacagcctgcccgagatcgcgggcgaccgcgaacgcatcgagcaggtcgtggtcaacatcctctcgaatgcggtcaagtatacgccgtcgggcggacatatccgccttgcggcctgcgagggagaaaaaaacacagtgcgcatcacggtgcaggacgacggcatcggcatcccggcggaggatgtgctgcgcctgtttgagcgcttttaccgcgtggacaaggcgcgctcgcgcgccgcaggcggcacgggcctcggccttgccatcgcgaaggagatcgtcgaaaagcacggcggtcacatcgagctcgcgagcgaatacggcaagggcacgaccgtgcacatcaccctgccgaccgaccttgcccccgatgaaaaggagggcagagcatgagaggcgcggagcgttcggccggaaacacggccaagaatatcgcgctcatcgtgctcgcggcgctgatggcggtgctgtgcgcggcgaactggctcgccggtgtttcggcggcgtcgctcggctcggacaatccgctgcgccgggtgcatgaccgcctgttcggcggtgcgacaggctatgagatccgctcgtcgggcgtgtcggcggcgtctccggcgcagcttgcgctcggcgcttcgggcgagctcgtcggcgtgcagtacagcacgaccgatgttgacgcctcgctcggagcggtgcgcagcatctggacgcaggcgctttcgggtgatgcgctcatggagaccgacgagcagacgctggccggtgagctgggcgcggagcgcaaggtgctgctgcggtatcacggcgcgctcccgctgagcgtggtgtccggctggatgggcggtacgcttgcggacgacaggatcaaggtcgaaacgctgttttacagcgcggacagcggcacgctctttgtgcgcacgccggacggcgcactctatctctcccatgcggaggccgaccgcggcgccttcgaccgggcgctggaggactttcacggcacggactgtgcatttgcgggcgcggatacgaacgtttatcccgaaacgctgctgtttgagggcgaaaatctgacgcttccggtgctgaaaaacgaagcgctcgacctgttcgccgcgcagagcggcacgggactcgcaaacctgctcggagcgttcggcttttccgcctacacagatttctacggcgagcagaacgacacggtgcgcgtattcgtggacgacgcgagcacgctgcggctcgcaaagaccgggctgatgcagtacgcgacgaccggcgaccagagcacggtgacggcgttcgagagcggcgaggtcacaggctcggccgcgctcgacgcgcagatcgactgcgcgcgcgtcattctcgacacggtgctgcgcgccggcgagaccgacacccatgcgtcgctctatgccgtgaacgagaccgagcacaggacgacgctggtctttttgcagctgtacagcggtgtccccgtgctcgggagcacggattttgcagcatttgaattcgagggcggcgtactgcgcgcggcgaccgtcaatctccagcgctttgccgcgaccggagagaaccgcatcgtcctgccggcgaagcaggcggcggcgagcgcctcggcaggcgagcgcagcatgatggcggcctaccgcgaggaaaacggcgtttatgtgccctcgcgcttttatctgaaggacggaaaaacggactgaacggaggtgagaccgcttgcagtgggacaaggtaaaaaatgtgctgatcggcattctcctggcggtcaacctgtttctgctcggcaatctcggcttccggctctggcagaattacagccgcgcatccgggctggacgcagatctgcgcgcgctggtgagcggctacggctcgacgctcgcggacagctttcgtctgcccgaggatgtattcctgcccgagctcaatctcgaccgcagccgcgcggacgaggaaaacgccgcgtcggtcatgctgggtgcggagatggaacggaccgagctggaggacggcaccgtccgctttcagagcggggacggcaccgtgacctggtacgcggacggccgagtgaacggcgtatgcccgatccctggcgaaacgccggacgacgagaccgccgccattcgcgcggcgcgcaagtgcttttctgaatggggtctcgccggagacggcgcgtcctatcaggtgagcggcttttcggtcacgcagaccgcgccggtcgcaaaccgcccggtgcacaaccgtgagctgacgctgacgttcaacgcagacggcacggcgacgctttcgggcacatggagcttcggcacgccctacacgaccgtcacgggacgcggcgcggactgccgcgcagcggacgctctgcttcagttcgcctcctcgctcgaaaacggggagaccatccgctcgatgacggcgggctaccggatgcagatggacagcagccgccggcttcagctgatcccgacatggaagattgtgacagacagaacggattacttcatggactgcgacaagaaaacgctcgttaccctctgaaaagaaggctgtgcggccgcgcagccttcggctttggcggagagcatggcaattcctccgcgaaaacgggggggaatttgttgatttcgccaaaaaaacgcgatatggacgggaaagccgaaaaaaaactttcttttatccaaaattgtgatacaatgtatgagtgatattttgcggctaagcgtttttaatgcagccggaaaaattttccgcctgtgtgcggaacaaggaaactgtgcggacgaacggaagagcgtccgctttcataaaatgggatgtcagaaaaacgcccacgtgggatgtgggacagtacagtgaggagtaggttgactttgaccaaatatgtaatcaacggcggtaagacgctgaacggtgaagtaacgatttcgggcgcgaagaatgcagcagtggccatcgtgccggcggctctgctcgcggatggcccggttcgcatcgaaaatgtgccgaagatcatcgacgtgacgctccagatggagatcatgcgcgagctcggcgcacagatccgtctgatcaattccacgactgtggagatccagaacacccagaacccgtcgctcaagccgcacgagctcgagcgcaagctgcgcgcctcctactatctgctcggcgtgctgctcggcaagtacggcttcgctgaggtagcgatgcccggcggctgcaacttcggcggcgttcgtccgatcgaccagcacatcaagggcttcgaggcgctcggcgccaaggtcactctgcccaagggcggttacatccgggtcgaggcgcccgaggacggcctgcacggcgcacatatttatttcgacgttgtcaccgtcggcgcgaccatgaacatcatgctcgcagcggtgctggcaaagggtcagaccatcatggagaactgcgcaaaggagccgcatatcgtcgatctggcgaacttcctgaacgcgctcggcgcagatgtcaagggcgcgggcacggacgtgatcaagatccgcggcgtggagagcctgcacggcggcagctactccatcattccggaccagatcgaggcgggcaccttcatggcggcggctgccgcctgcggcggttcggttctggtgaagaacgttattccgcgccatctggagtgcatcacggcaaagctgcgcgagatgagcgtcgaggtcaccgagttcgacgatgcggtgctcgttcgccgcgagggcaggctgaccaagaccaatatcaagacgctgccgtatccgggcttcccgaccgacatgcagccgcagatgacgaccgcgctctgcctcgcagagggcacgagcatcatcaccgagggcatctggggcagccgttaccgctacaccgaggaactgagccgcatgggcgcgaacatccatgtggacggcgcgatcgctgtcgttgagggcgtcaaggagctgaacggcgcaccggtccgcgcacacgatctgcgcgcaggcgcagccatggtcatcgcaggccttgcggccaagggcgtgactgaggtcgagcaggtgcagaacattgagcgcggctatgaaacgctcgtcgagaagttcgtagcgctcggcgctgatatgtaccgcagcgaaattccggacggtgcagagagcgcaaaccgtgcataagcgcacatttcaaccgaaataaaaggcggagggggcaatcctttcgccttttttgcaaaataaggggagaagcaggatgccaaacggcgaaagagaaatgcggtgcaccgtgcgccgcgccgaaccggcggaggtgcaggctgttctcgcgtttgcggcgcagatctttgcggacgagcagcagatcgccggggagccgtttgcgttctatcgcggccgcgtcacgcccatcctgctgaagcgcacggatttcgtgcgcaatacccggaaataacggaaggagtaccatggcagagcatttttattacagcatcgcgagcggatcgagcggaaactgcggtctgtatgtctcggacggcacggcggtgctgatcgacgtcggcgtttcgctccgcaagctcacagcggcgctcgcggcgttcgacatgaagccgggcgagctcgacgcgctcatcatcacgcacgagcacatcgaccacgtaaagggacttgcgatgttcctcaaaaagaccgaggtgccggttttcgtctcgcgcggcacggcggcggcgttgaccgcgaaggagccggcgttcgagggacggctgaccgcgttcgagagcggcgacgccttccgcgtgggggagaccacgatccgctcgttcgctacgccgcatgacgcggcggacagcgtgggctacatactggaaaacggcaggcaccgtttcggcttcgctaccgaccttggctttgtgccgcagtccgcggcggcgctgctgcgcggctgcgagaccgtcgtgctcgagagcaatcacgatccgcatatgctccaggccgggccgtacccctatgcgctcaagcagcgcgtcgccgggccgaacggccatctgtccaacccggactgcgcggttttcgcggcgttcctcgcggacaacggcacgcgaaagctggttcttgcgcatctgagcgagaagaacaatatgccggcgctcgcgctgcagcagacgaagaacgcgctgcgcggcagggaaggctgcacggtctgcgtcgcgccgcgcgactgcatggagtcgccggtcgtgctcggagaggagggagcggcatgcttggtgtccggctgatctgcgtcggcaagctcggagaaaagttctgggcgcaggcggtaaaggaatacgagaagcgcctcggcgcatattgtaaattagagatcatcgagctgcccgagcagcggctgccgcagacgccctccgagggcgagatcgcgcaggcgctcgaccgcgaggctgcgcttatcgagagcaggatctggccgggcgcggccgtcatcgcgatgtgcgttgagggaaagccgatgtcgtccgagcagctcgcggactatttttcgcgccttacggtctcggggacaagtaagatatgcctgctcatcggcggctcgtgcggtctgtccgagcgcgtcaagcagaaggccgcgctgcggctgtccatgtcgcccatgacgttcccgcatcatctcgcgcgggtcatggtgctcgaacagatataccgtgcgctcaatatcgcagcgggcggcaagtatcataagtgaggagcggaacggcatgacgaaggggcagattgcggcaatcgctgtggtgctgctgctcggcgtagtcttttttgtgcggctgtaccgtcgtcagcaggaaccgccgaaagagccgccaaagccgagaccgctgccaaagaccggaaaaatacgctgcccgatgtgcggcgctgaggcgaaagtcacgggcaagcagtgggagtgtccgtggtgcggtgactccggctggctcaaatgacagccggatacaaaaaacagatcggttatttgtgtctaacatcaagaaaaatcatttacattacggaccggattttgtaaaatatattatagggaaaatatatttcaggaggggcgttcccatgattatcacgattacgcttaacccggcgctcgaccgcacgctgcgcatcgagcatccgcttgaggtcggcaagctcaaccgctcgagctcgagtcaccttgagccgggcggcaagggcatcaacgtttcccgcgcagtcaaggcgctgggcggcaacagcatcgcacttggcttcaccgcaggcacgaacggccgcgttatgaaggatatgctgacggcggcagacatccactatgatttcgtcgatgtggccggtcagcttcgcgtcaatacccagatccttgacgcacagggcggtcataccgaggtaaacgagccgggcagcaagctggacgacgcggatttcctgcgtctgatcgaccgcatggagaattacctcgacgagggcaatattttcgttctggcaggctcgacgccgccggacttcccgctcaagaactaccgcaagctgtgcaaaaccatcaagcgccacggctgcaagctgatcatcgacgcgcagggcgacctgctgctcgaggcgctccagtgcgagccggatttcgtcaagccgaacattttcgagctggctgaggcggtaggcgacaagccgtccgcagatccggaggtcgtggtacattcggcgcgcaagatgctcgacatgggcgcgcgcgcggtctgcgtttctatgagccaggagggcgcggtcctcgtctccaaggacgagtccgaggcgctttatgtcaacaccaatccgaaggtctatgatgaaggcgcggtaggcaccggcgacgcaatggtcggcgcgatcgcgaattccatgcagtcgggtctgaagtttgacgagatggcgcggtatgcggttgcgaccgcacgcgcgtgcgcacgccttgcgggcaccgagatggcatcgctcaagaaggtttacgaggtctacgagacgacgcaggtttacgttctttaagaaagaacgttagaataaaattttaccgtctgctgacggcagaccttccgccgatacagcggtgcgccgctggaggctgctttacgctcgaagtgagcgtgcacatttggccgccttcggcggccgggggtgccggtgttcaccggcgggaacaaaagggggataagacaccgaatggtttcttatccccctcttgactccccctcatcttccttaggacgcgactcccttcggtcgcgcgtctaaaagcgaggggcccacagatgtatttggtgctccacaggcatcgcccttgatcgaagcggaacttttcgcagcgacggagttcgcgccctgcaccggatggccgcgcactgttatgcgcggcgagctacgcaaagcaaattcagggcattacagccgcacatgagcgaaacgacgcccggaattgagcccccgtaccctcgtttcgctgcacatctccgatgtgtcagcgtgaaggaaggtaaggggagtcaagaggggacaggaaaccatgcttggtgtcctgtccccttttgccccagccggtgggcaccggcccctccgccgccgaacggcggcaatctccccgagccttgaaaaggctcaagaacttaacctctgcgctttttgtcgagatacccctgaaggatcagcgtcgcggccaccgcgtccacgttctcccggtgctttttttcctttttccccgcgcgatgcaggatctcatgcgccgcgaccgtcgtgcggcgctcgtcccagagatgcaccgtcagccccgtgcgctcctcgagcgccttcgcgagcgcctgacacttttccgcccgcggtcctaccgtgccgtccatgttcagcggatgaccgagaacgatctcgccgatcttattctgctcgataaaagccacgagcttttccacgagcttatcataattccattcatgaatgacgctcggcgagccggccagaaattccgacggatcggaaatcgaaagccctgtgcgcgcgtctccgtaatcaatgcccaaaatacgcatatccctgctcctgtttcttgggcagctttgcgctgcctgtgatgatataaaagattatatcatggaaaaataaaaaaatcagcactttttacgaaaaaaaacttgaccgcacgaggtgtccatgctatactaaatacacctatgcaggttctttttttgcgctcatttttcatgtgtctgaaaaagagctgagaatgctgtcagagggaggcaatgtgtccctcgcctgtaccaaaggggtgcaggatgggacgaaatattaaaggaggtgccgttatcaatgcgcgttaagatcacgctggcctgcaccgagtgcaagcagagaaactatgacacaatgaagaacaagaagaacgatccggaccgtctggaaatgaagaagtactgccgtttctgccgtaagcacacgctgcaccgcgagacgaagtaagagaaaggaagtagctgcatggctgaagaaaccaaggcgaaaaaacccggtctctttgcacgcatcggcaagtggttccgcgagctgaaaagcgaatgccgcaagatcgtatggcccactcgtgagcagacgatcaataacacgctcgtcgttctggcaagcgtcatcatcatcggcattttcatctgggtacttgatatcgtattcggtcttggcatccagacgctgcttacgcataccgctgccgcctaaataaggaggcaatatggcagacgctgcaaaatggtatgtagtacacacatactccggctacgaaaacaaggtagcctcttcgattgaaaaggcggtcgaaaaccgccgtctgcacgatctcatcaccgccgtcaacatcccgaccgagaaggtcgtcgaggtaaaggacggaaagagccgcgaggttgagcgcaagctctacccgggctacgttctcgtcaagatggtcatgaccgacgagacctggtatctggtgcgcaacacgcgcggctgtaccggttttctgggtcaggacaagtcgggtggctccaagccgatcccgctgaccgaggaagagatcatcgcgatgggcgttgagaagcgcgagatcgaagtaaattatgccgccggcgacagtgttcgcgttatcgacggccccctggcaggctttatcggcgtagtatcgtcggtcgagccggataagaacaaggtcgacgttaccgtctccatgttcggccgcgagaccccggtcgagctcgagctcgatcaggtcgaaacactcgacgagtgattaccggctgccccgcgcagcctgaaacagcaccgcgcaaggtgctttacgcagagagaaaggctctctgccagagtgggagagtgtaaacgcacactcgccagccaccacattttttgaaggaggaacctttcaacatggcacagaaagtagtaggttatatcaagctccagattcccgcaggcaaggcaaccccggctcccccggtaggtccggctctcggccagcacggcgtcaacatcatggcgttcaccaaggaattcaacgagcgcaccaagaacgaagcaggcatgatcatcccggtcatcatcaccgtttacgctgaccgttcgttcagcttcgttaccaagactcccccggctccggttctgatcaagaaggcatgcggcatcgagtccggttctgctgtaccgaacaagaccaaggtcgctcagctgtccaaggctgactgccagaagatcgcggagaccaagatgcccgacctgaatgctgcatccctcgaggctgctatgagcatgatcgcaggcaccgctcgttcgatgggtatcaccgtcgaggagtaatcttcgattttgaaaaggactctcgagcaaacggagaagcctctgcgcgagacgcatgacgcgccccggcggtgtttttccggagagaccttacttgttagttgaacgcatttgcggctacctgccgcatacagtgggagggttatttagttcccgcttaaccacttaaggaggatttattgtgcataaaggtaaaaagtatgtagacagcgcaaagacgatcgaccgcagcaagcagtacgagccggctgacgcgctttccgccgttgtttccaccgctaaggctaagttcgatgagaccatcgagctgcatgtaaagcttggcgttgactcccgtcacgcagaccagcaggttcgcggcgctatcgttctgccgcacggcactggcaagaacgttcgcgtagctgttttcgcgaagggcccgaaggctgatgaggctctggctgccggcgcagacatcgtaggcgcagaggacctgatggagcgcatccagaaggagaacttcttcgagttcgacgtagttatcgctactccggacatgatgggcgttgtcggccgtctgggccgcgtgcttggtcctaagggcctcatgccgaacccgaaggctggtaccgtctccatggacgttaccaaggctgtcaaggagtccaaggctggtaagatcgagtaccgtctcgacaagaccaacatcatccactgcccgatcggcaaggcatccttcggcgctgagaagctgactgacaacttcaacgcactgatgggcgctatcatcaaggctaagccggctgctgcaaagggccagtacgtacgctcctgcgtcgtagcttctaccatgggccccggcatcaaggtaagcaccgctaagatgatcggctaattgatcacaaacaaaaagacacccgacagggtgtcttttttgttgaaataaagcaatagaaagtccggagaacaggggaaatgaacctgttctccggactttcagcttttggatttcggtttcgcgatcagcgcgaacagacagccgaaggtgatggcggcggcgatgccgccggccgcgcctgtcacgccgccggtaaacacgccgatgaggccgctctccgcgaccgccttagccacgcccttggcgagcgagtagccgaacccgagcagggggacggtcgcgccggctccggcatagtcgacaagcggctgatagacgccgacggcctgcagaaatacgccgagcacgacgagcgacaccagaatacgggcgggcgtcagtttggtgcggtcgatgaagatctgacagatcgcgcagattgcgccgccgacccagaatgcgttaaggtagttcatgcgccgctcctttccagcacgactgcgtgacagatgccggcgatcggctgcgattgctgcaccgaggtcggactcatcatcgcgccggtcccggcgaatatcatgcggcgtatcttcccctcgtgcatatcgcgcagaagcggtccgcacagcacggccgccgagcagccgcagcctgagccgcctgcatgagcgtcctgtgtatcaccgaacagcaggataccgcagtccgaatagacaggggagaggtcgatgccgtcttcgcgcagcagcgtcagcagcagatctgcgccgaccctgccgaggtcgccggtcacgatgcagtcaaagtcggtcggctttgcgccgagctcgcgcagcaggcaggaaagcgtgtcgcaggcggcgggggaagatgttattttaggactatgcggtctttccatgcttgcggatatagtcctgtgctgccgcataggcatccgaaaacttgaattttatcgtgattttaccgccctcatggacgtaaatcatgtcgatcagttcgacaatgacttcgcgcgtcagcgtttgcagattgcggtatttgacgaactgcgacagaaatgagttagtctcgttcacgccgttctgcacctcgtcgatgcgcgcttgcagggacgcaaggcgcgtgtccagcctggcctgctgctgctcaaactgctctttcagccgatggtattcctcacgcgaaatatctccagctttccagtccggatacagggacagcttcatctgctcgatgcgctcacgctcggtttcaagctgtgcccgctcggcttgcagatggtctgcggaacggctgcgcgcgccgctgcggttgatctcggcaatcagctcatccatctcgaccgccagagcgatctggctgcggagcgtctcgagcacagcctgctccagacggtcgctgcggatagtatgctttgtgcaggcgccgctgtgctgcttcttaaacgtcgagcagatatagtagtaatagtcgcgatgcggctgggaaatcagctttcggttcattgccttgccgcagtccgcgcagcggagaaaaccggagaacaggtagacctgcttgtgcgttggcgcggtgcgtgtatcgcgctcgaaaagcgcctgcgccttgtcgaacagctcgcctgggatgatggcctcatgcgtctgctcgacagtgatccagtcctcctcgggcacggcctcgctgacatgcagtttgtagctttttgtgcggtttttgccctgtaccatcgtgccggtgtacagcggattgcgcagaatgcggcgtaccgagctgtccggccacagaccgtccagtttatccgatgcggggtgacagtagttcatgccctgctgccgcttgtaggcggacgggttcgggatacccatggcgttcagtttctttgcaatgccgagcacactcgtgccgccgatgaaccagttgaaaatatcgcgcacgaccgcggcggccgcctcgtcgatcagcagacggctgtggtcattcgggtctttgcggtagccgtaggacgcgaacgagccgatgaatttgccctggcggcgcttcaggtcaagcgaagcgcggaccttgttcgagatgtctcgggcgtattcgtcatttagaatgttcttgaacggcacgacgagattgttcaccgagcgcgggtcgaggtagctgtccacgttgtcgctgaccgagatgaagcgcacgttcagcagcggaaatacatgctctagatactcgccgacgccgacgtagttacggccgaaacgcgacaggtccttgacgatgacgcagttgacgaggcctgcacgcaggtcgacaagcatgcgctgaaagtccggtcggtcgaaagctgacgttagataacgatactttt

SEQ ID NO: 12864 - DNA, 1359 bp, Unknown
  gut microbiota DNA sequence
atttgcgagtaaattttgcgtactgacgaggcgcggttttgcggtaatacttgatgtattaccgtgaaatcgtaacaaagtcagggcgcgaaatttccgcaaagcgccgcagctttaattgtgcggtgttgccttaagtataacatacttatttttaaaatgcgacttcatgcagtatgaattcctattatggctgcgtttggttcttcccaaaaaacgatatatgccctcatggaaatcttccgggagcttactttatgcagcagtatcggaataccgttttggcagaacggtggtataaccgccttcgcgctttgatacaggagaatttgactgcatttccagcgaagtatccgctgtatgatgtggagccgtggagttctgcgggaattcgacagtgtgttacgcgaaatgacgtgattttgtattcggttgatgaaatccacagctatgtgtacattcgcagtgtttgcacacgcggtcgaaatttggatttacatctgtcggagcagagtgagagcgtggagtaaaacgaaaagagcggcaaggcagctcccgataagaaaacatcgtgaggaaagagagaacggtatagcttcggctgtaccgttttctcttttttccattgatgccgtgacttttgacatttccaaggctccgatgcccttgtagtaaatgtcgatctcctgcgtccggttcttgcccttcgggtcgctgccgcatggacgatgattttctccacgaactcatggaggatgcagggcgtgagctccgggatatccgtgcacctctccacaacggagagaaaacgatcaacatccgccgatttgctttcctccagctccacttctttccgaagggaactcgccagcaccttgagctcctgttcttccttctcatagtccgcagagagcttctgaaagcgttcatcggagagcttgcccgaaatgctgtcctcatagagccgcttgaagatagcatccaactctgtgatccgcttttcggaatcggcaagctgccgtttccgctttgcaatattccggtcgcgctgccgcaggtcattgtccatgaccagcctcacaaactcgtccttactgcgggaggcgaaggaaacgatctcccgcgggagtcgctgatggctgaggtgcagatgtgccggaaggcgttctgccgggaatagcgaaaagagaacagcgcagcttcggggcgagattcccgtccgctgcgctgtccgatgtttgcttatggggtcatgccagcggctttgatgtttagccgcatgtcagccggtcacttcttgcagcgccagaggaaggtcacgatctgcgctctggtgcaatccgcattggggctgaatgt

SEQ ID NO: 12865 - DNA, 10492 bp, Unknown
  gut microbiota DNA sequence
aagttttttcatcggagacaggtgtttttcctaaaatgcaataattaacttaccgcaaaggagtagtcctcgaggtaagtttttttattacaaaaaatccgaatggaggtgcaaaaatgtccgaagtaaaaagagcaattaccgatgcaatgcgtcagcgtatttacgagatgtggatttccggatataaggtagcgaacatcgcagcggacatcggtgttaatgctcacacagtaaagagtgagttggagcgcggctacaccggtgacatttacatcggtggacgcaaggtttatgaccctgatcgtgcatccgcaattgcaaagatggtaaaggcagggcgtcctccagtgcgcatcgtgccgcccgttgtattaggtaaggagccgcgccatgactgatactggtatcatccgtaaacttgatgcactgggacgtattgtttttcctaaagagctgcgcgacactttcggctgggaaaccggcacaaaaatgcagatttacactgaggggcagaaagtcattatcacaaaatatgagccatcttgcattttctgcggtgagcctaccgagaagcacattaaggagtatcgtatttgccccagttgcgcagctaagtgcgtaagcaagttgcaagccatcgctgagcaggccgattaaggagagaaacttatgccgtatcgtttacacgctacaaagcgcagcctgtacaagctggccgcagaaaagatcgcaaacctgccgtggtgcgagctgcccaagatgagcgatgttctgtttgagcatatcaggacgtcttattggctccgctggccgtatcacgaggtttactttacgaccctcattcccggcacaccgctgctgaccgtcacgcagtacgattacgctccgtctgacgataccaagcatcagcgtaatcgcagggtatttagatttacaatagccgagctgactgaacgcggcatagcgaaagaaatttcatcgtgcaaaactgaatgtgttccaatggaacacgcagactgacaggaggacgattgatgccttatcaactttccgatagcttatccattcgtgcccggaatctggctttttacgaattggtagccgaaaaactcaaagagcagcgaatttgttcgcttccgccctttaaccagacctttttctccagagagtatgatattctctggatgaaatggcctaatggcgtgtctatacatttaagcatcttcaagggtcagccgttttgttgccttgaaatgagcgtaccgaacggtatcccataccgcaaagaaattcccgtcacctttgacgaactgctcgaccgtcgtttggtcgaaacacactaaactaatttttcttttaatcaggaacagcagcgtggaaactgctgaaaccatgtgttccaatggaacacacgactacaaaggggataattttatgaaaaccgtatctatcatcaacctcaaaggcggcgttgctaagacactgaccaccgtcagcatggcctatgcgctgtcgcagcagtataatgcgcgtgtactggtcgtagataacgacaagcagggaaactgctccaagacctttggcgtacacagctatgaccgccagagcattgccgatctgatgcttgaccgcgatgccgatttggcagaggttattcagcacaccaagtacgaccgcattgatgttattccggcgaatatgacattgctcaccgcaaatatgcaggtgatgatggacagctctcgtccgcagcagacacgcctgcgcactgcactccgcaaggttgcagacctgtacgactactgtctaatcgacaacgcgccggacatcaacatttcgacggtaaatgctcttgttgcatctgatgaagctgttattccggtcaagattgacagctacgcctttgacggcctgatcgagctgaagaaccagattgagatcacccgcgaggaacttaatccgggactgcggcttgccggttgccttatcacctgcttccagcgtcaggccggagagcagaccggcgaggactggttgcgtgaaaatctggattgtcccgtctacaagacgcatatccggtacagcggcaaggtagttggcagcagctttgagtgcaagccgattatcgaatacagcaagaccagcgccgccgcgcgtgattacctcgatttcgtcagcgagtttctgtccgcagagaaaagaggttgagtgatatgggattttctattaccgatatgctgaacaaggatacctctatggcagctgcacctgttaaagaacataccattgagcgtatcagctactccaagctcgtccccagcgaggataatttttactcaatgcaggagatcgaggaactgaaaaccgctatcgagcttgcaggccgcgtgctgaacaacctcgtcgttactccgttggaagatggcaaatataaaatcctgtccggccaccgccgccacagagcggtcggtatgctgttggacgagggcaagacagagtacgagtttctgccttgctccgtagaacagatcgaggacgccgaccgcgccgtgcgcgaaccggtgttgctcatcgccgccaactcccagcgcgtgaaaaccgcatgggacaagctcgaagaagtccgccgtatgcgcgacttgcaacgacaggctaaggcagagcgaggcctgaacggtcgtgtacgcgatctggtcgcacgcagtcttaacatcagttccagccgcgtagccaagtatgacagtatactgaacaacctcattccctctttaatggaagaaattaaggctgacaatctgccgatttccactgcctatgagctgagtaagctgaatacagaacaacagcaggctacatttacctgctttgtgcaaaccggtaaattgccgaccggcgatgatgtgttccagtcgaacacgcctgacaccaccgcacaaccggaagtatctgctccgcagtcggagagcacaccggcaacgccgcagacggacaatgtgttcccatcgaacacgctgcctggtgatgcagcacgacttgtccagcagcttacctgtctgccggataacaagctgccacgccttgcaaaactgctcggcaccagcaccgcgcagcttaccgctgacctcaacgcactgaacaatttatattaaaccacgagccttgctcgtggtcatgcgccgggagcgcaggaaacgatctatccccttgttgactgcgttttccaagcccggcgtatgaccatgtgcaagactataatactatgaggaggacaacaacctatggaagtacgaaccgatttcccttcaagtatgtaccacacgaaacttcagtgggcgcaacttggcaaggctctcaatgctgatgcagtaggaatcgaaatgtgggtcaattcctgccagatcaacagcgcaatcttttacactgtcgatgaggtacacaacgggacacagaccgaattggatgaggtattggagccgctccgcaagaaagccgaagcctctcgcgttgctcgtctgcgcgaaaaagaagaacgcctcattgcacgcgagaagcggatcagcgacagcgcccagcagcgcggtataaaaaaggtgctctcgctgcttgccgccgcaatgccgcaggccgcagtacccgaagcgcaggccatcgtaatcgacaccgaaacgaccggtttaaccgacagcgatgaactgctgcaaatcagcgtgatcgacgatgccggaaccgttctgttcgacagtctggtgcgcccgtactttcatacggagtggccagaagcgcagaaagtcaatggtattacgccggaaatggtcgcaggcgcgccgtatccacacgagttgttaccgcagcttgtagagattttctccgagatgtctgtctgcatcggttataatacatcgttcgacctcggttttcttgaccgcattggcataccgaccgagcatctaaccgtaattgatgtcatgcagatgtttgtggactacctcaacgccaacggcggtactcgcagacgcgcttcgctctctacctgtacaaaacattttgattaccagtgggagggtgcagcacacaacagccttgcagatgccaaagccactttgtactgctacaacatgatgaagattatcaagtaatattgctatgacttatacttatcacttaaattatctttgtattcctgatggcggcacgccgtccgaactggactgctgcgtagagctaccggtcaagctgcaaaacgctaatgatattgagcagcttaaagcagcgctggcgcgggattttatcaagagtgaagcatatcattcacgctatttgcgaaatccaaccgcacatatcgctgttattatccgcaatattatgctgctgcacaaggaggataaccctgatgactgagttatctatcatttacagcgtgcctgcaacatcgtccgatcttgaaaagcagtccagtgctacaccggactgcatcaagcacagtatcgcatctgcgcgccggtcggagctgatcgagcagcttgcttcttgccgcaaagcgaacggaggtgtgaacgatgcgtaaaatccctcgcacctgccttgcaccggaagatctcgctgtaatcgcgtaccacgaggataatggcgatctggtcatattgcgtttctcatatggacaagagcgcgatatacgctttgcgttccgctgtattacagattacgatcccgcgtgtatcatgctgcatcgccagccgcatctaatctgtttcctcaacaatgatcgaggtgaataacattgcctattatcaaagcaatatccggtaaatcacccattagaaccgtacttacccgtgtaatggacaaacgaaaaaccagtgaaaatttgttgagcggttggaattgtacaccgtttacggttaaagatgaaatggaagtaacaaaacgtctatgggggaaaaatggtgggcgaacgtataaacatttcattcaaagtttcgccaaagacgaaaacatttcgcctgaacaggctcatcagattgcgtatcaactggccgaagcacttcccgaatgggcggactttgaggtgctgattgctacacacactgatacggaatatttgcacacacattttattgtgaatagtgtgagttacgtagatggacacaaactccagcaaagcagagatgaactacaaaatatgaaagatcagtctgatcacctatatcgtgaaatgatggtaaatcaatgaaactgttttacatgatcctcgcgtccctcatcactgttttaatggcaagctatgcgctctggttgatcgcgcacgacgatatgccgctgccgaaacgcttagtgcagcttttcccaccgttttttcttttaatcatggtatttttacgaattttctggcttttcatcagataaggaggacgaaatgagcagtatttctatcaacaactgcgtattcatgggccgcttaaccggcgaaccagaaatgcgctacacgcgcagcaataagccggtcacaacctttcgcattgctgtcagccgccgttccagcgcagatgttaccgactttatcccctgcgtgacttatggcgcgcaagcagagtttgtgtcacagtggtttcagaaaggtacgctggctatcgtgatcggtcagctcacctcgcatatgtggacagataagaacactggcaagacccgtgtagactatgaaatccagtgtgacaatgtgcagtttggcgaaaccaaaaagcagcgtatcgcgcgtgagcaggaacagccgccgcagaccgcagagccggaggaaacaccagtgccgcaggccgcgccgcagaacgagcaggaacgcagtggattgcagattgtggccgtagatacccttacgggcaatgtacttgcaaacgccgtctacgacctgtatacgatggacggtgcaacggtcagcctgcataacggcaccgatgcagacggcattgcatctattgtcggtctgtccgcaggtgattacattatcactgaggtaactgcgccgactggcttccgcccggttgctcgttcggtcaatgtaaatctggaaccgggcatcaatcacagcattaccttccctcacagtgctgaacccgcgcagcagccgcagccgtctatcccagtctataatgatatgccgacaggttatgtcgatgatgatcgtgatgttatgatctaaaatgtgtgttctatcggaacacaaaggaggtgcacgccggtgacgaaaagcgatttagaacagcttacactgctgaactctgaaatctcccgcgacttagagcgtctgcaagagctgtacgcacttcttaccggctgcacatcgtccatcagcggtttacctcatatcggtttgctgcgcggcagcgaccgcacagacaagtttgtatccatgattgatgtgctggagcagcagatcaaagagcgcgtcttagatagtgcagcgctttacattcaaatctggtcatatatcaacacaattcacgatcccctcgtgcgtcaaatcatagctttgcgctacatagatggcctgccctggcagcaggttgctaacaatatcggcggcggtatttctgccgatcatgcgcgtattttactcaatcgctaccttgcagctaacgcagggtagcaaggaggtttcccttaatgtccaacaccggctttaccatcggctacaactgcatactgcgagataagtccctgtctttgacggcaaaggggctttatctcgttatttccagctatgtcggtatgccggactgggcattgactaagcgcgagctggcaaaggtctgcggcactaactacgccatggacaaggcatggtgtgagctgcttaccgccggttatctcaaacattatactgcgcgcgcatcttccggtgcgtttattcatcgttatgagctgatgcaggagccgtctgcggctgcgccgcacgcttttattgccggtgcagactttgtaaccggtgactgccgtatcattctgtccggcgagagcaagcgtgatttcacgcaaattccaaacttgatcctgcgcagcaagcgtattccgctggctgttaagggtcttttcggcgtggtcgcgcatcttatcaatatcccggatttttctcttaacccggctggtgtacaggcgttttgcatggagcacattaagcgcttttcctccatctggcggcagctcaagctggctggcctgctcaaacagcatcgttacccgaccggcgaggagaacagctttgaatatcagtacgaattgctcgaccagccggatagcgaagcaccgtacctcgtgaaccatcatgcggacggctcggtatccagcgagcgcacgatcagcgactacatagcgcaggccagtgcaaagatcaagcgtctgttcggcgcagacggctctcagccgccgcgtaagcaccgcaagaacgccgtccgtaaatcttccggcttaacaaagaacgcgccgcctgtgccgcatgaggagcgcatcaaagatattcgtgaacagattgatgcggacacgctggaactccattacgcgcagggaaatgtggaaatggcagtcgaagcgctggctgaattgaaatatgagaaagacatcaagattaaaaacaacgatattccgctggaagatcgtcaagcggttgttgcgcgtgttgctcgtcccaatatttctcatttccttagtgaaaaagagaatgttctcgcgcgcagcacgcaaaattcggtcgcttactgccgcactgtgttgtatgattacctggtacagcagcaggcaaaagacgatgcacagccgcaacagtccgatataatccctctgtgggaggaaatctggcttaaacaaaaagaagaaatccgcaagcgccgcgccgctgaggaagcgaaacaatctgaacaatccgtcagcgaaccagtaaaggcataatcagccgtaactccaacattcggagctacggctattgcccttgcttttttcttttcttaatctggatttccggctttcttacaagctgtttcttgcatctccggtcgtttttcgaccggattttttgttttctcttaccatatacctattttcatggggtgggtataaaaaaggcactttgcaaattggtcacactgcataaagggtgcaatgcaaaatggtgcaaaataattagacttcttccatttatactcttttaattatactctctatatcatactctgtttgtgagagaaaaagcgaagaaaaagcaatttgttcgttttgttcgctcaatctgtgctacaatataaactgggcgaaagcctacgagagttacatacagtaagacgctatttttaagagcatcggtttttccgacgctctttttttgtacccaaaatcccttgccgctgtgtaggaggtatcgaatttacatatgttaagcaaagaggaatggaacgccaacaaggatagcaccagcattatttattgctttgaagatggcacgaccaaggaaatcacaatggcagaatatctgcgcgctcatccggagcatagcgctgaagattttcggattatcaaagagctttcggatgaactactgtaccatgattaccattcggacaattatcatggatactggaaagctgatcaagatttcagcggactggctgctctggttccatctccagaaccggggccgttggaaagcctgctgcgaaaagaacagcttcgctttgcttttcgtgtagctgcgcgcctgctgcacagcggcaagctgacagctgtacagcgccgctgctttattgcatatttcatcaagggtaaaaccgtagccgaaattgcgcatgacgaaaaaacctaccgcatgacaatctggcggcatattcgccgcttagaagctgccctgcgcgacgccgtttgatatgtgttccattggaacactttttttattttctgaaatgaggagtgaacactatgccaaaattcacaccgcagcagcttgatgagctttatcaccagacgcttgcggaatttgctgcatccccagagaaatggacgagctttctcgacacagcagcacgactgtacaagtatgatttcaaatcgcaggtattgatctggtcacagcgaccggatgcaacagcctgtgccgagctgccgctttggaatgatcgtctgcaccgccgcgtcaatcgtggctcaaacggcatcggtatcgttgataatagcagcaatcagccgcgtatcaagtatctgttcgatatttcggatacttcgccgcgtgaccagtctgtcgcaccgccgtatatctggcagatgcggaacgatgcatacgatacagttctggacggtatctctgccgcattgggcgagaatatgcagaccgattttgatttccctattaacctgtatctgtccgcccagtgctttgcagataagaaagccagtgaatacactgacaacaccgatctgatccgtattgcggtcaagtcaactgcttactgtgtcttgcggcgctgcggctttgatccgacgcagtatagctcggacatcccgactgggaacctctcgccggacgagcttgcgcttgttggacagattacgcaggaagcgtctgaaacggcattacgctcaattgagcagtctatgaagaacttagacggttgtaaactttttcgatttacaacgcgaaagcgtattgcggaacagccttctatgttgtataataaaggtaccgaaagagtatctgaaccgacaaaggaaggagctgttatagatggcaaaactgccgaagaaagtatattaccacgagggaccggacggcaagatgcaccccgatctggtaaagccggagtacggcgaatggggcgcagcgcgtctgaggtacatgaagcagtacctgccggaggaactgatggagttgcttcggaattgcgagctgaaccactatctgaacaagctggatcgccgcgcgatggacaaattcgagtcgctggtagcacagaaagcgaagcatcatggcgtgacagaggaactgaaagaacgcgacccgatgcagtggatcggtctgatgggcaacattcagcacgaagtgacgcagatcatcgaggaaaccttcatttattaaacagccaaacagcagcagagccggaaaagcctgctgctgtttcttttgagcagatgtccctgacggacactcccgatgtgttccaatcgaacacacagcctgccgccgaacccgatgtgttccaatggaacacgcccgatgtttccgatgaggtaatcaaccgcgtactgaccgcaggcagcaacagtacccatagccgcgagcgtatcgcggcttttttcatgcagccgaatatcagcatggcggatgctgctgcattcctgcggcgagaataccgcataggcggcgcaggcgtgcgcgtccataacattgaccattccctctggtttgacagcaacggtctgcgtattgcacgcggtcacgatacccgcacgccgcgtgctg

SEQ ID NO: 12866 - DNA, 1991 bp, Unknown
  gut microbiota DNA sequence
aaattcgcagcagatgcgcgagagcgcaaggcggctgtcggccacgaggatatacggaatatccacctccggtttcttctggcagagcacgacggccgcgccgcgctcgacggctgcgccgatgaaccggtgcccgtcggactcatacccgcagacggcggcaaacaggtcgccgggctgcgtggtgcgcgagtcaaagctgatatcccggatgtccagttccggatcggcggtgcattcgcacacgtccagaacggacagcagtcgcttgagtttcataaaggtacctccgttgttcgtcagtatcgtcccaacatgcccgaatcggtcgtcacgagcgtgacctccacgaccgtgccgtgatcgagctcggtcccggcggccacggcctgcccggagatcttctgggaggcggtgtccgtgatggagctgttggtcttgatatacaggcccagcgcggccatgcggtcgcgggccgtttcgtaactcaggttggtcaggtcaggcatggtctccttgtcgccggagggctccttaccggcatagagcaggatggtgctgccgttggccacgaccgcgccgctgcccggcagctgcgccgtgacggtgccgccgtcgccatagacgcgcgcctgcaggccgagctccgcgagcgcggccttcgcctgctcgacggacaggccggtcacgttcggcacggtcttatccatgtgcgtcttttccgtctcggaatacgacggctccacgccgaggtacggcaggatgtccgccattattttgccgacggtgggcgcggccatctggccgccgctgatgtagatgccggtgctgctactcggcgtgtcgagcaacacgaggatgacgatctgcgggtcgtccgccggggcgaagccgatgaacgagacgatgtactccttcgcgccgccggccgcgtcctgcgcgaccttttccgacgtgccggtcttgccgccgatgcggtagccggcgacgtaggcgttcttgccggtgccgtcgacgggatcgccgacgacctgctccaggatctggcgcacggtggcgctcgtctgctcgctcacgacctggcgcaccacggtcggcgaattggacacgaccgcttccccgtcgccgttgacgatactcttgacaacatacggcttcatgagatagccgccgttgacgcaggcgctgaccgccgtgatgagctgcagcggtgtgatcgtaaacgtctggccgaaggaggccgccgcgagctgggagaggttctccgtatcatagaacgtgttctggctccaccagatgctgccgctctcgccggacatgtcgatgccggtcttggccgtgaggttgctgtccacgttattggtcaggttcaggaagccgaatgcctcggcgtacttgtagaatgtgcgtgcgccgatgagctggccgatctgcacgagcgccacgttgcacgagtgctggatggcctgcgtgaggttctggctgccgtgaccggtcgttttccagcacttgaggggatcggtacggccgagcacgttcgtgctgccgccgcagtaaaacgacgaattttcattgaccacgccctcttcgagcgccatggccagcgtgatgatcttgaacgtcgagccgggctcgtaggtgtccgacagggccttgttgcgccactgctttgtctgcgcggcagagagcatttcggccttcttgtcggggctggtctcggcgtcgatggcctcctgatccttgtcgctgaccttctgataatcgttgaggtcaaagttgccgagcgagaccatgccgaggatggcgccgctgttggggtccatggcgatggccgccgcgccgttttgcacgtcgtagtcctcgaccgcctgctgcaggtgcttttcgaggtaatactggatggtggcgtcgatggtcaggttcatgtcgttgcccttcgtctcgtcgtagtaatcctcgtagttgacaaagagcatatccgtgccgcggtt

SEQ ID NO: 12867 - DNA, 2001 bp, Unknown
  gut microbiota DNA sequence
catacccacagttcccgatgttcccatcagcaattttttggcaagtatatcaaaaacaccaacagccttcaaaccagctacaattgccatcaaacagaagaggagcccgagagtcctgaaatcgatataagtaaaataagccttatccggtctgacccagaacatagaaagaagcgccaggatcactgcaatcgacaaaacggtttctttcctgaaaaaaacatataatttttgtaacatgatatttcctttccggtctgatacgactgcgtataagtatatcacagaaacatccagaaaaaaagaatatcattttgtattgtggattgtgtttgcgattaccgcctcattcctgtataataaaaatgttatcaatggcgacatcaaatgtttcaaaactgtttgaccatgctgcacacaacggttccaactatctgaatggacactgctttgtgagtgtcatgctctgcgtaacctgtctggaatagggataaagtatcttatctttccgttcctcttggctatcgtatgtggcagaaaaaagaatctaaactggaactggcagcctccatgatccggcaggttatgcctgaatttcacagcaaagatcatatcatcatcctttgtgacagctggtacacaaaacagaatctggtttcaatcgttgatgaatatccgaatctggatctgattggcaatgcaaggattgattctgtcatgtatgatcttgcacctgcacagaccggtcgtcggggacgtcctgccaaacatggaaaacatctttctgttgaaacagattttacgttttccaatgaaaagattggtgattgttatgcactttcgggaggtgtaactatggataagagcatgaataaggacgattttatgaacgatctttacgattacctctggatgccggaggatgagcagggagcgctgtatctgcatcagaatatcctgttcggccgcgcagctgacgaggagaaaattgcctgcgcaacccttccgtatctgttccggctcggcatcacgccgcagatgcgcggttatgaaattttatgccgcgccgttatcctgtacctcctggacggcattcagaattcgacccaccttagcctgctcctgacgatcgctgttgagcgcggcacctcgcttgcttctgtggagcgcgcctgcgccgccgcgatcagatatgcgtggaacgagggttatatgtccgcagacgatgagggtcccgatgccctcgcgttccgcgaaatgccgacagtgacacagtttatcgaccgtcttgcagcggctgtccggagcaagatcggtgacgaaattaagctctaaacgggccgttcatcaggtattgccgcgaaaacagcgctttatcagcaggtaaaatccgtctgctgctcgcgccggccccatatctcggcatcgttttcatttcgcagctgcttttcggcagctgcttttttgcgcagaaaagcagccactttgacgtaaaaacggacgttatttcctctttttcggcgcttaaagcccgattgccgtgccgtacacgagccggatcatatccgcaaacgcggtgatgcagcccttgtttgtcggcttgcggcggaacgtcagaagcaccgtgcacgggtcgccctttatgccgcgcaggccgccgttgttccatgccgccgcaatcgcatggcgaatcgcgcgctccaccgcactgaccgtcgtaccgtggtcgagagcaatccgcggataaatcgttttggtgatctcccgcatctccgacggattgagtaaaaactcgaccaccgcgctgcgcagatagctgtatcctgtaacgtgcggcgggataccaagctggtaaagatagggcgtcaagcgaaattcaatctcccgcgcaagagcagagtgttctttttcgacagattccgctttttccacaacaacttcatcatccatcatcaacatcataaccacgacctccgataaacaattctcttgaatatggta

SEQ ID NO: 12868 - DNA, 22535 bp, Unknown
  gut microbiota DNA sequence
gaaatttccttctttgattcccattatatcatgagaaaaaacaggaaaaaagaagaaaaattcgatggattatccataatcttactgctgtgtcgaaaatcgaggcgctgaacagcaggttgcacaaacagacgcagaaagtcccgctttttacactaagatcccgctatccggaagaattcagggccgtctgcgaatgagccccggccgccctccgacccaacggcagtttaacctgtttttcacgctgcgtgtcaatattgtatgagaatatttcaaattgctgtaaaaaacgtcgaatggcacgctgtatggtttgaacggctctgctttctgaaattttatataaaatgaacaaattcgacatgaaacgacaggatagggtattatcggatcgaataaaacgccccggccctgtcgctttgacaaagccggagcgtatgctttaatataaatataaagggacgctgctacagcagtcagaccctcacagtcaagaaatagaattgatgaccgtttcggtgcctacccgagcggtcatcgcgcttttatacagaaaatgtacagcaggatgactgcacatatcaaaagtcgaaaagcctttttccgaacatgcgccacctccttcctgccgcgaactgcgggaaaggaaaagatggtctgaccgccaaaagtaacaccagaaaaagcagtgatgcgcttcacttttagaggcggcatcactgctttctttcgtttttacccgaggtgccaccgcacaagatacgtcacgctgtactcgccctgatggccggagcgcgagcgggggaaggtcagcttcatctgcgcgtccggggactgcgtcgcggcggacagcaccggctcggcgcggaagtcgcttccggtggtgaggaaaatctccagacggatgcaggttcggctctcatccgcgtctacgacgatgcggtcgacgagcgccttagacatctcgcgcgaaaagccgcagtttgtctgccaccgctcctcgatggtgcggcgcaggctttccacgcgccgaatgcgctgctcgagcgttttgtctgcattttgcaattcctttcgctgctgctcgagcgcggcaagctgctcgttgcaggcctcattgcgtttcctgaactcctcgttcgagagtgccccggcaagcgcgaggtcgagcagcttgtccttacggcgggtgacggtctcgagctcctgctcgaccttcgcgagggcaggagcattgtcctgctgcgcggcaaaggcgcgcagattgtcgatgtactcctgcatggcagttgagcgctcgtccgtcacctgctcgaacacgcgcgcaagaatgcggtcgagctcatggctgtaaatcgtgggggagtcgcagccgccctgttttcccttttcgcggtacagcttgcagttccagcattccacctcgccgcggcttttgcttttatacacatgcctgtggaaagcggtgccgtgcttcgcgcagatgagcttgccgctgtaagcatagcggttctgcgatgcttgcgcgtgctgcttcatggtctgtccgcgtgcggcgagcaggcggttcgcctcgtcccacatggcctccggcacgatggcaggcacgcggtcatcctcgtggacgagccacttgtcctcgctcaaacggtagctgcgcttgtcgcggtagtcccgggaggcatagcgccgaccggcgtagcagcccttgtatttcgggttgcggatcatgccgtacagcgtggagtaggtgagcggcctgccctgacgtccgcaaatgccgcgccgctcaaggtcgttcgcgatggcgcgcagaccgaggtcgcctgcggtgtagcgctcgaacacctcgcggactatggctgcctcgtgctcgacgatctcaagccgtccgtcgaccttgttatagccgaacagattgttctgaccgagcaggacgctgttttcctgcgcacgcttgaagccgaaacgggtgcgttcggacagcttgcgcacctcgtcctgcgcgatggaggacatgatggtgaggcgtagctcagcatccttgtcaaaggtgttgatattgtcgttctggaaatacacgccgacgccgaaccgcagcagctcgcgcgtgtagctgaggctgtcaagggtgtttcgggcgaaacggctgatctctttggtgatgatgaggtcaaagcggccgcgcttcgcgtcctcgatcatgcggaggaactgctcacgcccctcgaccgaagtgccgctgatgccctcgtcgacatagccgccggcaaacgtccagtggggattggcggcgatgcagtcctcaaaatagcgtttctgattgccgagactgttgatctgctcgtctttgtcggtcgaaacacgggcgtagtaggccacagcaagctcggtgtcgaagatgctgcggccctgcgcctgcatttcgtccagtctgcggacgtccatggagccgcctccctcagttcagagcggtgcctcgggggtgtgcgctgtcgcggccgtggagccttgtcagcttgtccgtctgcaaatgacggacgaaatcgtgctcgtcacgagtgatgcagccgctgcggagcatctcgtcgttgagcgctaaaatctggtatacctgcgcgcgttccaattcgttattcatgaaaaattcctcctttgtcatacgggtgaataccatatatatacagatatagtatatcaacgagatgcgcggttgatacgctcaaccgaagtacttcgcgatgcccttccatgcctttttcggctcggcgatgacctttttgagcgcgtcaaggcgcttttcgccgcgatagtcggttgtgtcattgttgttctgacgaatgatacggctggcgtcggcaaagtccgtcggggtgtaaagcagaacggcgcgcgcctttttgccgtcgcggcctgcgcgaccgatttcctgcgcgtaggcatcgatgccgagcggcagaccggcgtgcacgacgagccggacgtccggccggtcgatgccgagaccgaatgcgttcgtcgcaacgacgatggggcacttcctttggagaaagtatttgtgcacgcgcttgcgcttcttcttggagagcttgccgtggtaggctttcgccgggtagccgcggctgcgcagccatttggtcgtgcgcttgacatcaccgacggtcgggcagtaaacgatagtcgcgcccttttttcggtacttttgcagcacatcatcgagcaacgcaagccgtatgttccgcttgcggcttgttgctcggtcatttccctttatatcgaaccttttgacctcgagctcgatgttggaacgcttgaccgggaacggaaagcgcttagggttggtcatatgcaggctctctgcaatatagctgaaatcggaacgggttgccgttgccgtgagggcaagtatctgcggccgctcgggcagagagtcgatgaacggaccgatttcggcgtaggctttgcggaatccgcggtcgacctgcggcaggatgtgcacctcgtccacgacaacgcggcgcacccgtgcggtgctgagcgcggtgcggacgtcctcgcggcgaagctgctcgggggcaaggtacagcaggccgccgttctgcacgaagtcgcgcaaagtcgctgcgtggcggtgcttgctgaggctcgagttgaggagggcggcgcgaacgcccttcttcttcaacgcggagacctggtcctcctgcagggcgagcaggggagaaaaaacgagggtcagctgtcccggctcgtcgaggagagccgggagctggaaaaggagcgattttccgccgccggtgcagaggcgcacgagaacgtcgcggttctggagaatgcaggcgagaaccttgctctgtttcgtgcgaagctgggtcacgccgagctgacgcatggcggcgtatacattataattatacgtcattattttcctcctgacccgccggaatagccggaatgacggaattcttgaacattttcgcgggtatcgcataatagcgccgagaggtcccatcgatgttgatcttgatattttcactcttaaagatggagagatccttgagcttctgcacgacatccgggacaagctcagggccgacaccggcgcgctgaagcagccgtccgaactgcggtgtgttgtaagcgagtaccgggacaccttgacttgtgtacggaaacgcggtagtttcatcgagctgctcgagagtcttcggacgcggcgagatggcatctttgtagcgctcagggtcaaggagaaacgctacgctgcagtcgattgtttccgcgcgccgcagctcatcttctttgtgtaagcgctcggcttctccactgatgcggtcgaacgtatcgcgtgcggactcggaggtcaaaagaaagtggcgaacgaaccgcctgacgagaataacccagcgctcgggcaaactcattctgtaagcccggggatgacaagcgagatcatcaatggcgtcgctcagcgtgcgcgcggcatccggtacataccgcagaagttcggcggcagccagtcgcagacagtcggcatcttcttcacggagagagtgcgtgtccgcagatacaggcacgttgtatgcgtaagcggagggtaaagcacgggtggtgattgtgatggggaacgctgcgaacgggcgatcctcggcttcgccggaaagcagctgttcatgcgcacggcgttcgatctcgtttacgagtctgctgatggcatcaccgaccggattgagcaggacgagacggccgctggcggcaggtgcgtagatcggttcctgactcttttcgagacgaagggtcatcgggtggctgaacggtgcggcaggggagcgcagaaggtcaaccgcatgaaaatgttccgcgacatactcgcgcaccgtggcagcctgcgcactggggagtatgaagttcagaatgaactgcggtgcgttttcaagtgcagcctcgctccaaacggcggcaaacagcgtagcttcaagaaccggtagaacgagcgggtcggtcgtcagaagagcgatgaagcggttctcatcgaactcgccgagttccatagcgcgatgtacatttgacaccaaatcgaaagaaatctggcggtcaatgttgtaaatattctcctgaaaggcacgcttgcgggagagaatatcgcacatatgatacacgaggtcggtctcatggcggctgaggtcgaggctgggcaagtccgggtgtttctcccactcggtagcgcggaccgcataacggtgctcaatttcgtcgccgtaaaccgctacgataatccagcgggcgtaaccgctagcgtgcgagatgcagacggtctcgatgcgctcagcgaggaagccgacgcgaaggtcgcctgccacgacgacgccgttcttcgcgatgaagaaatcctcggtcgctttggcacgtttgcggagatgcgcaggccatgcctcatcatcgcgccagcgcgtgccgagcggtacaacctgcgtgaaagtagatgcagaaagtttgcgggtttcgaaatttttcattttggggttctccttttgcaagaaaaaatttgatttcgaaacggcttttcgtttcgatgtgcacattataccaaactaaaagatgatgcgcacggaaccctgctcacggggtgaaatgaacaaaatggcggtaaaaatgacacaaatcgaggcggaacagcgtaaaccgcgtctttgctcggaagtgcctcgggagccagctcacggggtggttaaaaataaatttgatcgagcgcaaaaaaacgctccgaccttcaatggtcggagcggaaatgtggttaattgatgtaaattgtttcttgtctctgctcaggtgtcggatactgctcaggctcgatgatactgcgcgaacggagaaacttcaggtatttgtcaaagaatttagaagcgttctcggggacaaaagaagattggtttttgacaataaactcccagtattgcgagccagcttgattcaatatctgggcatattcaagcaaagggtctggattgtgagactgattatacttggaaatctgaagagaaagaaaaggatcgaggaaatcctgtccacatttttcgatttcctctgcaagcagtgcatccagttcgttgcgtggataaagccactccatcgtttgatacagaagcggaaaattactgccggtgacatcgagaaacagagtttgaacttgaatttcactcggctccagccgattaatatcaatctggtttgtacgcagaaaatgctgcgcccatagccagagctgttctgcctgctgattttcctcctcagcaatctcatatgtggtgcggcagtagatgtcatcgggattgaccgagacaagatccttttgcaattgctctaagatgcgcgcggctgcgcaagagccaaggtagtaatccgtgatacagcgatccttatcggcagggtcatcagggtcctcaccatattttctaatcaagcagaaggggaaaatctgcctgtgcagcagggtgaagaacatccttgtgcagggcccggaaacgaaatcgttcggctcgaacagcagtggctgcggcgttatgggttgatcataccagccgtcaaatgggttttctctgtcgcaggtatccgcagtttcatgcatgtcagcaagctcctgtatatgatcctctgcctgtgcttcacgttcaaaccagaaggcggatgtgccgggttgtgtggaccagtacttcaagacccgttctgcaaaatcagatactgcaagaaaatagccattcatcacaggaaaatcaaacggctttttgatgtgaaagataccgaattcacggattttcttctgtccgagtggaacaagaagggaagccggcgcctttagtgatttggacggcgagaacaaaccgctcagattttgataaatcggcgcatagctgccgttctcctttgcctgcgtcaaggcttcctgcaattctttcagatgattgctcaggtggcttttacactcgttcagtgtgtaggaaagattctgttcggcatccggcgcgttgatcagctcgcgcagacgctgcagcgcaagaagattgggatttcgtgcgaactccggcgcggcaaagcagctgtaaataagcgtgtcaacatcgagaggaaggtcctccggccagtaattaaagtaactgagcagaggattatcgaaattactgcccgtaagggaaaaactgtagtatcgatcttcgaaaaagtcaatccattccttcagcagccgtatgatcttgatgagatgaacgaaataggaggtatctgcgtctgtaagcgtatcgggtatttcttccggagcagcggcaggaaagcactcataagaatccaggagtgcctcgcgaagccgttcaaatgtcgaaacggtatcggcgtttcgtttgcagcaggtttgataatagccccagtatttttcaacggaatacataaaataagggtgcccgtccatcagtggaagaaaagcggcaggccgcagcaaataacgcatatccggcgtccgtacatagcgatgatacagcacggtgattgcctgcataaactcggtgtcgagcgtgcggggaagcaaagatccatccttggcatccttataatagatatgtaaaggctcacgccgcagattagacatttttatgctgtgcctcggcagttcagggaacagcaaggagagataggatgcgtctgggatagaaggggcggatgcactgctggccggatgtgggagatgcctgcattctttgatacggtactgcttttcgtattcgctcagtaccgacatgatgatatcggtaatcatgcagtcgaccataatgtcatacaggctgcacgttttagctttgcatttgttggtcgctggctgagagcggagccagtgcaggaactttatcgtatgttccgtgagcagcggatacttctttagcttatcataaatccagcccggcagcggcttgcctttttcccacgcgaaataagcgcgcaggtcggcttcgacctcgctgatcttcttcctttcgaggaacgacttggatggttcgagaacctcggactctgtaaatttcgcagacggcacggaaatgcctccttcctgatgaagatgcgtaatcttagtttagtatcattataataccgcagaacaataattgccaatatgcttctatatataatatacaatccctccggttatagagataaaagataatggatatataagataatatcaatctttagatagatgataaatatacaggatagtatgtattgatcattctgtgtatgatatggtttataatcatatattactgtaatgttctgttcgtataaaatagtatctgcttataacaatatgataatttatattgtggaggcgtgcgcgatgggcgtttatcatacgatacacacgttagaattgcagcggaaaattccgctgggagaagtgagccgctggagagggcggctgtatgaactgtctgagagatatgggacaggagtttattcgaaatcaaaagacgaacaggaattttatatgtatgcgcagaagggcgtgacgatcaatttgcgtgccgctgtgaattgcggctttattaaactgacgatcaacttaaactctgtgctctatgcagagccgcagagggttgtactgttctgcccggacaaaaactatctgggcatattcgatcgcaatctgcgggagattttgcgtgacgcaggactgggtggagcggaagaatttgaattttcgcgcgtggacttcagcgcgaacgcgaaggtggatgacccgctcgcatatatcgctctggcaagaaagagcggcgtgccgaacggctatcaagagacttatccgcggtttgataataaaaagcggaataaaccgataaaatatgcgtattcctttgatttgacgcacaatcgggaggattacgctgttacactctattccaaggcagaccagctgaaggatgaccgtaatgcagagctgagggatatacaggatgcgcaggggctgctgcggttcgaggcgaaatacggtgcgccgatgctgaaaacgtacatcggaatgcacgatctgcattattctaaggaaaaactgtacgatttactgtcagcttcgccatctgtcctgcgcagagcaatgtgcagctgctttccggagggtacttattattcgcttccggcggcgcgaaagcagctcgaccgggctgcgcaatcaaaacagcgcgagcggcttttgaaatggatcgaggaaacctcgcgtatgaacagcgcctgcaaggcacggcgaaagctctgcgaaggtctttccttttcgcagcgtgccgcgctgatgcagtttcagcgcgaatgcgctatcaatccggtcacaatcggccgggactggaagcggcagtccctcccgagcttgcaggaggtattcgagctcgagacatgaaagcctgagggacagaacagagaaatggaagcaagtgagaataatttatgctgtgaacagcataaacttgataaaatagaaagtttatgctatgatgatgcaaaggagtgatgccgcatgatccgttcacataccctcagaaaaagagacctttacctggataagctcattgcatttcaggacaccgagcccatcaaagtagtaactggtatccgccggtgcggaaagtccagtctgctcaagttgatggcggcgcatctgcgcggaaatggagtttcagatgagcagatcattgaaatgaactttgaatcctacgagtttctgaagatgacagcggacgagctgtatcgctatgtcaaggaacgcgtgcttccggacaggcggatatacctgttttttgacgaacttcagcgcatggacggctgggaaaacgccgtcaactcgttccgcgtggatttcgactgcgatatttatattaccggctcgaatgcctatctgctttcctctgagtattcgacctatctatccggacgatgtgtggaaatcaagatgctgccgctgtcctttgcggagttcgttgatttttacggctttacgattaagacggtcaagagcgcacttggcggccaaaagaagaaagcggtcgatcaagatggtacgcaatacgaactgcgtgagatttttgacgcgtacatgcgctttggcggtatgcccggtattgccgacgtcggcatggaacaggataaggcgctgactcttctggaaggcatctattcgacggttattgttcgtgacattctcgaacgggaaaagcgcagagggcagcgccagcttacagatgctgtgctgctcaagaaaatcgtcctgtttctggcggataacattggcagttcggtttcaatctcttccatcggcaacacactggtcagtgaagggctgctcgatgacagcggccgccggggcaagccaagtgcacacacggttcaggcctatgtcaatgcgctgctggagtcctattttttctatgaaatcaaacgatttgacatcaaaggcagggagttcctgcgcacactgggtaaatattatatcgtggacatcggcctgcggaattacctgcttggattccgcaaccgcgacagcggacatgcgattgaaaatgttgtatatttcgaattgctgcgccgcggctatgatgtcgcaatcggcaaggtcggcaacgcggaaattgattttattgcagccaaagctgatgaaaaaatatacgtgcaggtaaccgagtcgatggagagcgaaacggttcgcgcacgtgaactggcgccgttgcaggggattgcagataactatgagaaaatcgtgctttcgctgcatccgggactggaaacgtcctatgacggcattaaatccatcgatttgatagagtggctgcttgaaaatcaataaaccgtatcagctcctttttcgttgatatattatacttatatataacgaaaaggaggaaaaacaatgccgctaaaccattttatctgctcttgctgcagcaagagcaagccgatcgatcagcgcatccttctcggcggggatgcgctttgctatgcttgcgccgaggagtttacaacgctctgcgaccgctgcggcgagcgggtgtaccgcagagatgctatacaggtaaatcatcgtatactttgtccacaatgctgtggaaaagtccgcgcgcaaaactgatcccactgagagtcatgctttcagtgggattttgcattttaaggagaaaattatgtttgaaaatcagaaatttctgacgagcggcgtacagaacgagatcccgtcgtggctgatagaccttatctggtgcatggtttttagcatgaaaaccgaacataaggactatttgcaggtgtttaccttaaccaaaacgccaaccggtcagcacatcgtccacgagcaggaacagccgctgtaccgttatgaactcgatgtaccgtgtgacgatgccatagatgcgaaggtgttcgtcatcgacgatttgacgcattctactatgctgcttgctgaagaatattaacattcaccaaacgaaatggaggactaaccaatgagtgaaacaagaatttgtgcaaactgcggtgcagaacacccggttgaggatatgtaccaggtagagggtgactggctctgcgaggactgcgccgaccggttgactgtcatctgcgaccactgcgctgagcgggtctacgaggaaaacgccgtcgaggatgacacgcacacgctttgcgaccactgcttcgatgagtattacgtgcgctgcgatgattgcggtcggattattcatcgcgaccgcgcatactgggacggtgacgacaacgcttattgcgcgtcctgctgggacgagcactgcgaggttattcacgaatacagctacacgcccgaccttgtattccacggcaaaggcctgcggcatttcggcgtggagctcgaaatcgacgacggcggtacggtaaacagcaacgcccagaagctgctcgacatcgcgaacaaggacgcagaaaatctctacatcaagacggacggcagtctggatgaaggcctcgagcttgtcacacacccgatgacactcgaataccatttgaacgaaatgccgtgggcggagattcttcgcaaggcgcagagcatgggatacctcagccacgcggcaggaacctgcgggtttcacgtacatatttctcgcttggcctttggctgcacctacgaacagcaggaggccgcgattgcccgcctgctctacttcgtcgagaaattctgggcggaattgctgcggttcagccgccgcacccagtcccagatgaaccgttgggcggctcgatacggtatccggctcacgccgtccgagcagatgaaccacgcgaagaattcctgtgccggacgatatactgcggtcaatctcatgaatgcagatacggtcgaaatccgcatgttccgcggcacgctcaagctgaataccttaaaagccaccttgcagatggtcaaccatctcgtcgaggtggctgtttctatgtctgacagtcaggtgcaggatatgagctggttcgatttccttgatgacatcaccgaaccggaactcattcagtatctcaaagaacgtcgtctttacgttaacgaacctgtgaatgccaacacggaggaggcttaaaatatgtgcagtttattcggcgtaatcgattttaaggagtgtctgagcactcacacgaagaacaaaatcttgaacacgctcgccagagaatgccaggtgcgcggcacagacgcgaccggcatcgcctataactttaacgaccgccttcggatctacaagcgtccccttcccgctcggaaaatgaaaatccatattccaaacggcgtgaatgtcgtgatgggtcatacccgtatgaccacacagggtaacgcgcagtttaaccagaataaccatccgttcctcggcaaagttgacggcagcagctttgctctcgctcacaatggcgttctctggaatgacaaagagttacgcatggaagaaaaccttccgctgacaagcgtggaaacggacagctatgttgccgttcagctccttgaacagcagaaaaccctcgactttgacagcctgaaatctatggctgaaaaggtcgaggggtctttcgtctttacggtactcgataaagataactccatctggttcgtagtaggagataatccgttgtgcgtgatgttctatgatggctttttgatttatgcctcgacacaggaaattctgtgtaaaacaatcaaaaagctgcggctgaaagcgccctccgacattctcgaaccgcaggagggcgagattatgaaaatcaaccgcaacggccgtatcactaccggcacattcacgccgcatacgacgttcgagcactggtggcgaaaatatccgttctaccgcagctattatgagaacacgccgaccagttatgacgacctgttcagcgttgccaaatcgttcggcgttaccgctgacgaagtgcaggcgctgctcgattacggctgctccgaggaagaaatcgaggaaatgctgtatgacccggaactctttcacgaaatgaccggcgaactgctgtatgcgtactgaggagaggaggtgacccgatgaaggtaatcaagaacacgctgctgttcggtattaagattgtcgcggcggtggcggcggcagtccatgtgctgcgcggcaaggatgcgtctgagtaacagattggccttttctgtgcggaacaatgcaataaaccacacagaaaggcggatacgcatgaacctggacaaatatcccgatgtgctgacgctgcgtgagtgtcagaagattttgcaggtgagccgcggcacaatgctgcggcttctgcatgaaggcgagatcccggcgtttcgcatcgggaaccgttggcgcattcagcggaaagaaatgctcgaattcatcgagcgcagcgaatactgaaaacaacagaaatgatccgttccgtttgggcatacccatgcggaacacgcggaaatcctcccgtttaagtcgattttgaggtttcggaacattccgaaattttcatcggcttaaacgggaaatttcttttttggagggagacatatcatgaaaatcggatatgtgcgcgtgagcacggaggagcagaacacggcgcggcaggaaattatgctgcgcgagctcggcgtagacgaactgttcgtcgacagggcgagcgggaaaaatgcggaccggccggagctgaaccggatgatgaactttgtgcggcgcggcgacacggtcatcgttgagtcgatcagccgctttgcaagaaatacgcgcgacctgctcgatcttgtggagcgactgacagaaaagcaggtagagttcgtcagccgcaaggaagccattgacacgacaacgccgaccggcaagtttatgctgaccgtgtttgcggcggtggcagagctcgaacgcgagtacattttgcagcgtcagcgtgagggcattgccatcgccaaacagcagggaaagtaccgcggccgtccgccgaaggcatatccggacttcgaacgcatcgcagcgcggtggcagaagggcgaaatcaccgctgtgcaggcgatgaagcagctcgggatgagcaagacaagattttacgagcgagtgaagcggcttaaaaagtagaaagctgccgtgtgcggcgcggcatacgctgaagcaggatagagctcctgccttttaagcagggtgtctaaggtgatcgtgcgcagagacagaaatgaccgggctgctgatgtgaatccattgaaaagtcaataatgacgaaaatggggattttctctacaataaaacaaaaggcagtactgcattgcacacgcgcggtactgcctcaaactttttatggaggaatttcaaatggaaaatcaaatctacggctacattcgcgtgtcctcacgtgaccagaacgaggacaggcaggtgatcgcgatgcgggaattcggcatcgcggagaaaaatctggtcatcgacaagcagtccggcaaggactttgcaaggccgggctatcgcagactgctgagaaaattaaagccgaacgacactctcgtgattaagagcatcgaccggctgggtcgcaattatgatgaggttttggaacagtggcggctgctgaccaaggaaaagcaggtggacattgtcgtgctcgatatgccgcttttggatacgcggaagggacgcgatttgatcggaacactcatttcggacattgttttacagctgctgtcctatgtcgcccagaccgagcgggaatttatccatcagcggcaggcggagggtatcgcggccgccaaggcgagaggggtcaagtttggtcgaaaacccaaggaacgcccggcagaatacgagcatctgcgtgacgaatggcgggcgggacgcatttccgcacgcgctgcggcgcgtcagctgggtgtcgcacatcggaccttcatgaagtgggtcgaacaggaaaatccagattgttgataaaagtacactgaaatagacgctcctcgacgcggtcggtcagcgcctgacttcttacgttggataatttcgacataggcggctcctttcgctctccgtgagcagttttctgcctctattgtagcgcgtgcagaacgttttcgcaacaaaaacccgcccggttctgatgaaggagagagaacgagccgggcggtatacagaaatgagagagaaggaagcgggtttacggaacgaggcagtcggggaggagcgcgcggagctgccggagcaggccgtcgcagtcgtccgagtagatgacgagcgtcagcggattgctcaggtcgaggctgtaaatgccgagcagggacttcgcgtcgatcgtgtagcggccggaaaccagattgacctcatacgggcagggagtgagaaaatcgacgagttttttgacctgatcggtctgctgcaaacgaatttttacttcagtcatatccagaattcctttccatcagagcagaggggcggaggcgatacagctgcggatttcttccatggagggcatggcggggatagcgccgccctttgtggtggtcagactgccggcggcgttgccgaagcggacgatttcgcggagcgcatcctcggggagcgcgcgcagctcctcggcggtcttgcctttcagcaggaagtggattgcgcccatgaaggcgtcgcctgcgccggtggtgtccaccgtcggcacatcgaaggtcgggagcgccccggcacacactgcgttgcggcagtaagcgccattcgcgcccatggacaccagtacgagcgacggccccatatcgagcagcgccttcgagccgcgttccgggtcactttcgccggtcacgagctgcatttcctcctcggaaaccttgagaatgtccgcgaggcggatgccttccttcatccggagaaccgcctcttcggtatcgtcccagagaagcggacggtagttcgggtcgaagctgacgagttttcccttctgccgcgcatagcgggccgcggagagcgtcgccgtgcggcaggggtcggcggtcatggaaaccgaaccgaaatggaagatggcgcagtcgtcgagcagcgcggtatcgacctcggactcgcgcagcatgatgtccgcgccggggctgcggtagaacgtaaacgagcggtcgccgttcgcgtcgagctggacgaaagcgagcgtcgtgggcaccttttcatcgactgccagaccggaaacgtcaattccgctgtcgagcagcgtctgccgcagaaaatccccgaagccgtcgcggccgaccttgccgatgaaggcggtctttccgccaagccgggcgttcatcgccagaacattcgccggtgcgccgccggggttgcgggcaaagagcgcgatgccctgcgcgttttctccgttcggcgtgaagtcgattagacattcaccgagagctgcaacatcaatcatttttaatcacctcaaactgctttttcgcgttcagttcagtcatgatgcggttatacgaacgcttgttgatacgatagaagaacaggacggccgccgttaacagccacagcacgccgggaatcagcgagaaggcgaggtgcatgctcgtctgcacggcggcattctgcgcctgattggggacgaactgcaaagcgcccagaatgccggcgagtgccgaagtgccgatggccatgccgagcttgttgccgagcgacacaaaggcgtactggaagccgtcgttgcgcacgccggttttccactcgccgtactccacgcagtcgggcacgatggcgtaaatcgcggtgttgaagccgcagaagaagaactgcgagagcgcggcaaacgtgtagaacggcaccggggtggataccgcgctgaagaaatacagggcaatcagtgaaacgccggttccggcggagaacagcgcggcggtatggcccttgttgccgagcttttcgaacacgaaagggaacacggccgcaccgagaatggacggcacaattaaaatcagagagtagaccgtgaacaggttttcgttgccctccacgtatttgaagtaatagagcaggtcagcgttgcggccgtaaagggtcacgccgaacaggaactgaccggcgagcgcaatcagatacggacggttctgcgccgccgcctgaaactgctttttcagcgaaaccttttcgcgtcggggaggctgcacgacctccttcgtctttgcgaagcagaaccagtggcagagcgtaaagatgccgccgtagagcaccgtcaccatcaggtagccgtgcgcggcgttgtcgccgccgaagtgagagatgagcggaagcgtgatgatgttgaggatgttgatggcgatcatcgcgcagaccgagcgggaggtgttgattttcgcgcgctcctcgatgttctgcgtcagcgtgccgcacagcgtaccgtagggaatgttgacgcaagtgtagccgagcaccagcacgcagtaggtgatgtacatatacaggcttttcgccctgtccggccacgccggatgcgcccagaacgtcagcaccagaacgacggcggtgagcggcgcgccgatcagcagccacgggcggtagcggccccagcgggtgcgggtgcggtcgctgagcgagccgatgaccgggtcgtttatcgcgtcccagaagcgggagaccagcatcagcagcgaaaccgccgccatgctgatgccgcagacatcggtgtagaaaatcatcagaaaattgccgacaaacatccagctgaaattgcagccgacgtcgcccatgccgtaggcgatcttgctgatcagtggaaccttgatattggtgtcttgctgccgggacggtgcggtgttactgctcattcggcgcagctcctttctctctttaccctgttccgaggcttaaagccgggtttcgtccgcgattttcacgaccgccttgacgatgttcgccttgtcggcgatgctcttgtccatcgcgttctggatgtcgtcaaagtcgaaaatgttggtcacgacgcctttgaggttgattttgcccgaggcgaccgcgtcgatggccatggggtagatgtggcggtagcggaacacggtcttgaaggtcagctccttgtcaagtgcgaggctgacggggagcgtcatttcgcccgacttggagtagccgacgagaacgatggtcgcgcccttgtgcaccatttcgatggcctgacgggtggtgaactcggtgcctgcggtttcgatgaccagatcgcagccgaagccgtcggtcaggtcgagaacggcctgcacggcgttctgctccttgccgttgatcacgccgtccgcgccaagctcgagcgccttgtccagacgcgcctgcataatgtccaccacgtaaacgtgggaaacaccctcagacttgagcgccatcatgctcatcagaccgatgcagcccgcgcccatgacaacggcggtctgaccggcgtgcgcgccgccctgattggccgcgtggaagccgaccgcgagcggctcgatgagcgcgccttcgagcgtgcttacgttgtccggcagcttgaagcagagcgcggcttcatgcgcgacatactcctgaaaaacgccgtccaccgggggagtcgcgaaaaatacaacatccggacagaggttgtatttgccctcgcggcagaatttgcagtggccgcaggtcttgcccggttcgagcgcaacgcggtcgccgaccttgaggtgcgtaaccttcttgccaacctcaacgaccgtgccgcccggctcgtgacccagaacgaacggcggctcgaccacgtaatgaccgatggcgccggtttcgtaatagtgcatatcgctgccgcagatgccgacatattcgagctttaccagcacctcatcgtccttcggcgtcggaatatcgcgcgtggtgtaacccattttgccgatgccgttcatgactgctactttcattttgccttccataaaaatccctccgcattgttatatatatttacttttataaactacttatgaatgtagttataaattagcacagggcagaaagattgtcaatccccgcggcagcatttcagagatatgcacaagagcgcggacgtaaaattgtgcaaaaaaatcagggacagaagtctgtccccgagaaaattcaagttataacgactgaataaacgactcaatgtgcacgagcgccgcgccgagcgcggaggattccagctgatagcggctgaatttcaggtagctgctgtccggctcgaaggtgttgtgccgggccagaagctcccgcagcggcgcaccgaattcggacagaaaaccgcccacgtagccgccgacgatcacatcgcagtcaaaaatcatgcgcaggttgttcaccgcgaccgcgagatgggcgaggtattcgtcccacgcggcctgaagcgtgcggtctccggcacgcagaccgtcgaaaaacagcgcaagattgccgccggtcaacgcggagagcacctttgcggagcagtaagcgtccacgcagccgcgcttgccgcagtagcaggggcggccgtccgggacgagggtcatgtggccgaactcgccggcgcggaggtgctccccggcgtagagcgagccgcccgtgaaaatcgagccgccgacgctgttgctcagcgagagatagacgaggctgtgcaggttttcgcggccgcggatctcggcgagtccggcggcgttcgcgtcgttgatgaagcggcaggggaaggggatgcagcggctgaactcctcgaccggcacgccgcgcagaccgagcgcgtgggaatagacgagcgttttcgcgtcccgatcgagaatgccgggcagggaaataccgacaccgagcacggtttccgtcgggcatccctctttttcgagcaggctctttacaagctcggcgagtccggcggcgtaggcgtcgcaccgctcaaaggggcgcttttttcgctcaaaccgaaccagttcgccggataaatcgaccagaaccgcaccgatatggttctgcgttatttcgagaccgaccgcatagcgggcgttccgcaccggggcaaaggctttcgccttgcggccgccggtggactcgaaggtgccgacctcctgcaccagtcccatttccatcagctctttgacgttctggagcacagtcggccagctgttgccgaccttggccgccagttcgggctgggaaatgcgctcgcaggcaaaaatgctgcgcatcgttcgaatgcggttgattttctttacatcgcggttgttcgctccgccttttatcatctggatgcgtcacctccggatacgaaaacgacatctgaaatgtaatttataaagtcatttctattatagggaattcggagagattatgcaaggggaaacctttgattcggcggaagttataaaataatagaaaccccggagcggctgccccggggtctgtctgctgtccaatcaaatttttagttcttgctgcgatacaggaacgttacgatctgcgctctggtgcagccgtctgccggggcgaaggtcgttgaggaagtgccggtagtgatgccgtgcgcgaccgcccactgaactgcatcggcatagaatgcgccgtccaccagatcgctgaaggcgagatctgccttggctgcgggtttgcctgatgcacgccacaggaaggttacgacctgatcgcgctgtaccgttacattcgggtcaaaggaagttgcagaaacgccgttcgttacattgttcgcaaccgcccacagaaccgcctgatagtaataatccgaacgtttgacgtcggtgaacggattatctacgctgttcgtctgcggagaaccggcagcgcgccacaggaaagtgaccgtctgtgcgcgcgtacaggtctcccgcggcccgaaggtcgtttcggtcagaccggaagtcaccttgctgcctaccgcccacttcaccgcatcatagaagtaatccgacttggcaatatcggaaaatccggtatcgggatctttcatcggagccgtcgcaaaacgcgcctcgatggtgtgcgcggtctgcaccttgacgaacttataggacgctaccgcaccgatgcttttgccgtccaccagaacgtccgcgattttatagccgttatttgcggtaatcgtatagttctgattgttgccgttggtgatgctgctggtaccgttcgggctgatgctgccgccaacgcctgccttggccgtaatcgcatgcttttctcgggagatatagccgcccgaaccctgcaggaccgggaaagttgtatacgcttcgccaagtgcgcgtccgtcttggccagttcccttgagggtatagtagcccggctttgcatccggatcgacccatacgcccttgttaaggatatagacttcggaaggctcctgcccctcttcatctgtaatcgaccagtccaccttgctgaaaatatcgttgccgtcggcgtcataggcatatactacggctgtcgtaccgccgtacatgccgggccagccggcaagatcgaccttaacggaaacaacggtcggcagttcttcctccgctgcgcctgccgagaagacagccatgctgcataccgtcataagcgccagcaacagagatacgattcgtttcatccttttcaaatgtaccactcccgtaaattggaattcgtcaatgtttgacttgtttcagtttacaacattttctgcgggatggcaagggcgttccggggggttcgcttcgtgtgttgcatgaagataacttcgcttttgattattatcggtatagcacataacaaagccggaatcaagcgtgatttggtcgtggattttgtccggcccacgcggctttgttcgaactattcggattccatagacaacattatacaataaattctcaatatttcaacgaatagccgcaatttttcgggcggttccataacatttatgggctgatgaatgactgccagaaacatacagaaatatacttttgctgaaattttatataaccaatattgacaaagcaggcagagggggtataataagcgtgtcaaataggcacaagggtacccttgtatcaggatagtcctatcctgatacaatcc

SEQ ID NO: 12869 - DNA, 47530 bp, Unknown
  gut microbiota DNA sequence
ccgccgcaccccagggcaccttctcttgccctttcagggcaattcaccttgtgcggacgagaggggggtatcacccccggtttctccggaaccgggggtgtatccaggagggacagcgtcccccctggaggaagctcagtgcgacaagagcatcctgtcattatccagctccgcgccgcacgcctcgcggtacagcgcgagcagacccggcacatccagcctgtcgcgcgtctcgcccgacaggtcgagcacgatccttccgcgctcgagcatgatggtgcgcgtgccgagcgacagcgccgcgccgatgttgtgcgtgaccatcatggtcgtgatgtgattttccgccacgatgtcctgcgtgatgtgcagcacgcgctccgcgaccaccgggtcgagtgccgccgtgtgctcgtcgagcagcagcacgcgcggcgtgttgatcgtcgccatcagcagcgttaccgcctggcgctgtccgcccgacagcaggccgatccgcgttttcatgcggtcctccagacccatgtcgagccgtgcgagctgctcgcggaagaacgcgcgctttttgcgcggcagcgccggtgcgaaaaggtgtccgcctgctcttgcatacgcgagcgccacgttttcctccagcgtcagatcgggcgctgtgccgcgcatcgggtcctgaaagatacgcgcaatgcgctttgcgcgcttgtgttcgggcaggtaggtgatgtcctcgccgtcgagcacaatgcgtcccctgtccacgaaaaagctgccggagaccgcgccgaacagcgtggacttgcccgcgccgttcgagccgatgaccgtgacgaactcgccgtcctgaagcgtgagatcgataccgcacagcgcgtgatgtgcgctcgccgtgcctgcgccgaaggtcttgtcgagctgtttgagcgtcagcatacgcggttctcctttctctcgcggcctgcacggatcgctgcggccgctgccggtacagcgagcgtcgccgcgacgatgagcgccgagagcagcttgagcgagttcgcgctcatcagattgtaacgcagcgcgagcgcgatgatgatgcggtagacgaccgagccgagcaccgcactgacgatgccgatcacgatgccgcgcctgccgcagatgacctcgccgatgatgacggacgcgagaccgatgacgatcatgccgctgccggcgccgacgtcaccaaagccctgacactgggcgaggatcgcgcccgagagcgcgaccagcgcattcgccagcgcaagcgccgcccagcggactgccgtcgtgttgatggaggaggcgcgcaccatgtcctcgttcgagcctgccgcacggatgcacaggccgccgaccgtctggaagaacagcgtgacgagcacgacaaccacgaccgtgaccagtccgacagccggcgctttgccgccgagcacctcgaagaacttgggcgcgtcgagcagcgacacgttcgggccgcccagcaccgtgatgttcacggtgtacaggccgctcatcgtcagaatgcctgcgagaatgggatggattttgcagtgcgtctgcaaaaatccggtcacaacaccggctaccgcgccggccagcgcaccggccagcagcccggcgaacggatgcgccgccgcgcacagcacggtcgagaccgccatgccgaacgtgaacgagccgtcgaccgtgaggtcgggcaggttcaggatgcggaacgtgatgtacacgccgaccgcgagcagcgcgtattcaagaccgagcagcgccgagtccagaaagaagttcatggtttatctctccccttttttgcggcgtctcagccgccgatcaccgttaccgagccgtcctccggcagggtgatgccgagcgcgtctgcggcggacttgctgcatacatactggaagtcgctcattgcctcggccgggacctcggaaacgtccttgccgttcagaatatcatatgccatctctgcggagcgctcgccgagctgggtgttggaaaccgatacgcacgcgagagcgcccgacttgaccatgaccgggtcagagccgtaaatcgggatgcctgctgcgtccgccgcctcaacgacctgcgccatcgcggactgcacggtggagtcgatcgggatgtagatcgcgtcaaccttgcctgcgagcgactgcgccgcctgctgcacctcgttcgaggaggcaacggtgacttcctcataggtgtaatccgtggtatcgaggtatgcctttgccttttcggcggtcagaacggcgttcttctcgcccgagcagtacaggatgccgatgttcttgacgtccggggtcagcttgcccgcgagcgtgaagatctcgtcgaccggaacgatgttcgaggtgccggtcgcgttcttatccggctttgccatgtcgcccatgatgcctgccgccaccgggtcggtcacggagatgaaaacgaccggcgcgctcacgcccgcattgacgaccgcctgcgtcgccggggtaacgatcggaacaacgaggtcataatccgctgtcttgagctcggacgcgatcgagttgagcgtggacatatcgccctgcgcgttcttcacgtcataggtcacgccgtcaccgtacagctcggtcagcttgttctcgaagctgtcgatcatctcggtgaacgcatcgttgtcgaccagctgaacgaccgcgacctttgcggtgtcgcctgccgcggcgccggtgtccgcatttgcgtccgcgccggtatccgcagaggcattgccgccgcaggcggtcatggtcagaaggcttgcgcctgcgagaagtgctgctaaaaacttgtttttcatggggtatctctcctttggcatgtcgtcgaggacaaacaaaaacgcccgtcctcagaatttcttccaaggacaggcgataaaatcatcctgcggtgccaccttgcttcgcgccgtgcggcgcgcactcatcggaacgctaacacgctccttctccgtaacggggagtcccgttgcactatactgagccttgcggccgttcccgtgcaccctctgcggtccatttgtccgatgcgctgctgccgggcttccaccgcccccggctctctgcaaacccgcttaccggttttacttccgcttcttcggtttgtgatgggtccattgtaccacgcacttcagcacgttacaagactttatttttatgaatttttgctatatcatagaagcagtgtttgtacagtttttataatatgccgcgcaagcatttcatatccgatcaaaaaagaaggaattgacccatgatacgacatattttgttctggaagcttcaggaggagtaccgcgagggcgaaaaacgccgtgaagccgaagcgcgccttgcggcgtccgtcgagacgctcgcccccattcccggcctgcacaacgcaaagatcggcccgaacctcgccggcggcgaatacgatctcgtgttttacgccgacctggacgacaaggacgcgctcacggccttccgcgaccatccgcttcacgtcgcgcaccgcgagcgctgcgcgtcgctcgtcaccggacgcctcgccggagatcttgaggtctgaggctgtcgaaaagcttcgttttccgacaatctgtgttctgacgagcgcagagcacggacgtccgaaagttcccatgcggagactttctccctcttaaagaatgaaaaccgaggcacatggcctcggttttatgaaatcgctgcgcgatttctatttcatgcgcgctgccgcgcggctgccgtttcggcgtgaaaataaacttgatcgacagactgagccggggctatgccccggctttcgtgcttttggaggtttctgtccggcgtccggctgttacagcatcctgccgcgcagcaggatggtatgaatattcagctcgtcgtcgagcagaacaacgtttgcgagctttccggcctcgagagaaccgtaatcgtgctcgatgccgagcgcacgggccggatttgtcgaggccgcctgcacggcctgaccgagcggaatccccatgcgcaccgcgctccggacgcagtccatcagattggtggcggaaccggcgatcgtgccgtcatgcagcgtggcgagattgccgcgcacggtgacagcctgtccgccgagcgagtattcgccgtcctcgaggccggtcgccatcatgctgtccgaaatgaggatgacacggccgccaaacagggtaaagaccgcgcggacgaccgaaggatgaatgtgcacgccgtccgcgatcagctcgaccgcgacgttttcgctgtcaaaggccgcgccgatgacgcccggagcgcgatgcgaaaacggcggcatggcgttgtacaggtgcgtgacctgccgcgcgccgcggcggaatgcctcgcaggctgtatcgtaatccgcctcggtgtgggcgagcgagatgcggacctcgccggacagctcctcgatggtctgcatcgcaccgggcagctcgggcgcaagatcgcacagcttgaacagaccgttcgcctgctcctgcacgcggcggaacatcgcggcgtccggtgcgtgcagataggcgccgttctgcgcgccctttttcttttccgagatgaacggcccctccatattaatgccgacgagcgcggcctcgtgcggctcggcgctccatgcggcggcggcctgtgcgatctgcgtcagcttttcctcgggataggtcatggtcgccggacagatggcggcgacgccgttctgcgcctgataggcggcaagggtcgagatcgcttcggccgtgccgtcgcagaaatcgcgtcccatgcagccgtggaagtgcagatcgaccaggccggggatggcgtagagaccgtccatgtccaccgcgtcgccggtctccccggcggcaaggatgcggtcatccgcgaccgcgagactgcccgtgcggaacgtgccgtcgggctgatagattttcaaattactgaactgcatgaaatctcacctcagagaagatcggtacaaagagagagcgcagcctcgtccgcgacgatggaaacgtcggtatgaagctgaaggatggatgccggaacgcgcggcgttaccgggccgaagaaggcttcgcggacggttttcgccttgttttcgcccgaaacgaccagaacgatgcgtcgcgcgagcatgatggtctgcacgcccatggtgtaggcctgacgcggcacatcatcggccgaggcgaaaaagcgcttgttcgcctcgatggtggactcggtgaggttgacgcagtgcgtgcccttggagaaatactcgtccggctcattgaagccgatgtgaccgttgagacccatgccgagcagctggaggtcgatgccgcccgcggcgcggattgccttgtcgtagcggctgcactcgcgctccgcatcaagctgtgcgccgtcgggcaggttgatgcgctcgttcggaacgttcaccgcatcaaaaaagttcttgtgcatgaagtagtggtagctctggtcgtgatccggggtcagaccgcggtattcgtccagattgaaggtcgtgcaggcgccgaaatcgacgtcgcccttgtgataccacttgatgagctgctcgtaaatgccgataggcgaggagccggtcgcgagaccgagcacggactccggcttcaggatgacctgcgcggagatgatgttcgcggccttgcggctcatgtcgttatagtcttttgcgcggatgattttcataattccttacctctttcgttttgtcagaaaacagaaggggcaggctttcgcccgccccttccattgcgcggagcgcaatctggtgatatgcaaacagatatggtcgaatggattttagagcatctttgccatttcgtcggctacgaactgaaccttggtgccaatgatgacctgaatcgcagtctgagacgggcgcattacgcctgcaacgcctgcggccttgatcttcttctcgttgacctgcgtgccgtccttgacctcgatacgcagacgggtgatgcagttgtcgagagattcgacgttctccttgccgccgaggccttcgagaacggccgcagcgatcgcggtgaagtcgttgttcgcgagagtcgcgttcttgtctgcttctgcgaaatcagcctcctcatcctcacggcccggggtcttgaggttgaacttggtgatcgcgaagtagaataccagatagaatacaacgaatgccgcgatgccgagcgggatgatcatcagggtgttgttcgccgccggcaggaaggacgagaatacgaggtcggtcgcgcctgcggagaagcagaagcctgcgcggaagccgacgtagtaggtgatgacggtgaagatgccgtacagagccgcgtaaacgatatacagcgggaagcacaggaacatgaagccgaactcaaacggctcggtaacgccgcagatgaatgcgcagatcgcagcggacagaaccagaccgatggcagccttcttgttcttcgcggtcttgatcatagccagagccgcgccgaatacgccgaacatcatgcaggggaagaagccggacatgtacatgccgaggctccaggtaacgccgttctgaccgctaacgtcgccggcccagtagtgcgacaggtcgccgaggccgatggtatcgaaccagaatacgttgttgagtgcgtggtgcagaccggtcgggatgagcaggcggttgaggaatgcgtagatgcctgcgccgatgccgtccatgccgatgatggcttcaccgacagaaacgagtgcgccgaagatgatcggccatacgaacagcagaacgaccgaaaccagaatggaaaccagaccggtgacaatcgctacgcagcgcttgccgctgaagaatgccagccagtcgggcagtttggcgttcttaaagcggttgtagcaggccgagccgatgatgccggcgatgatagcgataaagacgttctggatcttatcgaacgcgagcgtcttgaccgggtcgtccgcgatagcgggcatcagggtggtgacaacgcccgtgctcagcaggttggtcatcatcagccacgaaaccagaccggcgagtgcggatgtaccgtctttatcgtccgccagaccgaccgctacgccgataacgaacagccatgccatgttgtcgatcagcgcgccgcccgccttgatgagcaggaagccgatgttgtacagcgcaccgctcgtcgccgcgcccggtacgcccataacgcccggagcgatcgcatagccgaggcccatcagaataccgcagatcgggagcgctgctaccggcagcatgagtgccttacctaatttttgcagctttttcatcataatagagtcccctcctctttgtaaatgccgcatttttgcggcgccttgtgaatgacgatgtattccataacgaactgcttcgaggaaaatacatccgaacgccgttttccgagagccgaacagggaaaacggcttatttcatcgcccgcagggcgaaatgaaaccgcgtttacaggttatcctgaagaaacttttcgagagaagcagcagcctccgcctcgtccgcgccctcgatggtgagctttacggtgtcgcccttctttgcgcccatgctcatcacgcccatgatgcgcttggcgtcgacctccttcttcggagaagcgatcatgattttggaggcgaacttggacgcctccttgacgagcatgccggccggacgggcgtggatgccgagctcatcggtaatcgtgtattcgaatgttttcatggtgaaatatctcctttttacttcttttcgagcatcagcagatcgtcgcctgcctgaacgcttccggcgccttcggtcttgaccgaggcgaacgcatcggggttgcatacgatgaccggcgttacgacctcgtagccagccttgcggatggcgtcgatgtcgaattcgatcaacgtatcacccttgcggacggtgtcgcccgatttgcattttgcggtgtagtgctgtcccttgaggttgaccgtgtcgatgccgacatggatgagcagctcagcgccctccgacgtggtcatggagaccgcgtgtccggtatcgaacatcatgtcgaccgtgccgttcgccggagcgacgattcgtccctcgctcggctgtaccgcggctccggggccgaggatgccctgcgcaaaggtcgggtcgggaacctccgtcagcggcacgaccgttccggagaccggagaggcgatcgtgatgccgggctgggaaaacaggtttttcagcttgccaaacatgatacattcacactctttctgcattggactgtcgtccacatagtatgtcggttgagcagataaaacatgcgaaaaaaataaaaaaaccaaatttcatcgcctatataccgtcttactgcaaagactggtgcgagaaatctggttttgcccgccgaagcggtaacaatccattaaaagtcgaagggacgctgcccttctggaaatgcctgctatctacttgttgtttttattgtaacagaataaaaatccgtttgcaagcacaaatcgacggttgacctgccaaaaaacagcgccgtttttctacactttgcacaaaaacagccgtcactgcctgcttccgggcagaggcgaggtcatttcgcgctgcatccagaacagcagcatgccgacgatgtattcctgctcggcggcggtcagcgcgcgtccggaggggattttatgccatttttccagacagccgcgacagcagcaggcggtcgcgtgctgcgcgataaagaccggatggccgcgcatgggcgtctgtttgccgtcgttcgggataaaggcgggcgcgagccgctcttcgaccagctcggcggcgtggcggcgcatggtctcccatcccctgtcgcagatatactggcggtccttcaggccgagacggaagcggctgcggaagcgcgagcgcgaaagtgcggcagagatctgcgcatagcgcacggtgttttcttcaaaattcatggaagctcgtctccttctcttttctattgtagaacatgacgaagaaagatgcaagtaccgccggcgagatggctattgtgctgtgaaagccgcggttcatcctgccttcatttggcaaaacggccgcagagtagcgaagagtacagtgcgtgcacgggcacgcatacgcaaagcgttttcggaaatttacacaaaaaacagcttgcgtatacgctctcagtagtgtataattacaagcagggaagcaatcccgtcaacaaacgcccgtgcgacaggcaggggtaagggagtgtatatcaattatggccaattatccggtaaacaagatccgtaacgtatgtctcatgggtcacggcggcgacggcaagacctcgctcgtcgagagcctgcttaatatctccggtgcaaccgaccgcgtaggcaagatcgccgacggcaacacggtatgcgacttcgatcccgaagaaatccgccgcaagttctcgatctcgaccgcagtagcgcccgtagaatggaacgactgcaagatcaacctgctcgataccccgggcttctttgattttgaaagcgaagtgcagtgcgcgatgcgcgttgcagagtccgctctgatcgtcgcgaccggcaagtccggcccgggcgtcggcacggaaaaggcgtgggagcgctgcgaggaacaggcaatgccgcgcatgttctacatctcgaaaatcgacgaggaaaactcggattactatacctctctgcacaagctgcagaagcagttcggcgtatcggtagcgccgatcgttgtcccgatctttgagggcaaccgcgacaccgtcggcatcgtcgactgcgttatccgcaaggcctaccgcatggacggcaacaagcgtgtcgagattccgatccccgaggacatgaaggaccgcgtcgaccagcaccgcgcggcgctgtgcgaaaacatcgcagagctgtccgaggatctgatggagcgctatttcgcaggcgaggagttctcggatgaagagctgatcgccggcatccgtcagggcgtcaaggatctggtcctcgcgccggtattctgcggcactgctgcgaccggcatcggctcctacgcgctgctcaagggcatcgcggactacatgccgtccccggacgagaagccggtagagctgtgcgaggacgaaaagggcgagctgatcgagatcaactgcgcaccgaacggttcgacctgtgcatttgtattcaagacggtcgctgaccagtacggccgcttctcctacttcaaggtcatgtccggcgaggtcaagcaggatatgacgctcgtcaacaagcgcgcggacgcgaacgagaagatgggtcacatcttcaccgtctgcggcaaaaagacggccgaggtcccggtcgtcggctgcggcgacatcggcgcggtctccaagctggtcacgaccaagacgggcgacaccctgtccatgagcgtgcgcaaggtcgagctcgagccggtcgagttcgcgcctccctgctacacgcaggcgatcacagccaaggtcaagggcgccgaggagaagatctccacaggtctgtcccgtctgcatgacgaggacccgtccttcgagaccgaattcaaccccgagaccaagcagcacctcatctccggtgccggcgatattcagctggacgttctgtgctccaagctccgggacaagttcggcgtagaagtcacgctgtccgctccgatcgtaccgtaccgcgagaagatccgcaagccggtcgtcgtcgaaggcaagcacaagaagcagtccggcggccacggtcagtacggtcacgtcaagatggagttcgcaccgtatgcagagggcgattatctgttccaggaaaagatcttcggcggttcggttccgaagaacttccatccggctgtcgacaagggcatccgcgaggccatggagcacggcgtgctcgccggctatccgatggtcggtctgcgcgcaacgctgctcgacggctcgtatcatgacgtagattccaacgagctgtccttcaagatggcagcccgtctggcctacaagtccggcatcccgcaggcatctccggttctgctcgagcctgtctgctcgatgaaggtcgttatcccggattcctacatgggcgacgtcatcggcgacctcaacaagcgccgcggccgcatcatgggcatgaacccgctcgacggcggcaagcaggagatcgttgcagaatgcccgatggcagagcttggcgactacgcgatcaagctgcgttcgatgacgcagggccgcggttcgttcgtttccaagttcgagcgctacgacgaggcgccggctccggtacaggaaaaggtcatcgccgataacaaggcccgcatggaagcactgaacaaggactaaaaagcgcataaacctgccccggcaggcatacacaagcaacacagccacggcggtttcatctgctgtggctgttcgcgtggtggggtaaatcggaatttgtggaattgaaaaaatcggagtttggaggaatgtttcatgaaaaaaactataacggtagcgttttgctttgtgatgcttcttctctttgcgggatgcggaaaaggtgatatatcaaatgtgaaaattgagtatggaacatcttccgtttactcaaaagaagatatggatgctgctattgaggttataaaagaacagttcagttcatttgagggctgtgaactgcatagtctttcttatgtgtcggatgaagaatgcaacaaggcagaaaatattgaatggatgaatgatttaagagcggatgatagtaaagaaatctttacgcaatgcattgcatttaatagcagcttccgttcgccgaaaaaaggcggcgatacatggaatgctgacgaagaatatacctggacatggtggcttgcacgaagcgaagacggagaatggaaactgatgacttggggctattgataaaataagaaattttagcttttcataaatccacgaaaaaaggcacgcctttggcgtgcctttcgcgtccctccgggacgccgcgcacacattgtgtgcgcaatttcctgccgtattttgacctcgccaaaacaggcaggacaggcctgccgcagcaggccgcgtaaaattctccgtaaaagtcggggcgtgtacctgacttttacacctctgcccgcgccggagcggcgcggcctcgtccgctgtgcggacgagagggggttatcgtccccggtttcgtaaggaaccgggggcgtatctacgggggacagcgtcccccttggaagcctgcgtcattccatgacgcgggcaatatgtatcgtcagatacagcaactcgttgtccccggcgcgaaagcccttttcggtcagcacatagctgcatattttttcggcgcaggcgaacgcgcagggatacttgaagcgcacgacctcgagcagatcggtgtcctcatcgccgtatttctggctgccgacgatgcggcgcgcaaagaatttcagatgcgtgataaatcggtagtattcgatggtcgagctgtccggctcggcaccgtagacctcgcgcacgatgcgcagcgcggcctgcatcaggtaggtcatgtcgtagacctcgcggatctcgccgccgatctgcgcgttgacaaagtgcatggcgataaacccggcttcgtcctcggtaaaagcaacgccggtctcctcgagcacgatctcgttcgccttgaggccgacctgatattcgtccttgtagaactgctgaatgtcccagagcagcggattctggaggcggattccctccttgtagcgcgagatcgcgcccgaaatatggtcgggaagggtgacatagatgctgtcggacagctcgcggccgagcgacagcttcgcatggttgatgatgcgctcgctcatcatgaaatgcggcagagggatactggtgacaagctgttgaaagcggctcgaaagctggtcggaatgcagggaaaaacgtttttcgaccttcgcctgacaaacctcgccacccggcctgcacccgaagccgagtccccgtcccatgagcacagtctccgcgccgttctcatcaagggcaacgacgacattgttgttcaatactttttgtatctgcattcagttttcctttcgtgcggtgcagaccgcatccagagcctcgcgtgcagcgcgtactgcgccttcgtcacaccgccagagctcaaattcattcagtccgggaatacccatcgggacgttttcgcgacggaactccatgccgctcggcacggctgccttcgccgacagatgaaaagcgtcggcaccggtctgcggtgcgagcgcgcggatcacgtccgcgttcacgccgccgccgatcaggatgcgcagcccttccccgctctccgagaccagctcgcgcagcagcggtgcgccgtctgcgcagcgagcctgctgccccgaggtgaggattgtgtccacgccgagcttctttgccgtgcgcagcgcctcgtgcgcgtcgcggcaaacgtcaaacgcgcggtggagcgtgaccccgcagccgtcgccgcaggccatgagcgcactcatgcgctcggcatcgagcgtaccgtccggattcagcatgccgatgacgatgccgtccgcacccagaccggcaaaccgcgatgcctgacggcagagcagttcaaactcgtcctcatcatacagaaaatcgcctgcgcgcggacgcagcagcacacggacgggaatatcgacccgttcgcgtaccatgcagaacagatcctcgtccggcgaaagtccgccgagcggcagcgcggagcacagttcaatgcggtccgcccctccccttgctgcgtttaccgcagagcaaacgctgtctgcgcagacctcgagcagtcctgccatgcgcatcatccctttccttctctttttcctacatatttgattaagtatagcactccgcagcggtacggtcaatgaatttttctctaagaaagcggtaaatctgtaaattctacttgcaacctatcggaaatttgatacaatagatttgtgccgtctgtccctgcagggacggcggaaaaaagatcggacgggggacgctccccggaccggggaggagacatgaaaatctatgagcaaggtggagcagtatatcacgagcatcccggactacccgaaggccggcatcatcttccgtgatatcacgagcgtactcaaggacgcggacggactgcggctggcggtagatgagatgacggcgaagatcggggatacggaattcgatgcgatcgtcggactggagtcgaggggcttcctgttcggtatgccgatggcatacaatctgcacaaggcctttattccggtccgcaagagcggcaagctgccgcgcgcgacctcgcgcatcgcgtatgacctcgaatacggctctgcggagatcgaggtgcaccgcgaggacatcacgccgggtatgcgcgttgtcatcgtagacgacctgatcgcaacgggcggtacgctcgaggcggcggtacatctggtggagcagctgggcgcgaaggtcgtcaagatcgtctgcctgctcgagctgaagggtctgcacggccgcgaccgcctgacgtcctgcccgaccgaggccgtcgtatcctacgaagggaaataaatccgtaatcaaggcgaaagcctaaaattaaagggggaaaaacgatgtttgaacgcatattcaagctatcggaacacaaaaccactgtaaagaccgaagtcatggccggtatcaccaccttcatgaccatggcgtacatcctcgccgtcaacccgagcgtgctcggctcgaccggcatggacaccaccgcggtcctgctcgcaacggctctggcgtcctgcctcggcacgctgtgcatggcgttcatggcgaacctgccgttcgcgctgtccgccggcatgggcctcaacgccttcatggcgtacaccgttgtcgcgggctacggctactcgtggcaggtcgcgctgctcgcggtattcatcgagggcctgatctttatcgtcctgtcgctgaccaatgtccgcgaggcgatcttcaacgccatcccgctgacgctcaagaagggtgtttcggtcggcatcggcctgttcatcgcgttcatcggcctgcagaactccggcctgtgcgtagactccgcaacgctggtcgacatcatcagcttcccggagaacttccacaccgctggcatctgcgcactgctgaccctcatcggtctgttcttcaccgcggtattctacacccgcaagatgaagggcgccatcctgtacggcatcctgctgacctggatcctcggcatgctctgccaggtgaccggcctttacgttccgacgccggacgcaggcttctattccctgttcccgagctggggcatgaccgacttctccaagctgggtctgaccttcggtcagtgcttcaacgtggatttcagcgcagtcggcatcgtaaactttatcgttgtcatcttctcgttcctgttcgttgatattttcgataccctcggcacgctgatcggcgttgcgaccaaggcgaagatgctcgacaaggacggcaagctgccgggcatcaagccggctctgctggcagactccatcgcgacctccgcaggcgcgatcctcggcacttccaccaccaccacctttgtcgagtccgcatccggcgtcgctgtcggcggccgcaccggcctgaccgcgctcgtcaccggcatcctgttcctcgtttccacgctgttcgccccgatcttcaccgcgatcccgtccttcgcgacggctccggcgctgatcatggtcggcttcctgatggtcggcacggttaccgagatcagcttcgatctggacaacctcaccgagtccatcccggcatacctcgccatcatcgcgatgccgctgttctacagcatctccgagggcatctctctgggcgttatctcctatgtcctgctcaacctcgcaaccggcaagggcaagaaggtcgctccgctgatgtacgtcctggcagtgctgttcgtactcaagtatatcttcctgtaataaccatacagaaaataagcaaaggggccgctctgcggctccttttactgtcgaaacggcttcggtaacgcgatgttaccggtctgtttcggcattctttttatattccattatatcttctacccggcagtcgaggatttcgcagaacatttcaatggtatgcgtgctgacactctcgttccgcttcagccgagtgcccgatggcagagctcggtgattacgccatcaagctgcgctccatgacacagggcagaggctcgttcgtttcccagttcgagcgctacgatgaagcaccggttccggtacaggaaaaggtcatcgcagagaacaaggcccgtatggaggctctgaacaaggagtaatccttacatctgaatagaaaaaccggctgcgggagcagccggtttttttgttatgtgcttgattcactcgtgtccgttgtctgctggatttttttgagtgaagtgatacgcgagagttcaatgtaccagtttccaccgccgatattttcaatcgttccggtgactcggataacatcgcctttcctaaggctgctcaatgcattatagtcccagtgggtgagtgtgtaatctgaataactgaagcggataagactgatataatcctcaatggcccagtcgctgatagaggtaacttccatcgtaacggttgcagtctgtcctgcataggtgttttttgcggcgaccgggctttcatcgtaaagtgcatttatgtcccttgcgcttatctgtgtgccgtccgccagcgtgaaaataccgtagccgttctgttcatgcaggcgttcatttcgcgcagcattgaatgagcggacagcattcaaagcaacaataataaccagcaggataaaccatattctccgatagaaaggtttgcggcgaggctgtccgcattgcgggcagatttttgcaccgttggacaactctgtgccgcatactttgcagtgtgtcagtttggccataaaatcacctctttgtttttcgacaatacctaataagaaaaactgcggtattgtcttaaagaaaatataacacatatgtgttcgagtgtcaacaaatgtattcaaaggcggagaaaagatatactacactcaaactggggtgtagctatgagccaaaaccaattagattcgcggctggtaggcagggtgctcgcacgactgcgcgcggaaaaaggaatcacacaggaggtgctgagcggtttgtctgacatcggcagaacacatctgagtgcccttgagcgtggtgagcgcaagccgacactggaaactctgtatcgcatcagcaatgcgctggatatgcccatgagcgtgattgttgcagaaatcgaaaaggaaattcgtgaaaattcgtaaaaatacggttgaagcaactgccggtttacgcaaaacccgtgcaatctgccgtgataacgccgcgactatgcgtaaaacgcgagtcgataccgttcctttatgcgagttacttacgaagtagggccgtaaggcccgttcgcgaggctgctgagggaaaggcaggagttcaaagagggagatgcactcatttaatccgcgcacggcgcgggttagatgtttagcagtctacgggcaaaaccgtaggttgtctatcctcttaggcgcccgcgccgcgtaggcggcacccgttcccgccgtccgcaggcggcgaaactccccagcccggaaacggcgtatcgctcacgcaactcgtctgcaccagagaaggatttccgagaagtagaaaatcaaaattttctacgtcaaaaacggtggtttttgaaccgtgttttttgtacgccgagtctaactcgaccactggacggatgcacaaaaatatgctacaatttcgttagtaaaaaaacacggaggtgtcgtgcgatgcacagtaccagaaagatcaaggaagatctcatttatgttggcggcagcgaccgccgcctgagccgatttgaaaaccttttccctattccgcgcggtgtgtcctacaacagctatgtcctgctcgatgacaagaccgtgctgatggatacggcggacgagtccatcagccgccagtatatcgaaaacgttgtccacgcgctggacggccgctcgctcgattacatgatcgtgcagcatatggagccggaccactgcgcgatgatcgacgcgatcatgagccgctacccggaggccaagctggtctgcaccgcaaaggcggcgcagatgttcgcgcagttctacgacctcgatgtttccgaccgcacgctcgtcgtcaaggaaggcgacaagctctccaccggcgagcataccctgcatttcgttctcgcgccgatggtacactggccggaagtcatggtcacctacgacgaaaaagacaagatcctgttctctgcggacgcattcggcacgttcggtgcgctggcaggcaatattttcgatgacgagatcacgttcgacgacgtctggatgaacgacgcacgccgctattacaccaacatcgtcggcaagtacggcgttcaggtgcaagctgtcctcaagaaggccgcggcgctcgatattcagatgatctgcccgctgcacggcccgatctggcgcgaaaacctcggcacgctgctcgagaagtaccagaaatggagcacctacgagccggaggacaaaaccgtcatgattgcctatgcgaccatgtacggcaataccgagaacgcggtgaacgttctggcgaacatgctcgcggacaagggcgtgaagaatatcgccatgtacgacgtttccgagaccgacgtctccgagctcgtcgcggagagcttccggtgcagccatatcgtgctcgcagcgccgacctacaacggcggcgttcagccgaaaatggaggcatatctgtccgacatcaaggcgctcgctctccagaaccgcactgtcgccatcatcgacaacggcacttgggcgccgacggcgggcaagcagatgcgtgccgtcatcgacaccatgaggaacatgaccgtgctcgaaaacccgatcaccctcaagtctgctctcgcaaagaaccagcttgcatcgctcgatgcactggcagaggagctggcctctcaggtcaacgcgtaatacggtttttcgcagtcaaagctcccccggaaacggcgggagcttttgttctactcgccgcctcccccgcataagatagaccaaaagcaggagggacgttccatgatcgtaattgcagcaaaggtttcggtaagaaaaatcctggcgtgcgtgctggcagccggcacggtgctgacaggggcggctgtgctcctgccggcggacgcgcagccggcggcggcagcttcggagaatatgcgcctggacgtcaaactgcgcacgaatgagcagcgcgttgccctcctgcgcgactgcggctgggaggtcatcgaggagccgcgcggagaacgggaggtgcagatcccggaggaatttgacgaggtgtacgacagctacaatcaaatccagcaggcgcagggactcgacctcgcgccctacaagggcaaacgcgcgacgctctacacctacgagatcacaaaccacccgagcggcgagcaaggcgttaccgcaaatctgctcgtccggcgcgggaaacttatcgcggccgatgtatcctcgccgcaggcagacggcttcgtgcacggtctgcgcgagcatccgtccgaaccgcaggataccccctgacaggccgccgacaaaatgcacaactaccggaaatctgtgcaattcaacgaaaacgtgttcgacatattagcgtatgtatagaacattttcgggggattgcactttttttatatttccctattgtgcaaaatgcaaaaaagcgttatactatattcagtattcgattggcgggggagacaaaatgccgaagatgcgattggacaagctgctcagtcacctgaactgcggcagccgaaaagaagtgcagagcttcatccgtgcaggccgcgttgcggtgaacgacacggcggagcgcgaccccgcagccaaggtcgatccggatgcggaccgcgtgtcgctcgacgggcgcgagcagacctatcgcgcgcagcgctactatatgctcaacaagccggccggcgtcatcacggcgagccgcgacgagcggcacggcaccgtgctggagctgttccccgagagcctgcggcgcggcctgttcgcggtcggacggctcgacaaggacaccgagggcctgctgctcgtgaccgacgacggtgcgctcagccatgcgctgatgagcccgtcgaggcacgtttccaaggtctacgaggccgagctcgacggcgtgctcgtccccgacgcggcggagcgcttcggcgccggactgacgctgcgcgacggcacggtctgccgaccggcgctgctcgagctgctgccggacgggcgcgtgcgcgtgacgctgcacgagggcaagtaccatcaggtcaagcgcatgatcgcggcgtgcggcgcgacggtcacgtttctgaagcgtgtgcagctcggcggcgtgcggcttgacgaaagccttgctccgggcgaattccgcgagctgaccgaggaggagctcggcgcgctgcggccgccggacggcctgtagaagaaaggctgaaaccggcgtctgccgaaaaatcaacaaatttttttaaatattttgtacaaaaacgcggagacatgtgatataatgtcttaaaatacacacgaaacatagaatgttcttgtagagaatgttcatagagggaacatcggacggcgcgggagagcgccgtttgcatgacagaagaagttgaaaaagacgggaaaggtgatggaaatggcttcgagattgttccagtcgattgttttacagatgaaggacacggtggatcgcaccattggcattgtggatgcgagcggcgcggtcgtcgcgtgcaccgatctgccccgtatcggtgaaatgcgcgaagaggcgatcactgagctgggttttgcaggagaaatcgtccggttcggcggttatacctaccatattacgggagaccgttcctcgcgtctggagtatgcggtattcgtgcagggcgaggacgagctggcgcgcagcatctgctcgctggtggcggtatccatcaacaacatcaaaacgctgtatgacgaaaagcacgacaaggcgacctttgtcaagaatatcattctggacaacatcctgcccggcgatatttacatcaagtcccgcgagctgcatttcggcaacgatgtgccgcgcgtggtcttcctcatccgtcagcaggagcctgccgatgtagcggcgatcgacgtcgtgaccggcatgttcccggacaagcagaaggatttcgttctgcatatctcggagagcgacatcgttgtcgtcaaggaggtcaagacaggcagcgaatccaaggagctcgtcaagctcgcctcctccatcgaggagacgctgatgagcgagctgtcggtcaagtgcctcatcggcatcggctcggtatcctcccagatgaaggacatcgcaaagtccttcaaggaagcgaccaccgccatcgaggtcggcgcggtattcgacaccgaaaagaacatcatcagcttcgaaaacctcggcatcggccgtctgatctatcagctgccgatcacgctgtgcgagatgttcctcagcgaggtgttcaagaagggctcaatcgactcgctcgaccaggagaccctgttcaccattcagaagttcttcgaaaacaatctgaacgtttccgagacctcgcgcaagctgttcgtacaccgcaacacgctggtctaccgtctcgaaaagatcaaaaaactgaccggtctcgacctgcgcgagttcgatcacgccatcgttttcaaggtcgcgctcatggtccgcaagtatctcgcgagccgcgaggaagccgtccgctgacatccaaaacggacaaaaaccggcataagttcacaaaactttcacgaaaaatcgtcattctgcgcagaatatgctgtgtttcgcttcttgcgcaggagggatttatctgctataattatcagaggtgtgtggggaaatgcacacctctgtatttttttgtttgttatgaagtcatcgaggaggaacgcttttgatccggatgaacgatgtcaccgtcgtatacgacaacggtatccgcgcggtgaataaagccagcctgcgtgtggacgagggagagtttgtctttctggtcggcgcgtccggctcgggcaaaacgaccattatcaagctactgacggccgaggtgcggccgaccgagggcaaggttctggtcaacaactacaatatcggcgagatgaaaaagagccgtatcccgtatctgcgccgcacgctcggcgtagtctatcaggatttccgtctcatcaagaccaagacggtttacgagaacgtcgcgttcgcgatgcgcaccatcggcgcgaagagtaaggcgatcaagcagcgcgtgccctatgtgctcgatctggtcggcctcgcggacaaggcgaaggaaaagccgatgaatctttcgggcggcgagcagcagcgcgttgccatcgcgcgcgccctcgtcaacaacccgcgcctcatcatcgcggacgagccgaccggcaaccttgacccggcgcgttcgctcgagctgatgacgctgttcgagaagatcaacgagctgggcactaccgtcctgatcgtcacgcacgaaaagggtctggtagatgagtttgaaaaacgagtcgtcatgatcgaccacggttcggtcgtcagcgaccagacaggtgggtactatcaggcatgagacgttttggttactattggaaggaaggcctgcgcaacatcttcaagcacgggttcatgtcgatcgcggcgatcgccatcatggtcgcctgtctgatcctgaccggcacggtgacgctcatcgcgtacaacatcgacctgagcatcgttgacctgcagcagtccaacgagatcgtcgtctggatcgacgaaaatctcacgacgcgcgaggccaaggaccttcagccacagtttgagaagatcggcaatatcgcgaccgtggagttcgaggaccgcgatgtcgcgctcgaaaaataccgcgaggagctgggcgaggacgcgagcatcctcgaggactacaattcctcgaacaacccgctgcgcaacagctacatcctgaccctcaaggactcgacgcaggctgaggagaccatttcggacatcgaaatgatcgagggcgtagcaaatgtccgcgcggatgaagcggtcatcagcaagctcatccagatccagcacgtattcaacatcgtcgctctcgcgatggtggtcggccttgcggtcatctcgatcttcatcatctcgaacaccgtaaagctcgccatgttcgcgcgccgcgaggagatctccattcagaagatggtcggcgcgaccaactggttcatccgctggccgttcgtcatcgaaggcatgatcatcggccttgtggccggcggtctggcgttcctggctgagtgggggctgtacaccgagctgtacagcgtcgcaggcggcgtcatcccctatttcgaaattctgccgtttgaaagcctgaggtggctcgttctcgccgttttcgccggcgcaggcgcgctgttcggcatcggcggctcggtaacgagcatccgcaagttcatggatgtctgagaacaaggagaacgatcatatgatgaaaaagaaaaccgtacgcctgatatccggcgctgttgcaggcattctggtcggcgcaatgctcgtgtcggtcgttgcctcgggcatcgtttatgcgggcgcggcctcgagcgcagagctcaaggacaagctctcctcgctcgaggaccagaaggctgagatcaagaaggagctcgactcgaccgcaagcaaggtcagcgacatcgaaaagacccgtgccgcgctccagaaggagatcaccctcaccaaggaggagatcgagaccgtaaaggcgtacatcgagcgcctccagcagcagatcgacgttaagtccaccgagctcgagagcgcacagaaggcgctcgaggcgaaggaggaaaatttctcgcagaccgtccgcacgacctacgagcagggcgacatcagctatctcgaggtgctgctcaactcgtcgagcttctccgatctgctcaaccgtctcgacattgtgtcgaccatcatggacgacaacaagaagattgtcgcggagtatacggcagccaaggaggacattcagcagaagcgcgatgacctccagaaaacgcaggacgagcaggtccagtatcaggacaacctgaactacaaggccgaggagctcaagtccagcgaggcacagcaggcggcgcttcaggagagtctggaagcctaccagaaggagcagaaggccgagtacgagcgcattacgaacgaaatggactccgtaagcgaccagatcgccgagcagtcgcgcaaggaagcggcggcggcagccgcagcagcagccgccgcaaagaagaagggcaccacgagcaatcaggtcacgacgaccggctcgggctccgcgacccgttacagcggcacgttcacctggccgctgccgggctacactgttgcctccagccgatatggctggcgtgtccatccgatttacggcacccgcaagttccacaagggcgaggacatcccggcgccgaccggcgcagccatcgtcgcggcggcctccggcacggtcacgaccgcaggctgggtctccggctacggcaactacaccgttatcaatcacggcggcggcgtcatgacggcttacggccatcagtccgcgatttacgtatcggtcggtcagacggtttccgccggccagaccatcggcgcagtcggttcgaccggcaactccaccggtccgcatctgcacttcgaggtctacgtcaacggcgcaacgcagagcccgatgagctatttcagctaagtacatcaattcttggggagggcggtccacgctctcccttctttcatggaggaaaaacgattgaaaaaactgcgaaaaatacgggtgccgctcgcggcggccgtgctgctgtgcttcgtatccgccggcgcgtcgctcggcgcggaaaggctgctctgcggctggaaaacgagcgctgtcgagaccaaactgcgcgagatcgaccgtctggtctcggaaaaatatatcggagagaccgacagcgggagcgttgcggattacgcggcggtcggctacgtgacgggcctcggcgacaagtggtcgagctacatcccggccgaccagtacgaggcctaccgcatgagcagcgagggtacgggctgcggcatcggcgtttcggtcacgagcacagcggatacggtgcgcatctcgatcgtctacgatgactcacctgcggcgcaggccggcatcgtcaagggcgattacattctcggcgcggagggcctcacggtcgaaaaggacggcgcgaatgcggtcatctccgcgatacgcggcgaggagggcacggacgtctcggtcacgatacagacgagcgcgggcgaaacgaaaacgctcaccatgaagcgcgcgaccgtcacgcagaagatggcgtggggcgagatgctgtcggggggtaccggctatatccgcatcgaaaacttccacacgggcgtggcgaagcagttccggaacgtacttgacacgctgaccggcgagggcatgacctcgctcgttatcgacgtgcgccacaacggcggcggcaaggtcaaggagatgagcgagatactcgatccgctgctcccggagggcacgatcatgacgctgcgcgagaaggacggccacgagaccgtctactcctcggacgcggatatgatcgacctgccgatcgcggtgctgatcgacgaccagagcatttcggcggccgagttcttcgcggcggccttgcaggaatacgagcgcgcgacgctcgtcggcacgcacaccaccggcaagggccgcgcacagcgcacttatgcgctctcggacggctcggcggtcaacctgtcggtcgaggaatattttacgcctaagggaaaaagcctcgcggacacgggcatcgcccccgacatcgagatcgcgctcaccgatgagcagaccgcgaacttctattttctcgggacggacggcgatccgcagcttcagcgcgcgctgagcgaggtgcagagtctgaaaaactgacctgtaaggcagggcaaaagacagttttttctgccgaatatgtggaaaatgcgtctgctgccttgacacatcgcgcagctttacatataataaaatgtactgtacagtccctttggcagcgtctgcgcgccggaggggactgattattgatgaataagaagggtttgcagatatggctaaagaaatcaagctgacacaggaaagcctggacgcttataaggaagaactcgaatacctcaagaccacccgtgcggacgaagtcgcagagcagctcaaggaagcgcgctccttcggcgacctttccgagaacgctgagtacgatgaggcgaagaacgagcagggtaagctttactcccgcatcgcagagctcgaggagatcatcaagctggcggtcgtcgttaccggcgatacctatgccgcagacgaggtctctcccggctgccgctttgttgtaaaggatctggagttcgacgaggaagaggagtaccacttcgtaggctcgcaggaggctgacccgatggacggcaagatctcggacgagtccccgttcggcaaggcaatgctcggcaagaaggtcggcacggtcgtcgaggtcgaggctccggccggcgtgatcaagtaccagatcgtcaagatcgaaaagtaagcgcggaaaaattccgtttacaggcgcgtttccttaaaaacgcagataaatgatacagaaagatggggaaactatggcagaacagcatcaggcgcaggagcagcacgagcagaccgcagaggagctgcacgagctcaagcgcatccgacgcgagaagctggccgagctgcaggctgcgggcaacgacccgttccagcaggttcgcttcgagcgcgatcactataccagcgacatccacgagcattttgacgagctcgagggcaagaccgtccgcctcgcaggccgcatgatgtcgaagcgcatcatgggcaaggcgtccttctcggacatgaccgaccgctacggccgccttcagctctatatcaagcgcgacaacgtcggcgaggacgtatacaagggctacaagaagttcgacatcggcgacatcatcggcatcgagggcgaggttttccgcacccagaagggcgagatctcggtcgctgtcaccgagctgaccctgctctccaagaacctcaatccgctgcccgaaaagtggcacggcctgaaggataccgatatgcgctatcgtcagcgctacgttgacctgatcgtaaatccgggtgtgcgcgacacgtttgagaagcgttccgccatcgtgcgcgagatccgcaacttcatggattcccgcggctttatggaggttgagaccccgtgcctcaacaccatcccgggcggcgcggctgcccgtccgttcatcacccatcacaatgcgctcgacatcgatatgtacctgcgcatcgcgaccgagctgcatcttaagcgcctgatcgttggcggtctcgagcgcgtgtacgagatcggccgtatcttccgcaacgagggcatggacacccgtcacaacccggaattcaccaccatcgagctgtatcaggcctacaccgactatcagggcatgatggacatcaccgaggacatggtcatccatgtctgcgagaaggtcctcggcagcaccaaggtcatgtatcagggcgttgagatcgacttctccaagggctggaagcgcatgaccatggccgaggcggtcaaggaatatgccggcatcgacttcatggctctgtctccggaggaggcgctcgaggccgttaaggccaagggtctcgagatcgagccgggcaaggagagctggggcgacctgatggcacagtgctacgacgagtacgtcgaggcaaacctcatgcagccgacctttatcaccgattatccggtcgagatctctccgctggcaaagcgcaagccgtccgatccgcgtctgaccgagcgcttcgagtgcttcatttacggccgcgagctgtgcaacgcattctccgagctgaacgacccgatcgaccagaagggccgctttgagcgtcaggtcgcgctgcgcgccgcaggcgacgaggaagcgggcatgatggacgaggacttcatcaacgcgctggagtacggcatgcctcccacgggcggcatgggcatgggcatcgaccgtctggtcatgttcctcaccgacgccgcttccatccgcgatgtcctgctgttcccgacaatgaagccgctggactaaaaagtctagatataccgtcacttttggacattgtgggattggtttgacaccaatttgacaccaaacatgggtaaaaaggcttgattaaaaaagcagaaagttattcttctacgaatggctttctgctttttttattttggacgaatttaagtgggtattgtccttgtagaaggttaaaaagtgcattataggtgtgttatttcaccgtctcgacaccgaaaacaagtgccggatgccgaacaattccaatgctgccggaagttcggcaagcactagacgatgagatctctgccgttcaccatgaaaacggcgaggaaaagctccatctgctgatggtcgatcctcacatcccggcaggtgcaaagctgtactaagcacccgaaaaacgcatcagaaagcctgtccgatgcgcaatccaatagaaagcagccccgcagaagcaactctgcggggctttagactgtcgaaaagccatcgtttttccgacaatctgtgtttttcccggaagcggactttatcgccggactgccagccgcgcggcagtcctctactgcgggatcagccagatgccgcgaacctgttttgcgccctttatcctgccctccgcgcagcggcggcgcagctcctcagcctcgatgtgccacaggcgcgatgcgtcgtgtatggtcagaaaacgcttctcttccatcgtgtcctcctccctcctgcgttcagcatctctttttttcgtattatacacgctctgccgccgtttatacctgatacggcggccttgttttttcgcctgcggcaattccgctcttttctttttcccgtttttcctttataatgacagtacaagcgtaaatacaaggctgtacccgaacggtacagacgaataccggagggagtaatgttatgtcagtgcaggaaatttgccgcgttgcggaaaatacgcagcttggcgacggtttatttttgatggtgctgcacgcaccgaagatcacggagctggcgcagtgcggccagttcgttcacattgcctgcggcgagggtcatctgctgcgccgcccgatctcgatctgtgcatggaaggcgcccgagcttcgcatcgtctttcaggtgaagggcgagggcacgaagtggctcagcgagcgcagaaccggcgacgagctcgatgtgctcggcccgctcggccacggctttgacgtcggcgcgctcggcagcgctccggtgttcatcggcggcggcatcggcgtgccccccatgctcggctgcgtgcgcgaggcagtaaagcagggcgcaaagcctgcggctatcctcggcttccgcaatcagagcgccgttatccttgagggcgacttccgtgacgaatgcgagaccttcgtcacgaccgacgacggctcctatgcccgccacggctttgtcaccgatgtgctgaaggagcagatcgcctccgcttccggcgtcgcggcctgcggcccgaagcccatgctgaaggccatcgccgccatcgcgaagcaggccggcgttccctgccaggtttccatggaggagcgcatgggctgcggcatcggcgcgtgcctcgtctgtgcgtgcgcgctcaaagcgaaggacggcgaaacccgttacggtcacgtctgcaaggacggtccggtattcaatgctgaggaggtcgagtggtaatggctgatttaagagtaaatttctgcggcgtggagctgaaaaaccccatcacgaccgcatccggcacgttcggcttcggccatgaatacggcgagttcttcgacctgtcccaactcggcggcatcggcgtcaagggtctgaccccgaccgagcgcctcggcaaccccgcgccgcgcatcgcggagaccccgcagggcatcctcaactgcgtcggcctgcagaacccgggcatcgaccgcttcatcaaggagcagatcccgttcctgcgtcagtacgacacgaagatcatcgccaacgtctcgggcaacacggtcgaggaatacgagggcatggtcgaaaagatctcggacgcggacgtcgatctcatcgagatgaacatctcctgcccgaacgtaaaatgcggtggcatggccttcggcacgcagccgaaaatggtcgaggaggtcgtttcggcggcaaaggccaaggcgaaaaagccgctcatcgtcaagctctccccgaacgtgaccgacattgccgagatcgcacgcgcggccgagtctgccggcgcggacgcgctctcgctcatcaacaccctgctcggcatgcgcatcgacatcgaaaagcgccgtccgatcctgtccaatgtcatgggcggcctgtccggcccggcggtgttcccggtcgcggtccgcatggtctatcaggtgcgccgcgcggtctccgtgcccatcctcggcatgggcggcatccgcaccggccgcgacatcgtggaaatgctgctcgcgggcgcggacgcggtcgccatgggcaccgtgatgttcaacgaccccaccgctcccgtcaaggcgctgcgcgagcttgaggaatggatggacgcacacggcgtcaagagcgtttccgagctgtccggcgcggtcgaggtcggctgatggcggcgacggtctacatcatccgtcacgccgaggccgagggcaacatctaccgccgctgccacggactgtatgacagcctgctcacgccgcgcgcatatcagcagctcccctgccttgcgaagcgctttgaaagcgttcccctcgcggcggtctacgcctcccccctgttccgcgcacgcacaaccgcgcaggcggtcgcagcgccgcacggtctgacagtcgagctgcggaatgctctgcacgagatcgacatgggcgactgggaggatctcccgtgggccgagctgccgcacggctggcctgaccagtacgcgaaatggtgcgcccgtccgtgggaagctgcgccgccgcacggcgagaccgtcatgcaggcaggcgcgcgcatgctgaacgaggtgcgccgccttgcgcaggaaaacgacggcaaagccatcgcggtcgtcacgcacggctccgccatccgcggcgcgctgaccatcgcgcacggctttccgcccgaaaagatgaacgagatcggctggggcgacaacacctgcgtggcacggctcgattttgccgacgacgacagtatcgacgttgtatacgaaaacgacgcctctcatctgccgcaggagctttcgaccttcgcctgcatcggctggaagaacgccaaaggcatcccggtctcgccgcagatttggttccgccgcgccgacccgaacaatccacaggatgtggataagatcgtggaattcatgcgcgagctgcaccgcaatgcctacggcacggacgagggacttgacccggccgcgctcctccgcgatgtggagcgcgcgcagcaggtatcgccgcgctcgtgcacgttcggtctgctcgaggacggaacgcccgccgcgctcgtctacctcaagacctggtacgacgaggagccggacgtcggtctgctcggcggcttctgcatcagcagcgaataccgcggctgcggtctgagcgcacagatcctcggtcaggccatcagcgtataccgctcgctcggaaagacctggctgtgtgcccatgtagccgaaaaaaacctgcgcgcgcagggcttttatcacaaattcgccttcgagcagcgcggcgagcaccgcgatgcgaacggcctgcactaccgcatgttcaagcgcctgacggcggaataatccgccttgacaaagccgcctcgccgttatacactttatctgaataaaattagcaacaggggggcacccactcatgtttgataccgtactcgttgccggactcggtctgatgggcggctcgatggcgaaaaccatcaaggcgcgcacgctcagccgcgttctcggctggaaccgcacccgcgcgaccgcagaacaggctctcgctgacggctcgatcgacgccatcgcgaccgacgcactgttccgcgaggtcgatcttgtcattatcggcctttatccgcaggcaaccgtggactggctgcttgaaaatatgccgaaaatgaaaaagggctgcgtgatcgtcgatatggtcggtgtcaagcagttcatggtcgagcatctcgagcaggccgcgctcgacgcaggcgtgcactacgtcggcggacatccgatggccggtcgcgagttctccggccttgactacgcccttcccacgctgttcgacggcgcaagcatgatctttgtgccgacaaggagcagcagcgagcgcatcctgtcgcagctcgaggcgtatttcatgtcgctcggcttcggccagaccgtgcgctgcacggccgagcagcatgaccacatgatcgccttcacctcgcagctcgcgcacgtcgtttcctcggcctacatcaagagccccgaggccgacaagcacaacggctactccgccggcagctacaaggacctcacgcgcgtcgcgaagctgaacgaaaccatgtggagcgagctgttcctgtgcaatgccgagccgctcgcgtgcgagatcgacgagatcatcaggcaccttgacgaataccgccgcgtcatccgcgccggcgaccgtcaaacgctcaccgagctgctgcgcgagggacgcattcgaaaagagaatctcggctgatttgtcgcaaaactctgttttgcgacaagatgtgttttgacttcgcaaaacacgaacggataaaagttcctgttcgaaacttttatctctctcaaagtataaaaaccgtgatacatgctcccggtttttatcaatctgctccgcagattgtattttatacgcgctgccgcgcggtaatcgaaaactccttcgtattttctgcgggggagtttgcttttttgcacggattttcccggttttgccgtgtaaatctttacatgacaaaccgtctgttatggtgtatactatattaagcataatcataatataaatatctgtcgatttatcataaaaaggagtatttcatgccgaaattaggacttatttcgctcggctgcgccaaaaatctggtggacagcgagcatatgctctccctgatgcgcgacgcgggctgggagatcacggaggatatgagcgaggcggacgtcggcgtggtcaacacctgcggcttcatcgaagcggcaaagaccgaagccatcgagaccatcctcgagaccgcgcagtacaagcagaccggcagcatgaagggtctggtcgtgaccggctgtctggtgcagcgctacgcggacgaaatgcgcagcgagctgcccgaaatcgacgttctctgcggcaccggcagctacgacaacatcgtagacgcggcgaacgcggcgctcaagggtcagcaggcggcctacatggccgatatgaccgcagcggcgctcgacggcggccgcagccgtctgaccccgtcctacaccgcttatttcaaaatcgcagagggctgctcgaacacctgcgcctactgcatcatccccaagctgcgcggacgctaccgcagccgcgagatggcgtctctgctcgaggaggcgcgtgcgctgagcgatgcaggcgtaaaggagctcatcgtcatcgcgcaggacatcaccaagtacggcatggacctgccggagcacaagcgcctgctccccgagctgctgcgcgagctgtgcaaaatggatttcacatggatccgtctgcactacctctaccccgaccagatcaccgacgagctcatcgacgtcatcgctgaggagccgaagatcgtaaaatacctcgatattccgctccagcacgtttctaagcgcatcctgcgcgcgatgcaccgtccgggcgacggtgcggagttcaccgccctcatcgaggatatgcgccgccgcatcccgggtctcgtgctgcgcacgagcctgatcgtcggcctgcccggcgagaccgatgatgaattcgctgagctgtgcgaatttctccagaatgccgccatcgagcgcgtcggcgtgttcgaatactcgcccgaggagggcacggaagccgccgaaatgcccgaccagatcgacgccgagaccaagcagaaccgccgtctcatcgtcgaggagcttcagtccggcgtactcgacgactataacacctcgcgtcacggcgaggtcatgcaggtgctcgtcgagggcttcgacgatgagcagcagctgtggtacggccgcacctatgcggactcggtcgaggtagacggccacgtttacttcgacgcgatggacaccgagcccggcgaaggtgaattcgtttccgttctcatcaccgagagccttggccccgacctgctcggcgtccgccagaaggaggcataacatatgactaccgctaacaagatcacgctcacccgcatcgcgatgatcccgtttttcatctatttcgcggcgcagcccatgctgatcatcgacagggggaactatatcgtttcgttcccgacctgcacagtcatcgcactcgtgctgttctgcgtcgcgtcgtttaccgactttctggacggctatgtcgcccgaaagtacaatcaggtaacggatttcggcaagtttgtcgatccgctcgcggacaagctgctcgtcgcctccgcgctcatcctgttcgttgagcagaaggccatggcaggctggatggtgtgcgtcatcctcgcgcgcgagctgatcatcacctcgcttcgcgtggttgcagccaacaagggcgttgttatggcggcgacctggaccggcaaggtcaagacctgcgtgcagatcggcggcatcatcgtcatttacctgcactatatcattttcggcgcgctggcaagccagcctaacacctccttcagcgcggtttttgctattcgcacggatggcgccgacctcatcctgaccatcgtcggctgggtggtaacgctcgtcaccatctactccggctatgattacctcaggaagaactgggacctcatcaaggacggcgcagtaaaggcaaagtgaacacgtttttcggggacggcttcggccgtcccttttgcttttcggcgcttttgtgacagaactttcctcgcgttcctcttttcgagtgattgactttcaccgcacgatatggtaaattaaatatatataccattcggatataataacagggcggctgtgaacgtttttcgcgcgctgcgcgacgccgcgccgcatcaccttttgagaggaagtggataccgtgaaaaattctaccaagctgaaagcgggtctgctgctgaccagtctggcctgtgccgctggtgcaacggctgccctggttttgcttcagaagaagcgtgaagaagaggtttatcatgaggccgagctcaaggccatggacgagctggaggaaatgatgcgcagcgagtccgactgtgcttcctgcgcctgcgcggaggaatgcccggcgcccgagacctatgccgctgcgaagaacgacgccgctgccgccgaaacgccggaggaggaatctgacggcaagccggacatcgagatcgaaatcgtggacggcgacgaggaaacggacgaagatgacgacgagccggaaaccgccggtctcgaggattgagacataaacgcagacgggcagagtacgctctgcccgttttatttcaggaggaaacactatgtttgaatatgagggccgcgtattccgtccgccttccgaggcgtacagcctgatcgttcaggtcacgatcggatgcagccacaataaatgcacattctgcgatatgtacaaggaaaagcgcttccgcgtgcgcaagctcgaggacgtcaaggcggatttcgacgaggcgcgccgcatgtaccgccgcgttgaccgcattttccttgccgacggcgacgcgctgatgtgccgccccgagcatatggcggagatcctgcgctatatcaaaaagctgttccccgagtgcgagcgcgtcacgagctacggctccccagcgtccatcctgtgcaaaaagcaggaggatcttaacctgctgcacgagctcggcctcgagatgatctatttgggactggaatccggctcggacgaggtactgcgccgcgtcaacaagggcgagaccgccgacgagatcgtccgcgccggtctgatggtcaaggaggccggcatgaagctgtccgtcacctgcatcgccggtctcggctcgctcgagctctccgaggagcacgccgtcaagaccgccgaggcgctctcccgcatgaagccggagtacatcggcctgctgacgctgctgttcgagctgccgacaccgctcatgcgcgactggcaggaaggccgcttctatctgatgaacccgatcgagatcgcgcacgaaacgctcatccttctcgagcatatcgactccgagggcagcattttccgtgcaaaccacgcctccaactacgtcaacctcgccggcacgctcaaccgcgaccgcgacgcgatgtgtcagcgcctgcggcaggcgctcgagggcaaggtcaagttccgcagcgaatccttccgtgcaagataaccaaccgaaaacgttttcgtttgtgtgattcgtgtaaattgtgaatcttttgtgttttttgtgttacaatttcagaaaaagcaggacaggatagcttttttatgctatactgttcctgttgtaaagttcaagtctgtacacgcactgcgcgttaagaatttgttaaggcgttcgccttaggaaccgttccgtctggaggattgttgatggattccgtatctcatattcgtgtcgcaaatctgcttatggattatgtcgagcagacttgcggcgtaacctttgacccgagcggcttcgtctacggtaatttgaagcccgacctcaccggcacctacctcaccaagcgccacaatccgtcgatcatgatggacgaagtgatggataaaatccgtgcctttgcagaaaagtacacgatcgctcccacgaacggccgcgagctgtcggtcgatctcggcgagatctgccactacatgaccgatttctttacctatccgcacaacgatgacatctacacgcacaacctgttcgcgcactatgtctacgaaaagcgtgtcgcgttcgtgatccgccgccgcatgaccgaggcgaagttcgagcagtgggtcaacccgatcatcccgccgacgagcgtggatgctctgctgaaccgcatcaccgatatgcacgacgcttaccgcgctgcgggccgccatcacggcattgacgacgatctggtgcatatctgccgcgcgactgcaaccgtcgtgctctccatcatcagcatcgtttacgagcaggtcgaggagaccgctcccgcgctcgcataaagctcctctgcgccctgtaaaagaccgcaaaaatgcggtctttttttcgttttgacacggcctttcttgcccttttgcacaaatttatcattttatcaagaaaaactgcatcggggtcttgtcaagccagcgaataccagataaaatagtatataattgcaggctcaaaaatccaatcctgcataactgggggaaaataaatatggatatcacggcaactgtatggacgcttctgcctccgatcatcgcgatcgcgctggcgctcatcaccaaagaggtctactcctcactgctgatcggtattctggcaggcgcactgctgtataccggcttcaatccgctccatgcggtcgaaacgaccttcgagatcatgggcggcaaactcggcggcaacatcaacatctgcatcttcctggtgctgcttggcattctggtgtcgctcgtcacaaaatcgggcgcgtcacgcgcctacggcgaatgggcggtcaagaccatcaaatcgcgccgcggcgcctccttcgcaacgtcctttctcggcatcttcatctttgtcgacgactatttcaactgcctgaccgtcggcacggtcatgcgtcctgtcaccgacaaatacaacatcacccgcgcaaagctcgcctacatcatcgacgcgacggcggctccggtctgtatcatcgccccgatctcctcgtgggcggcggcggtcggctcctccctgcctgagtcgagcacgatggacggcttctcgctgttcatgaagaccattccgatgaacctttacgccatcctgacgctgattttcctcgtctggctgatggcggcggacttcgatttttccgctatgggcaagtatgagcgcgagcacaagaacgacgacctgtctcagctcgaggagaactacgttgtcggcggcgcaggcaaggtctacgaccttatcctcccgatcgcggtgctgatcgtgctgtgcatcggcgcgatgctgtacaccggcggcattctcgagggcgcgaacatcatcgacgctttcgcgaactgctcgtcctcgaccgctctggttctcggctcgttcttcacgctcgtattcaccttcctgctgtacattccgcgcaaggtcctgtccttcggccagttctgcgaggcgttcaccgagggcttcaagtccatggtgccggccatcctgatcctgacgctcgcgtggacgctgtccggcgtatgctcggctgactacctcaacatcggcggcttcgtttcctcgatcgtcagcgcggactcggttatctccatgctgatgccggcgatcttcttcctcatcgcgctcggtctcgcgttcgcgaccggcacgagctggggcacgttcggcatccttatcccgatcgccgtcgcggtattcggcgacagcgcgaccaccatgcttgtcatgaccgttgcggcctgcctgtccggcgcagtctgcggcgaccacatctccccgatttcggacaccacgatcctggcgtccgcaggcgcacagtgccaccacatcgaccacgtttccacgcagcttccctatgcgctgctcgttgcggcgatgagcttcgtcggcttccttgtcggcggcgtcaccggcagcggcgtgatcgctctcattgtcggtctggtcctgctcgcgctcactatcttcgtcatctccgccaagcacaaaaaggcggcgaactaaaaagtctgcggcttttggctgcacaacaaacccaaacggctctctcctgtcacaggagggagcctgttgtctgaaaagcgaaagaaggcatcccattttgatcactgatttgaccgaaggcagtccatcgaaaaagctgttctggttctccatgccgctcctgctgagcgttgcattccagcagctgtaccagatggcggactccatgatcgtcggccgttttgccgagtcggcacaggccggtgagcttgcgctcgccgccgtcggcgcaagttatccgatcacgcagctgttcgttgctgttgcgacaggcatcaacatcggcacctccgtcctcgtctcgcagttgttcggcgcgaagcgctacctgcgcatgaagaccgcgatctcgaccgccctgatcaccacgaccgtcgtctcgctgctgctgacgctgttcggcgcggtctgcaccaacggtctgatgagtgcgctcaacacctcggcggatattttcgcggacgcctcgctctatctgcgcgtgtatgtgttcggtctgctgttcctgttcatctacaacgtgtgcaccggcattttcaacgccatgggcgacagccggacgccgctgttcctgctcatcctgtcctcggtcggcaacgtcattctcgacgtcgtattcgttgccatactgcactggggcgttgcaggcgttgcctgggcgacctttatcgcgcagggcgcatcgggcgtgttcgccttcttcctgctcatgtgccgcgtgcgcacctttgacaccggtcatcatttcatcctgttcgcacccgaaatgctgcgccgtctgaccaactacgctatcccctccatcgcgcagcagagcttcgtctcggtcggcaacctcatcattcagtattacgtcaacctgtgcggcccgactgtcatcgccggtttctcggtcgcaaaccgcatcaatatgtttgcgctgacctgctgcatgtcgtttgcgtccggtctgtcgagctacgtcgcacagaacatcggcgcgcgcaagctcgaccgtgtcggccccggcctcaaggccggcggaacgttctcggtcggtctcggcatcgtgttcatgatgatctatctgccgctcgcaaaccgtatcatcagcctgttcctgcctgccggcagcgcatcgggggttgtggatgtcgcccgcggctatctgttcaccgtcgtgccgttctacgtcgtcgtctgcatcaaattcgtctgcgacagcgtgctgcgcggcgcaggcgcgatgcgtccgttcatgataacgacgttctccgaccttatcctgcgcgttgtcctgtccatcgccctgttctacgtcatcggcaacgagcacggcatctggatgagctggccgatcggctggttcctcggctcgggtctgtccgtgttcttctacaagaccggcgcatggcgcaaggatctgcccacgctgtaactgtcgaaaaacgctttatcctccatcgaaagatggaggatttttttgtcggtaatatccatctttgcgctggcagcgcgttagtttcgcgacagtctcttgcatcacagagcaaaaaagggtatactgatactatctgaacatctggaggaaatccgaatatgcgagatggatttatcaaaatcgccgccgcgacgcccgacctgcacgttgcggactgcgaatataacgccgcggagatcgtaaagctggccaagcaggccgctgccaagggcgcgaagctcatcacgttccccgagctgtgcctgaccggttacacctgcggcgacctgtttttgcaggaaacgctgctcgagggtgcgatgcaggcgctcggtaccgtctgccgcgagaccgcagagcttgcggctgtcatcgtagtcggtctgccgctgcgcgtcaagggcaagctgtataacgttgcggctgttgtgaacgcaggcgacgttctggcgttcgtcccgaaaacctacattccgaactattccgaattctacgagcagcgccattttgtctccgccgatacgctcagcggtatggaaaacgtgctgatcaaggctgcggacggcgagccgtgctgggttccgctcgtcaccgataccatttttcagtgcgatgagcagccgctgttcaccttcggcgtagaaatttgcgaggatctgtgggtgccgaatccgccgtctactacgctggcgcagatgggcgcgcatattatcgtcaacctgtccgcatcggatgagatcatcggcaaggcgggctatcgccgcgacctcgtgcgccagcagtccggccggctgctgtgtgcgtacctgtatgcggatgccggcttcggcgagtccacgcaggaccttgttttcgcgggtcacgacctcatcgcggagaacggtgcactgcttgccgagagcaaaatgtttgagcagggcatcatttacgcggatatcgaccttcagcgcctcgcccacgagcgtcagcgcatgaacacgttcaccgcagttgagggcggcgagttctcgttctcgcttgagccggtcgaaaacgacctcgccgaccgcagtttcccgcgtacgccgttcgttccggcgaacaaggcgctccgcgacgagcgctgcgaggaaattttgacgctgcaggcgaccggtctggcgacccgtctgcgccacacacacgccaagacggcggtcgtcggcctgtccggcggcctggattccacgctggctctcattgtgctcgtacatgcgtttgatatgctcgaactcgaccgcaagggcattctggccgtcacgatgccgtgcttcggcacgaccgcccgcaccaaaggcaacgccgaaaagctcgctgaggcctacggcgtgacgctcgagaccgtggacatcaaggcggcggtcgatcagcatttcatggacatcggtcagtccaaggacgatctttccgtcacgttcgagaacggtcaggcgcgcatgcgcacgctggtgctgatgaacctcgccaacaagaacggcggcatggtcatcggcaccggcgacctgtccgagctggcgctcggctgggcgacttacaacggcgaccacatgagtatgtacggcgttaacggttcgattcccaagacgctcgtgcgctatctcgtcgcatacgaggctgaccgcgtgcagggcgagctgtccgatgtgctgcgcgacgtactcgacacgccggtctcgcccgagctgctgccccccaaggacggcgagatcagccagaagaccgaggatctggtcggcccctacgagctgcacgacttcttcctgtactatatgctgcgcttcggctatccgccgcgcaagatctaccgcgccgcaaggaaaacctttgcgggcgtgtacgatgacgcgaccatcaaaaaatggctcacgaccttcgtccgccgctttttcacgcagcagttcaagcgctcctgcctgcccgacggccccaaggtcggcacggtcacgctctcgccgcgcggcgactggagaatgccgtctgacgcggtctccgcgctgtggctgcgcgaggcggaaaatctctgacagcaaaaggagagactgtccttttgaaaagcttacttcgcggcgcagcgacgctgctcacggcggcgctgctgtgcttcaacctgttctatgagcttgcgccgaacctcgttgtcggtccggaaaagaagctcgtgttcgcggcggcgtttgcggtcctgctgcgcattgcgctgttctgcggcatcccggaggcgcagcggcagcgccgcagacggctgtatatgcagctgctgctctactattatatgtgggtgctcgcaaatgtgctgttcttcgacaacgccttcggccgcggctttacggcgcacgcaacgctcgaggcggtcaatctggagccgctgcgcaccatcaggaattatctgctggcctacggctacgggaatatctcgctgcggctggtcattctcaatctcgccggaaacctcatcgcgttcgcgccgatgggcgtgttcctgcccgccgtattccgctggcagcgcagcatcttcttcttcaccgcgacgctgacgctcgccatcacggcggtcgaggtcgcgcaggtctacacgggcaccggctcgtgcgacatcgacgacctcatcctcaacctcgccggcgcgctcatcgtctatatcatctgtcgcatcacgcccctctggaagcgtatatgcagcgttaccccgcgccccaaaaaggaataaaaacgcaaaaagaccatcgtcccggtttcgcgccggtaaacgatggtcttttcctgtcggtctcgcgacaggataataaaaaaagatgcagagcgtttccactctgcatctcttaaaattcaagcgataaaactcaaattacttgagctcaaccttagcgcctgcagcctcgagcttctccttgatctcgttagcctcagcctccggagcagcctccttgatggtctgcggagcggtgtcaaccttctccttagcttccttcaggcccaggccggtgatctcgcgaacaaccttgataacaccgatcttagaggagccagcgtcaaccagaacgacgtcgaagtcggtcttagcctcagcagcagcagcaccgtcaccagcagcagcgccaccagcaacagcaacgggcgtagcggatacgccgaattcttcctcgagagcctttaccagctcagagagctccataaccttgagctcttttacagcttccataatctcagcaacagtcatgggataaacctccatttaagttatttttaaaatttaatgtgttttgctgtcctgtttgacagctttggggacaggaattactccgcagcttcttcagcagcagcttccttcggggctaccaactcggcaaccttcatctcctcattaccctctgccttcttaacgatagcatcgcaagcaatagcaagctgcataatggggaagttgaagctgtacagaacctgagcgataaggacttccttgctcggcatagctgcaagcttcttgacctcgtcctcaccgattaccttaccttccaggtaaccagccttgaggttgaagttctcatgggtcttcgcaaaatcagcgaggatcttagcgggtgcgacaacgtcgtcagtggtggagatagccagcgcggtagtaccgtgcaggttctcgtcccagtcaaagcccagctccttcgctgcaaagcggatcagggtattcttgatgacagcatactcaacgccagcttcacgaagctgcttgcggagcttggtatcatcctcaacgttgatgcccttgtaatcgaccagtacgccagcgggagaattcttgatcttctcaaccagggacgcaactacggccttcttctcttccagaacctttgcattcggcatcattttcacctcctatgaaataaaagtaccctcccggcgcaaagacacaggagggtacacagaaaacatcgtaacgatgcaatatacatttccatgttgacctcggcgggcggcgaaaacgccatttaaaaccttgcggctgccagctgtctttgaccaagctcatttagtataaccgataaaaaagcatttgtcaacctgttttttcgaaaaatcgaaattttttatttgccgagctcgtaggcgcgcgcggtgcacttatcgcaggcctccgcgaccatgccgtacaggtcgcgctcctcgagcacctgcatgccggcgagcgttgtgccgccgggcgagcagactgcgcggatcagctccgccggggtcttttcgccctgcatgagcatcttcgccgcgccgatcatggtctggcagaacatctggagcgcgtcctgctcgtcgatgccgtgcttctttgcgctctgcaccatcgcgtccgcataggcgtagatataggccggggccgagccggcatacgggatcgcctcatttatcatgtcttccttatcaaataccgtcgtcacgcccatcttgtcgaacagactgcgcacggcggcgagctgcttttcgctcgcggcggcgttcctgaccagctgcgtcgcgcccacgccgagcatgagcggcgtattcggcatcgcgcggatgatcggggtatctgcgccgagcgccgcctcgatcttcgcaaacgaaatgcctgcggcgatcgacagcacgagcggcttgctgcacgtgcacgcagcgagctgcggcagcacctcagcaaagttctgcggcttgaccgacagcagcacggtatcgcacgcggtgtagacctcggtgaagtcgccggtcacggcgtagccttcggccgcgttcgccgcacgcttttcctcgctgcggttgaacagcagcacctcgtccgggcggaacagaccggcccgtaccgcaccggcggcgatggtcttgcccatgctgcctgctccgagaacgccgaaacggtaagttttcatatccatgcacactccttataacagacaaatcgttttcaatgctgtgattatagcacaaagcgcccctgtctgcaacgcgcgctttatttttctatggactttcggggttttcctgtctttttttatttcaggtgttggtttttgcggaataatgtgatataataaaaataatttttatggcgacgcacgagattcggatatgcgccgcttttctgttgcaccgtgcagacggtgcgattgccgcggcgggagcatcttctgtcgtgcacaggccggaaatccggctaaaaaagagaagtatatcaggagaggataacaaactatggaaaaacaagagagaagcagtttctccagccgcgtcggctttgttctggcggcggcgggatcggctgtcggtctgggcaatctctggcgcttcccgtatctggcggcgcgttacggcggcggtatctttctgctcgtgtatctgattttagtcgtgaccttcggcttttcgctgatgatcaccgagttcgcgatcggccgcaagaccaagctgtcgtgcatcggcgcctacggcgcactcgacaagcgctttagctttctcggctggatcgcagcctttgtcccgctcatcatcaccccgtattactgtgtcatcggcggctgggtcatgaagtacctgtggacgttcctttcgggcggtgcgctcgaggcagcggacaacggcggctttttcagccgcttcatcagcttcgacgccggttcgctcccggcgaccatgctgaacttcagcggcccgaccccgtggttcgtgctttttgtactcatcaccggtcttgtcgtcatcttcggcgtgcagaagggcatcgagaacgcaagccgcctcatgatgccggtgctcgccgttctgatcgtcgtcatcgcgctctattcgctgaccatcccgggcgctctggcaggcctcaagtactatctgatgccggatttctcgcagttctcggcctctaccgtgctcggcgcgtgcggccagatgttctactctatgtcgctcgcgatgggcatcacgatcacctacggctcgtatatgccgaaggagaacctgctcgagcattcggtcacgcagatcgagatcttcgacacgctgttcgcattcttcgccggtctgatgattattccgtcggtcatcgcgttcaacggcggcgacccgtctcaggtcaacagcggcccgagcctgatgttcatctcgctgccgatggtattcgattcgatgaagttcggcacggtcatcggcgcggtgttcttcctgctcgtcctgttcgcggcgctgacctcctccatcgcgctgatggagacgctcgcgtcggtcatcatggacaagttcaagctcaagcgcattccggcaacgctcatcatcatcgcggtctgtctggtcgtcggcatgctgtcctgcctcggctacggcccgtgggagagcgtcacgatcatcggcatgcagttccttgatttcttcgactttatctcgaactcggtgctcatgcccatcgttgccgtgctgacctgcgtgctgatcggccatgtcgtcggcaccaaggtcgtcgcagacgaggtcaagtcgggcgcaggctcgttccaccgcgaaaagctacaccgcgtcatgatccgctggatcgcgccggtcctgctggtcgctatccttgcttccgagcttgcgagcaagatctttggcgtattcagcatataacctttattataagcat

SEQ ID NO: 12870 - DNA, 145 bp, Unknown
  gut microbiota DNA sequence
tgtaagcacagattcaactgcttattggtcatgcctaccgcttgcagtacaccgtattcctgcttcttcgtgatgatattgatgatcatggtgtttgccagattcataaacccaatgagaccgacaattgccatgaacagatagc

SEQ ID NO: 12871 - DNA, 534 bp, Unknown
  gut microbiota DNA sequence
tgaacggaacaaaatttccggttgcaatcgtaaatcaagaggattttgaaatgatgcgcggggatggcgatatcggttccatggactatgcacaggctgtcaaaaacggggatgttttctttggctggtccatgtggatggaagctgacgggtattctgcgggtgcaccgattacattcaactttgataacggaagcggaacctatacctatcatggaaaaatcgcaggctcctttgtaagcgcggacacttatctggtcattccggaagaagtataccgctctgtaaatccgaaagggacatcttatggatacctgtgggtggattgtgctaaaaaagatgtggcatctgtagagcaaagcctgaatgacctgctctccgatacttctcatatcaagctgaacacctatcacgcagaattgcaaaccgcagaatacgcaagccgtatgatgaagcttggctgctatctgttcatggcaattgtcggtctcattgggtttatgaatctggcaaacaccatgatcatcaatatca

SEQ ID NO: 12872 - DNA, 1094 bp, Unknown
  gut microbiota DNA sequence
agatcctgtttctggagctgggcgtgggccgcatgacacccatgttcattcaggagcctttctggaacctgaccctcagttttccccgtgctcgatatattgcgatcaacaacaaatatgattttctgcccaaggagctggagaacaagggcatgaccattgtggccgacattgctcaagtgctgcgggatgcacgggacaccatggaaagcggagataacgatcatgaatcagaccgacaaaaaagtcctgctgttggaacttggcgtgggtgagatgacacccagtatcatcaaactacctttctgggaacttactgccaaaaacgaaaacgtcttttatgcctgtcttaatcaagaggcatctcacaggccggagcatctgcggggacgcagcctgtatctgcaaggagatttggcggaaactctatccgccctccggcaggagcgagccatcgcagcaaccataaaatagaaaggacgaacgaatatgatcgattggaactctattgcggaaaaattcagagaagcggatgctatcttgatcggggccagtaacggactgtccatcaccgagggactgcatttgtttgcggacaatgcagcctttgacgaattgtttggagatttcaaacaaaaatacggattgcgctgcattttgcagggcatgatggccggatggcccagcgaggaggaaaagtgggccttctgggctcggctcgtccatcattactgcggacagtaccggcctacgccggtgatgaacgatttgaaggccattgtaggagaaaaagattactttgtcgtcacatcaaacggagaaggtcactttgaactgtgtggcttcgatccgacgaaaatctatgagatcgagggcaactggtttacgatgcagtgtgcccgcccctgccacgacaccctctatcccagtctggaggtggccgaaaaattatcggctgtcggacagggcggccatgtgcctgcagagctggtgccgcgctgtcccaggtgcggcggtcccatggacatccacatgggcgcgggtcagagaatgattctggataccgcagctcgggcacggctccaaaactttct

SEQ ID NO: 12873 - DNA, 26724 bp, Unknown
  gut microbiota DNA sequence
cctgcggcatgactgcttgaaataggttttgctttgcaaaaccgtaaaaaccgggggcgtgtacctcggtttttatactctgagagggagaaagtttccgtatgggaactttcggacgtttgcgttttgcggcgcgtagcgctgtcaaaacactgcttgtcggccggacgaagtccggcgacagcatagttcacggaacagacatggagtgtttacgatttcttcaaaattctatcatactttagacatgaaaaaccggtatcatagaatcacagcaagggaatgaaacaatcccctttgaaaatagatatttcatgggaaattcttttctgaggtgcttttagagtgccgaccattaaaatctgttcggccctgtgggacggaataccgcgcaggctcccggacagtccaaacataagaagcgttttctccccctttcgcttcctttcagatagatgggcctgccgaagtctccgtaaggttcggcaggccggtgcgcatcgagagatgtgcatttttttgtcttgaaaagacgaacatttgtgctatactaaaaggggcgtttcctgcggcgccggcgtcggatttttcggcaaggacggcggcatcccgcgcagcagcggaatgaatgttgcaaaaaacgcaggaatagcgtataatatataagttatggatttcagaacttcaaataggggttagagtatatgagtaaagcaaagccgtcttacggcaacgacagtatatcctcgctgaagggcgcggaccgcgtgcgcaagcgcccgggcgtcattttcggctcggacggtctggagggctgcgagcacgcagtgttcgaaatcctctccaactccatcgacgaggcgcgcgagggctacggcaccgacatcacgactgtccgctatgcggacggctcgatcgaggtgtccgaccacggccgcggcatcccggtcgaatggaacgaaaaggaacagcgctacaactgggagctcgtgttctgcgagctgtacgcaggcggcaagtacaagaacgacaccggcgaaaactatgagttttcgctcggtctgaacggtctcggcacctgcgcgacgcagtattcctcggaatatatggacgtcaccatcgtgcgcgacgggttcgagtacggcctgcacttcgaaaaaggcgaaaacaggaccggcacaaaggaaggcttcacgaaaaagccgacgaacgccagaaagaccggcacgacgatccgatggaagcccgaccttgaggttttcaccgacatcaacatccctgtggattactacctcgatacgctcaagcgtcaggcagtcgtcaacagccacatcaaattcgtgctgaaaaatcaggtgagcggcagtaaattcgacaccaccgaattcctgtaccagaacggcatcgtggactatgtcggcgagctggcaggcgaaacgccgctgacctcggtgcagtttcttgagggcgagcggcgcggccgcgaccgcgcggacaaggcggaatacaaggtcaagctgtcctgtgcgttctgcttctcctcggcggtctcgcgcatcgaatactaccacaactcgtcgtggctcgagcacggcggcgcgccggacaaggcggtgcgctcggcgttcgtctccgccatcgacgcctacctcaagcagaacaacaagtacaacaagagcgagagcaaggtcacctatcaggacattttcgacagccttgtgctcgtgaccaactgcttctcgacccagacctcttacgagaaccagaccaagaaggccatcacgaacaggttcattcaggaggcgatgaccgagttcctcaaggagggactcgagatctacttcatcgagaacaagtctgaggcggacaagatcgctgagcagatcctgatcaacaagcgcagccgcgagcaggcggaaaaggcgcgtctcaacatcaaaaagaagctgtccggcaacatcgatctggcaaaccgcgtgcagaagttcgttgactgccgcacgaaggacgttacgcgccgcgagctgtacatcgtggagggcgactccgcgctcggctcggtcaagcagggccgcgacagcgaatttcaggcgatcatgcccgtgcgcggcaagatcctgaactgcctgaaggcggattacgacaagatcttcaagaacgacatcattaccgacctgctcaaggtcctcggctgcggcgtcgaggtgcgcggcaaggcggcgaaggatctgtcggcgttcgacctcgacagcctgcgctggcaccgcgttatcatctgcaccgatgccgatgtggacggcttccagatccgcacgctgatcctgaccatgatctaccgcctcgtcccgacgctcatcgagcagggctatgtctatatcgcggagtctccgctctacgagatcacctatcgtgacaagagctatttcgccttcgacgagaccgaaaaggcggctatcctcaaaaagctcgagggcaagaagatcctcatccagcgctccaagggtctgggcgagaaccaggcggacatgatgtgggagaccaccatgaaccctgaaacgcgccgcctcatccgcatcacgccggatgaagccgccgcaacgagcgagatgttcgacctgctgctcggagacaacctctccggccgcaaggaatacatcgcggagcacggcgcagactatctggagctggcggatatttcctaaggcaataccaccgcagctttcattgtgcggtgttgccctaagcatttcacagggggaaaacaatgcggtttcgacaaatggacggactgcgggcggcggcggcgctcgcggtcgtgatgatacacgtttcggcagggcagacgaccgacgcggagctggtctggaatcagctttcgcgctttgcggtgccgatgttcctcgtgctgaccggcttcggtcacgcaggtgcgctcgcggagggaaaattcgagccgcagggccggacggcagtgcgccgccgcctgtcgcgcgtgctgccggcgtattttctctggtcggcggcgtatctcgttctcgaggcgctgtgcggcacgccgcacgcccatccgctcttcgatctgctgaccggcggcgcgtatgtccatctgtattacatattcatccttgtgcagtttgttctgctggcggatttcttctgtatcgcgatgcagaggcatccgcggcggttgatgctgtgtgcggcggccgcgacgttcggcatgcagctgctgctcgcgtgtcaggcgaacggcatgctgatgtttcacgcgccgctttcgctggtccgcctctttttcggctggacgctgttctatacgggcggcatctggctgcgcctgcacgagaaatggcagcgctgcccgctctgcgtgagcgtgccggtgtggctgctctcggcgctcggggtgctgctgacaaaccatatgttcccctcgctcagcgcatcctcgctgcgtcccgaccttctggtctacgtctttgcgacgtggctcatgctgtggacgctgtgcagccggtgccggacgcttccggcgcccgtgcgctttatcgcccggcattccttcggcctgtacctcgctcatcccatggtgctgcgcctgtggaacgtctggacgacccatcacgaccctgtcatttacctgcgcctgccgcagatgtatctgctggggttcggcggcggcctcgctgcggcggtgctgctgtccttcctgcctttcggtacgctgctcggccgcgctcaccggaaaaaacgatcccgaacaggagatttataaatggcaaaaaagaaaaatgatgaaccgaaagtatataaagagcatccctcggtagaccggcgcatcacggatacgctgcgcgagaactatatgccctacgcgatgagcgttatcgtgtcgcgcgccatcccggagatcgacggcttcaagccgtcccaccgcaagctgctctataccatgtataaaatgggtctgctgaacggcaaccgcacgaaatccgcgaatatcgtcggccagaccatgaagctcaatccgcacggcgacgcggcgatctatgagacgatggtgcgtctgacgcgcggcaacgaggcgctgctgacgccgtttgtcgactccaagggcaacttcggcaaggtctattcgcgcgatatggcctacgccgcgccgcgttacaccgaggccaagctcgacggcatctgcgccgagctgttccgcgacatcgacacggacgctgtggattttgtggataactatgacggcgagatgaaggagccgacgctgctgccgacgaccttcccgaacatcctcgtctccgccaacaccggcattgcggtcggcatggcgtccaacttctgcggcttcaacctcgaggaggtatgccgcacgacgatcgagtgcatcagaaacacggagcacgacatcctatcgactatgccggcgccggacttcacgaccggcggcgagctgatttatgacgagagtgagatgcgcgcgatctatgagagcggccgcggctcgttcaaggtgcgcgcgaaatggcagtacgacaagaaggaaaacctcatcgaggtcacggagatcccgtacaccaccacgatcgaggccatcattgacaagatcgcggagctggtcaagaccggcaaggtgcgcgagatcgcggatgtgcgcgacgagaccgaccttgccggcctcaagatcgccatcgacctcaagcgcggcaccgacccggaaaagctgatggcgcgtctgatgaagctgacgacgctccaggacagcttctcgtgcaacttcaacgtcctcatcggcggcatgccgcgcgtgctgggcgtacagcagattttagaggagtggacgtcgtggcgcacggaatgcgtccgccgccgcgtattctttgaactcggcaagaaaaaggacaagctgcatctgctgctcggtctgcgcaaaatcctgcttgacatcgacaaggcgatcgccatcatccgcggcaccgaggaggatgcgaaggtcatcccaaacctgatggaaggcttcgacatcgaccagatccaggccgagttcatcgcggacatccgcctgcgcaacatcaacaaggaatatatcctgaagcgcacgcaggagaccgaggcgctcgagaacgagatcaaaaagctcgaggagatcgtaaaatccaagacgaagatccggaatatcatcgtaaaggagctcgagcaggtcatcaaaaagtatccgtctgagcgcagaacgcgcatcgtgcgggcggacaaggtgaccgagttcgcggaagaggaccacatcgaggattatccggtacttctgttcatgacgcgcgagggctatttcaagaagatcacgccgcagtcgtggcgcatgtcgcaggatcacaagctcaaggagggcgatgaggtcgtctggagcatcgaggcgaccaacaagagcgagatcatcttcttcaccagcatgcagcaggcgtacaaggcgcgtctgtatgatttcgacgacagcaaggcgtccgttctgggcgattacctgccggcgaagctcggcatggatgagggagagacgccgctctacgcgctgctcccgggcgactacaagggcagcatggtcgtcgcgttccagaacggcaaggcggcgcgcttctcgctccagtcgttcgagaccaagaccaaccgccgccgcctgagcggcgcatattcggacaagtccccggccgtcggcttcttcttcccggtcgatgacgagaccgagatcaccatgttctcgaccgcaaaccgcgcgctgaccttccgcgcgggtatgctcgacatcaaggcgacgcgctcgacgcagggcgtgcagaccatggtgctgcgcggcaagcacaccgtgacccgcgcctgccgcacggaagacgcgaacctgcttgaccaggcgcgctaccgctgccgcagcatcccctccatcggcgcactgctgaccgaggatcagctgaaatttgaatgagactgccgcaaaggcataaaaggagagcacagatgaaaatctgtgctctgagactgtcgaaaaacttcgtttttccgacaatctgtgttttgactttgcaaaacacggacgtccgaaagttcccatacggaaactttctccctttcaaagtatcaaaaccgaggtacacgcccccggttttgatgcgtttacacagcaaacgctattcaatgcgcgctgccgcgcggcagtgcctggatcgtgaaaacggactttatcgacaaactgagagcacagatgaaaatctgtgctctcttggtatttatatggttttaaccgagcgcttcgatagcgttcataacgcgctcatgctcggcggcggtcgcgtcgaggagctgcggttcggtcagcggctgtccgccgcgcagatgctcggtcagagcggaagatgcgcggtagagtgcgtcgaagccgaggttctgtgcgacacccttgagggtgtgggcggcgcggaacgcgctctcccagtctgcggctgcgacggcctcgcgcagctgcgcaaagctcgggtcggcagggtacttgaggacgaagcggtgcaccagcgcctcgctcgtcagacgatggagggtatcctcgtagctgccgtcgatctgttcatagaattctttcagtgtcatttctcattgcctcctgtgttgatttgatattttaaggcagcgccgcacgataaaagctgcggcgctttgcggaaattttgtgttctgaccgtgcggcggcttcctggatcacgggaagccgtatctcgtcgatgcacaaaatctgctcccgggtcatttctgttcagggattgcagtgttgtcttaattgtaatatgaagggagtggagaagcaataggagaaatgaattttatggcgaaaaatgaaaacgcagtttttcgacagtctcttttcaacgccgtccggacatgatagaataaaaaagaaaaggagagatgcagcaatgacgcttcaaacgacgagactgcgccttcgcccgttccgggaggacgatgtgcaggcgatttacgataattccgccgcgcccgaggtgggcctgaacgcagggtggaagccgcacgagagcctgacggagtcgtatgatgtgctgcacctcatgttcctcgaccagccgacggtatgggcgatcgagcggcgcggggacgggcagctgatgggctcgatcggtctgatcgcggacagtgcgcggcagtacggctcagtgcgctcggtcggttattcgctcggcacggcgtactggggcaggggctatatgaccgaggcgcttcgcgcggtcacggaatacggctttgaaaggatgtcgctcgacctcatttctgcgacctgctacccggataatgcgcgctcgcgccgcgtgctcgaaaagtgcggttttgcgtatgagggcaggctgcaccgtgcggagctgctgtggaacggcgaggtgcgcgaccatctgcttttttatctgccgcacgaagccttgcaggcaaatgcaaaataaaacttacatttttctgcgaaatgtgctataattataacagacagaatgttattttgcgttgctgcgaggaggtttatcatgtatcaagcgggggactatatcgtttacggtacgagcggcgtgtgccgcgtggacgaggtcaagccgtcgcccttcgaggatgaagcggatcggcagtattacacgctgacgcccgttacgggcacggagaccatctatattccggtggactcgccggttttcatgcgcccggtcatctcgagggagcaggctgagacgcttgtgcgtgatattccgaatatcgaggtcgaccatttcacgagccacagcatgcgtctgtcgagcgagcactatcaggaggtactgcagagccatgactgcggggatctggtgcagctcatcaagacggtctacgcaaagagcaggcgcagcggccgccggctgagtcaggtcgatcagcgttaccgcaagcgcgcggaggagctgctgcacggcgagctgtcggtggcgttggggattccgtttcacgaggttccggcgtacatagagagtgtgatcggcaagccggggaagaggacgaagaaggcggcgcatgccgcggaggcttcttccgcagaggaaaaagaataagcgccgccgtctggcgacggagaaggccggtgtctaccggcggagacaaaaggggcaaggacaccgaatggtttccttgcccctcttgacaccccgaatcttccttttgcgctgacacatcgaagatgtgcagcgaaacgggggacgcgggggcgcggttccgggcgtcggggtgattgtgggacgcatggccgccctgaatataccttgcgtgaaccgccgcgctgtcagtgcgcggccattcggtgcagggcgattgccccgccgcggcgaaaaaatagtgcaggggttttgctttgctgctgcgaatatgaaaagggactgccacaggcagtccctttctttgcgtaaaactgtagtttcgcgacagtttagatgctgatttccatgacctgatcgcgtgccgggccgacgccgagcatggtgatcgggcactcgatgatgcgctcgagctccttgatatatgcctgaacggtcgcgggcagctcgtcgaaggagcggcagttcgtgatgtcctcggtgaagccgtcgaattcctcataaaccggctcgcagtcaacgagatccatgaagttcgccgggaactcggtaacggtctcgccgttcttcagcttgtaggctacgcagaccttgagcttcggcaggccgcgcagcgggtcgatcttgttgatgacaacgtcggtcaggccgtttacgcggacagcgtagcgtgcaacgacagcgtcgaaccagccggtacggcgcggacggccggtaacggtaccgaactcgccgcctgcattgcggatatagtcgccggtctcatcgaacagctcggtcgggaacgggccttcgccgacacgggtggtgtaggacttgaagatgcccatgatcttgtcgatcgcggtcgggccgacacccgagccgatgcagcagccgcctgcgaccggatgggacgaggtgacatacggataggtgcccatgtcgaggtcgagcagggtgccctgtgcgccttcgaacagaacttccttgccggccttgacggcctcataggtcataacggtggtatcgcgtaccatcgggcgcagacgatctgcgtaggctctgtactcttcgatgatcgcgtctgcatcgagcggctcgccgccgtaaacgccggtgatcacgcggttcttgcgcgcgcaggtctcgcggatgacctcttcgaagcgctctgcgtcgatgaagtcgtgcatgcggatgccgctgcgctcggatttatccatgtaggtggggccgatgcccttcttggtggtgccgatggcggtgccttccttggccttctccgcctcgctcagcgcgtcaagctccagatgccacggcatgatgcagtggcagcgtgcgtcgatgaacagcttgtcggtcgaaacgcccttgtcgtgcaggccgtcgatctcgccgaggactgccttcgggttgacgacaacgcccggaccgatcacgtttacgcactccggatacaggatgccggacggaatgagctgtaatttgtacttttcgccgcctgcaacgacggtatggccggcattgttgccgccctggctgcgcacgacaagatcagccttgcctgcgaaaatatcaatgaacttgcccttgccttcgtcgccccactgagcgccgagaataaccttacctggcatgaggtttccttcctttctatatgggacgcagatttatcacgtcatacatgataaagtatagcatagaccacaagggttttcaacctgttttgcacgtttttgtcttgtaaaagacggcaccgcgttgtaaaatatttataacagaaggtgtgctgcgacacaggacggcgcacccggtaaggagttcgttttattatgcattatctggataacgcggcgacgacccgcgtactgcccgaggccgccgaagcggcagtgcacgcgatgctcgaggaattcggcaatccgtcgagcctgcaccgcatgggtctcgaggcgtcacatctgctcgaggacagccgcaaaacggttgcctctgcgctcggctgcctgcccgaggaagtctatttcaccgcctgcggcacggagagcacgaatatcagcctgcacggtgcggcgcatctcaaccgccacaaaaagggccgcatcatcgtgaccgagatcgagcacgccgcgaccatcaacaccgcaaagcagctcgcggacagcggctttgatgtggtattcctcgcgcccgacgagaccggccacatcacgcccgaggggctgagcgaagcgctgaccgaggacacgatcctgctgtcctgccagctggtcaacaacgagatcggcacggtgcagccggtcgagcagctcggaaagctgctcaaggcgaaggcacccaaggcgctgttccatattgatgccgtacagggtctctgccgcgtgcggctcacgccgaaaaaatggaactgcgatctgatgagcgtttccggtcacaagatcggcgcacccaagggcatcggtgcgctgtatgtgaaaaagggtctgcgcctgccgccgctcacgttcggcggcggtcaggagcgcggtatgcgcccgggtaccgaggccgtgccgaatattgccgcatttgccaaggcgtgcgaaatccgcatggcgcatttcgacgaggattacgcccatgtgcaggagctggccgactacctcaggcagcaggtcgcggctgagctgccggacgctgtaattaacggcgaaggcgatatcccgcatgtggtcaatctttccatgcccggctgcaagagcgaggtcatgctgcatgtactcgagggggacgaggtttacatttccagcggctcagcctgctccaagggcaagcagagcggtgtgctcaaggcgctcggtctgccgaaaacgcgcacggacagcgcactgcgcgtttcgtttgcaccgttcaacacaaaggaagatgtagacgcatttatcgcagcggtcaagaagggcgcaaaaatgttcagacgttaaccgttagaaacgtggacggaggtgcgagttatgaagaaatcgtatgttttcaacaccctcatctgctgtggctgcaccgcactgattttcctgctgcactttattgtgtatggcggcgtgctgctgaaaagtccgggctatgccgggctgttctgcgccgtctggatcgcgcatgctgccggctattccggcacgctggagccggagactcgtccgcagagtgctgtgcgcgttcgactgctgcaactgctgtactgcatccttttcggcagcgttctgttcgccaccatcgaggatccgtataacgttctgtgctggttctgcatggtatacggcgtggtttacgtcattttcttcctgcgcaaaggagataacggcgcggaaccgtggactgcgacgttcatgatgctctggatgctgctcacactcggcgcgtttctactgatcgtgcatccgatcacggtatcgcaggcggagaacatggtcgagcgggcggggtatactgacctgtaccgcttcaaggtcgaatttaacggcacattctgggatacccttccggacggcaccggcatcggctgcaccatgccggaggaaaaggagccgctcggctggtacggtttccgcgccttcaaagacggagaaagatactgcgtggtcgtttcggcggcacgcggacagattgaagtacaggaaaaacaaggagaataacatggaatacaaaaccatcacccggccggacggctcggagcagcagctcgccgtttacgacggcaaatgccgcttctggatggagggcatttacgacagcctgccggagaccgcggaaaagcgcgcggaggagtgcagcctgccggtcaaaatcgaccgccgcgcggacggcacggtcagcgtcggcacgcagtcgctcgtaccgtgggagaccgattacggcaagctggaaatgatggcggacgtctacttaaactatctggcgcaggtgttcaatctgccggatgatgactatgtaaaaaccaagctggagttcggctcggaaagcagcactcacgatgagctgatgaccgccgaggaacgcgaaatcgtaaaataaatcaaggagaacatatatgaaagaagtattactgctcaaatgcggcgaaatcgtactcaagggactcaatcgcaagaccttcgaggaccgtctgctcaagaacctcaagcgccgcatggcgcacgtagcggactgcgaaatttccatgcgtcagtcggtcgtttacgtggaaatccccgaggaagcggacgcggacgccgtcatggaatgcgcgtgccgtgtattcggcttcgcgaccatttcccgcgcggcggtctgcccggaaaagacgctcgaaagcgtcattgcgaccgcaaaggactacctcgcggccaatttcgcggcggctaagaccttcaaggtcgagaccaagcgcggcgacaagaagttcccgatgacctcgaccgagatcagccagcacgtcggcggcgagcttgccgacctgttcccggaggttcgcccggatatgcaccatcccgaccttgtcgtcaatgtcgagatgcgcgagaagtatgccttcgttcatgcaggcccggtcccgggtgcaggcggcatgccgatcggctcgaacggccgtgcagcgctgctgctctccggcggcatcgactccccggtcgcgggctggatgatggccaagcgcggtctggagcttgtcggcatccacttcttcagctatccgtatacgtccgagcgggccaaggaaaaggtgctcgagctcggccgcaagctgaccgcatggtgcggccgcatgagcgtcatggtcgtgccgttcaccaaaattcaggaggaaatccgcgacaagtgccacgaggagctgttcacgctcgtcatgcgccgcttcatgatgcgcattgcggagaaggtcgcggtcgagtacggctgcggcgcgctcatcaccggcgagtcgctcggtcaggtcgcgagccagaccatgccggcgatggccgtcaccggcgcggtatgcgagctgccggtattccgtccctgcatcggcatggacaaggaggagatcgtccgcatcgcgcgcaagatcgacacgttcgagacctcgatcctgccgtatgaggactgctgcaccgtctttacgcccaagcacccgaacaccaagcccaagatgccgaagattctcgaggcggagagcaatctggatgttgaggcgctcgtggacgaagcggtgaagggcgtggagatcgtacatctgccgtgagaaaagtctaagggggacgctgtcccccttagataccgatttggttcccgaggaaaccaaatcggataaccccctctcgtccgcacggcggacgaggccgcgccgccgcggcgcgggcagcggaataaaagcgcggcagagctgcgcttttatcgagaatcatatggcagtgcgtgcacgcgctgccgatacccacgaaggagaaattacattgaacgcagaacttattgcagtcggaacggagatcctgctcggcgacatcgtgaacacggatgcgcagttgatctcgcagggtctttccgagctgggcatcaacgtattttaccagacggttgtcggcgacaacccggcccgtctgcgccatgtcatcgagaccgcgcgcgaccgtgcggacatcatcatcaccaccggcggcctcgggccgacgctcgacgatctgaccaaggagacccttgcgacggttttcggcaagaaaatggcgctgcatcagccgtcgctcgaccgtctgaccgagtttttcaacaagattggccgtgaaatgaccaaaaacaacgaaaaacaggcgtggctgcccgagggctgcaccgtgttcaccaatctctggggcacggcgcccggctgcgcgttcgaggcctatggcaagcacgttctcatgctgcccggtcctccgcgcgagtgcaacccgatgtggaaggaatgcgcgatgccgtatctgtacaagctggcgggcggctgcatcgtttcgcacaacatccgcgtattcggtctgggcgagagcagcatggagcacatcctgcacgacatgatggagaagagcaagaacccgaccatcgcgccttacgcaaagacgtccgagtgcttcgcgcgcgtcaccgccaaggcggacacgaccgaggagtgcgagaagctgctcgagccggtggtcagggagatcgtcgagctgctcggcgacgacgtatacggcgtggatgtcgactcgctcgaacaggtcgtcggcgacggcctgcgcgcgaagggcctcaagctcgctgtcgcggaaagctgcacgggcggcctgctctccaagcgcatcacggatatccccggctgttcggactattatctgggcggcgtgtgctcctacgccaacgaggtcaagatgaacgtgctcggcgtcagaaaggaaacgctcgacacggtcggcgcagtctccgcagagaccgcagagcagatggcggcgggcgtggcgaaggcgctcggcgcggatatcggcgtgggcatcacgggtatcgcgggcccgggcggcggcaccgaggacaagccggccggtctggtctatatcagcgtgtggtacgacggaaaattcttcacgcgcaagaccaattcctccttcggccgcgaccgcgtccgaatgcaggcggcgagcacggcgctcgatctgatccgtcgtcatattttataaacactttgccggtgatttgtacgttttctcgacatttcccggcaaacactgtgtaaagcgaacaaaaaataaaaaagaaaagtccggcgattgtgtaaaattgctggacttttcttttttattgcgttatactggatatgtctaaagaggaaaagggaactgctgagaaaatggaaaaaacggaaaatgtttccgaaatgcactgtttctggcagagaaaataagggagagatgcagtatgaggaagaaatccgcatccccggccgtagaaaagcgcagcgagcttttctactcgggcagggattgccgagcttatgactacatgggcgcacaccccttcgtgcaggacggcgagcagggatatctgttccgcgtgtacgcgccggaggcggcgaacgtgtcggtcatgggtgagttcaacggctgggaccgggaagctgattacatgacccgcgacgagcagggcatctgggagaaattcattccgaatatcgcggaatataccgcgtacaagtacagcgtatgggccaagtcgggcgacgttttcgacaagtccgacccctacggctttcatttcgagacccgcccgggcaacgccaccaaggcgtatgacatcggcggctacgaatggggcgacgacagttggctccagtggagaaagaaccacctgccgtattccagtccggtcaacatctacgagtgccatctcggctcgtggaagatgcacgaggacggtaatttctattcctaccgccagatggcggacgagcttgtgccctatgtcaaggaaatgggctacacgcatatcgagttcatgccgctgaccgagtatccgttcgacggctcgtggggttatcaggtcatcggctatttcgccgcgaccagccgctacggcacgccaaaggatctcatgtacctgatcgacaaggcgcatcaggccggtctcggcgtcatcatggactgggttccggctcacttcccgaaggacggctgcggtctggtcgagttcgacggctcgcatctgtacgagtacgccgatccgctcaagatggagcacaaggaatggggcacgcgcgtgttcgactatggcaagacctcgacgcgaaacctgctgttctcgtccgcgatgttctggatcgagaagttccacatggacggcctgcgcgtagacgcggtcgcgtccatgctgtatctggactacaaccgccagaatgaatggcggccgaacatccacggcggacgcgagaatctcgaagcgatcgacttcctgcgtctgctcaacgagtacatactgaccgatcatccggacgtcatgatgatcgcggaggagtccaccgcgtggccgatggtcacgaaacccggctatgacggcggtctgggcttcaacttcaagtggaacatgggctggatgaacgatatgctgtgctactgctcggccgacccgttcttccgcaaggacatgcacgacaagatcacgttctcgttcatgtatgccttctccgaaaactatatcctgccgctctcgcatgatgaggtcgtgcacggcaagtgctcgctcatcggcaagatgccgcccccgtatgaaaaccagttcggcggtctgcgcgcgctgtacggctacatggccgcgcatccgggcaagaagatgctgttcatgggcggcgagttcgcgcagttctccgagtgggcgtatcagcgcggcctggactggatgctgctcgattatccggcgcaccggcagatgcaggcctacgtcaaggcgctcaaccatttctatctggaaacgccgcagctctgggagcaggacaccgactggcacggcttcgagtggatcagccacgaggacaaccgcaacaacatcatcgccttccgccgcatcgcgaaggacggctcggatattgtcgtcgttgtcaacttctctccggaggagcagccggaataccgcatcggcgtgccgatcatgggcacctatgaggagatcttcacctcggacaagtccgagttcggcggcagcggcatcacaaacggcaaggtcaagaccgacagcaagccgctgcacggtcaggagcagtccatcaatattaaaatcccgcgcttcggcgtgctgtttttcaagggcaagcccaaggcaaagcgccgcaccagagctgagatcgaggctgcgaaaaagctcgcagagcaggaaaagcaggagaaaaagccggcgcgcaggacggctgcaaagaccaaagcggccaagacggctgtaacgaaaaaggcgaaagccgaggttgcggtcaaggcaaaggccgaggtcgcggtgaaggcgaaagccgatgtcgcggtcaagggcgagacctcggtcgtaaaaaccggtacaaaggcggtggcgcggaccggaccgaaggaggtcacggtcaagggcgaaaaggccgttgcggtcaagggcgaaaaggctgtcgcgatcaagggtgaaaaggccgttgccgtgaagagcgagaccgcggtcacgacgataaaagaggataaataaaatttatttatacagataaaggcaaaaaggagaggtaaaatgtaccgtaaaaaggaatgcgtcgctatgcttctggcaggcggccagggcagccgcctgtatgttctgaccaagaatgttgcaaagccggctgtaccgttcggcggcaaataccgcattattgattttccgctttccaactgcatcaactccggcatcgacacggtcggcgtgctgacccagtacgagccgcacgtgctcaacgcctacatcggctcgggccagacgtgggacctcgaccgcctgcgcggcggcgtcagcgtcctgcctccgtatcagcgcggcaaggcttcggagtggtacaagggtacggcgaacgcaatttatcagaatatcccgtttatcgcggattatgatccggaatatgttctcatcctgtccggcgaccacatctacaagatggactacaacaagatgctccgccagcacaaggagaccggcgcggacgcgactatcgcggtgctcgatgttccgctctccgaggcttcccgcttcggcatcatgaactgcaagccggacggcacgatctacgagttcgaggagaagccgaaggagccgaagtccacgctcgcctccatgggcatctacatcttctcatggaagaagctgcgcaagtatcttgaggaggatgaggcaaactcgaagtcctccaacgacttcggcaaggacatcatcccggcgatgctcgcaaacggcgaaaagatggtctcctatcgcttcgagggctactggaaggacgtcggcacgatcgagagcctgtgggaggcgaacatggatctgctctctccgaattccggcctcaacctgtcggacgacagctggaagatctacggccgcaccaccggttcgcctccgcacttcaccgcaaagggcgcgaaggtacagcatactctgctgagcgagggctgcgagatcgcgggcaacgtttccgagtcggtcctgttctcggacgtcaaggtcgcgaagaacgcaaacgtcgaatactccattctgatgccgggcgcagtcgttgaggagggcgcgaacgtgcgctatgccatcgtcgcctctggcgcggtcatcgcaaagggcgcatcgatcggcgcaggcccgtccgaatgcgacgtagacaagtggggcgttgccgttgtcgcggagaacgtccgcatcggcgagaacgtcaagctcgccgcaaaggaaatggctgacgaagatattccggacgccgagtaagggggagaacgcaggatgaaaagtgttttaggcattattattgcatttgataacgataacgatctgcgcgagctgaccgagcaccgcacggtcgccgcagtccagtggggcggccgctaccgcatcgtggacttcatgctgtccaacatggtgaactccggcatctaccgcgtcggcatcctgatgaaggacaagtatcagtccctcatcgaccacgtcggcaacgcaaaggactgggatctgtcccgcaagaactcgggtgtcaccatccttccgccgtattcctattccaagaaggcgtctccgctcgtgaccggcgagtaccgcggcaagatcgacgcgctggccggcgcggtcgacttcctccagaagaacaaggcggactacgttgtcatcgcggacggcgacatcgttgccaatattccgctcgacgaggtcatcgagcgccacgagaaatcgggtgcggatctgaccatggtctgcaccaagaagcagaaggattcgccgttcaccacctatgttgagctcaatcgcaagaaggaagcggtcgacatccgcgtcggcgactcgaacgaaggcaagtgcaagcacgtttcgctcggcgtctacgtcatgaaccgccagtacctcatccatatgctgtccgactgcgtgacccataactgcatccacttcgagcgcgagttcctgtcccgtgcactgatcgacggcacggtagcaggctatctgttcaacgaatatgcggtcaagatcgaggataccgcggattacttctgctccaacatggatatgctcgacaaggacgttcgcgacgaggtattcaagcgcacccgtccgatcctgacgcgcatcaaggatgaagcgccgacctactacggcgatgaggctgaggtggacgactgcctgatcgctgacggctgccgcatcgagggtcatgttgaaaactgcgtgctgttccgcgatgtcgaggtcgaaaagggcgctgtgctcaaggactgcatcatcatggagggcggccgcatcctgagcgaggcttcgctcaagcatgtcgtgaccgaccgcaacgttgtggtacgcaacggccgcacgatgatgggtcacgagaactatcccatcacgatcgccaaaaactccacgatctgagcgttttctgtaaaatgtacgggagacaggcgaaaaaacggctccggcaggagaaatgttcgtgaaaaatccctatattgcaggacacaggaaacgagtataataaagatataagcagtgcgccgggcggtgaacgctgtcccggcgcacttgctgatgaggacggggacactcggtccccatgcctctgcctgaggggaggctcggcatttatgaaaatcatgtatgtaaccagcgaatgcgctccgttcatcaagaccggcggtctgggcgacgtggcaggctctctgcccaaggccctcgcggcaaagggacatgatgtgcgcgtgttctgtccgctgtactctgcgatcagcgaggagatgcgggaaaagttcttctacatcaagaacgcctatgtccgtctcggctggcgcaaccagtactgcggcattttccgctacgaaaaggacggcgtgacctattacttcattgataatgagtactatttcgcgcgcggtcaggtctacggcgagtacgacgatgcagagcgcttcgcgtactactccaaggcggtgctcgaggtgctgcctgacctcgactggaagccggatgtcatcaactgcaacgactggcagaccgctctggtgccggtctactacaatctgatgttcgcgtcccgtccgttctatgagaacatcaagaccgttttcaccatccataatatccagtatcagggccgctacggccgcgagatcctggagtacgtgctcggcatcgatgacgcgcacttccgctccggctttatggcgatggacggcgacgtcaacctcatgaaggctgcgatcgtcgcgtctaccgccgttaccaccgtatcgccctcgtatgccgaggagatccagaccgaatactacggctaccgtctcgactcggtgctgcgcatgaacagctacaagctgcacggcatcctcaacggcatcgacatggatgccttcaatccgcagacggataccaaaatcttcaagcagtacggcccgaagacccccgaggacaagctcgtcaacaagaccgagctgctgaagctctgcggtctggagggcgacgcgaacacgccggtcatcggcatcgtcacccgcttcgtcgaccagaagggcctcgacctcgtggaagccgttctgccggacatcctttcggacgatgtacgccttgtcgtgctcggcaccggcgactggaagtatgagcagatgttcatcgaggcaaagcgccgctggccggacaaggtctccgcgtccatcatgttctcgggcgatctggccaaccgcatctatgcgggcgcggatatgttcctgatgccgtccaagttcgagccgtgcggtctggcgcagatgattgcgctgcgctacggcaatattccgatcgtccgcgagaccggcggcctcaaggacaccgtccatgccttcgtcgactacgcaggcacgggcaacggcttcagcttcgcaagctacaatgcgcacgatatgctgcacgtgatccgtgaggcctgcggcgtattccgcttcaacaagccggcgtggaagaagctcatggtgcagggcatggagagcgacttcagctgggacagctcggctgaccgctacatcgaggtttaccacaccgcactgggctggtaaacagcaaaaggcagcaccgcacaatgaacgcggtattgcctcaaaagcagaacggaaaggggttctgtaacgcagggcaaccagtaaaagcgcaatcggcgcttttagagcggttccgcggagcgaaaggccgcggcgccgccaaatatatgtgaggagacagagaaacaatggcaaagacacagtacaccaaggctgcgctcaaggaagccatcgcaggcaagctgcagcgccacttcgcgtgcgaagtcaaggacgcaaagaaggatcagatctatgaggcatgcgcactcgttatccgcgacgcgctgaccgaaaacatgatcgagacccagaacgaggtagagcgtgacggcgaccgtcaggttcattacctgtgcatggagttcctggtaggccgcagcctgcgcaacaatgcctacaacctcggcatgctcgacgcgctgaccgcagcgctcaaagacatgggctttgagatggcggacatcttcgagcaggaggctgacccgggcctcggcaacggcggtctgggccgtctggcggcgtgctacatggacggcatggccaccacgggcgtgcgcggcaccggctattccatccgctacgagcacggcatcttcaagcagaagatcgaggacggcaagcaggtcgagctgccggactcctggctcgcctccggcgatgtatggcagatcccggccatggacgagacccgcgaggtcaagatcggcggcaccatcgacacccatttcgacgagaacggcaagctgatcgtggattatcacgactataccccggtcctcgccgtgccgtatgatatgccgatctccggctacgacacgaacaatatcgcgcgtctgcgtctgtgggaggcaaagagcccgatcgcgctcgatatgaagctgttctcctcgggcgagtacctcaaggcggtcgaaaagcacgcaatggccgagaccatttcgatgatcctttatccggaggataatcaccgcgagggtcagtctctccgcctcaagcagcagtacttcctcgtttccgcaacgctgcaggacatctgcgcgaagcacaaggcgaagtacggcacgctcgagaacttcgcgcacaagcatgtgctccacatcaacgatacccatccgacgctcgttatccccgagctgatgcgtatcctgatggatgagaacgatatgtcgtgggagcaggcgtggaacatcacgagccagtctgtcgcctacaccaaccataccgtcatgcccgaggcgctggagtgctggccggaaagcctggttcaggagctcatgccgcgcgttatgcagatcatccatgagatcaacgagcgcttctgcaaggagctgtggaactacttcccgggcgacttccagaagatctccaagctcgcgatcgtcgccgacggccgcgtccgcatggcgcacctcgctatcgcaggctcgttctccatcaacggcgtatccgcgctgcactctgagatcctcaaggagcgcgtattcaacgacttctacaagatctactcctccaagttctgcaacgttaccaacggcatcgcacaccgccgctggctgtgcgaggcaaacccggagctggctgagctgatcgagagcaagatcggcaccggctaccgcacccatccgtccgagcttcaggttctcgcgaactacaaggacgacaaggagctgctcagcaggctcggcgagatcaagcgccgcaacaagcagcgcctcgccgactatatcaaggcgcacaacggcatcgaggtcagcatggactcgatcttcgacgtacaggtcaagcgtctgcacgagtacaagcgccagatgctcaatatcctgcacatcattagcctgtaccacaagctgaaggacaatccggatatggctttcgttccgcgcacctatatcttcggctccaaggctgcaccgggctatgccgtcgcgaaaaagaccattcagctcatcaactcgatctccaacatgatcgagaacgatccggctgtccgcgacaagctcaaggtcgtattcatcgaggactacaaggtatcgctcgctgagatgatcatgccggcggctgaggtctccgagcagatctccatcgcaggcaaggaagcatccggtaccggcaacatgaagttcatgatgaacggcgcgctgaccatcggcaccatggacggtgcaaacgtcgagatctgtgaggctgtcggccgtgacaacatcttcatcttcggcatggagacgcccgaggctgaggcgctcgctgcctccggcaactacgagccgatgctcatttatcagaacgacccggtcatccaccgtgtgctcgatcagctgatccgcggcttcggcgacggcgtagactataccgacatcgcaaacctgctgctccacggcggcaacggcggcccggctgaccgctacatgagcctcaaggatttctcgtcctacgcagaggcgcagcagcgcgtaagcgaggcctatcgcgatcaggagaagtggaaccgcatggctctgatgaacattgcaaactccggccgcttcgcggcagaccgttccatcgcagaatatgcgcagaacatctggcgcgtcaagacgaatttcgcgttttaaaagactgtcgaaaaacttcgtttttccgacaatctgtgttttgacttcgcaaaacacgagtcgtccgaaagttcctatacagaaactttctccctcctaaagtaaaaaaaccgaggcgcatgtcctcggtttttttgcgtttgcgcagcaaacgctattttatgcgcgctgccgcgcggctaatatttctgtgcgaaagccagagtttattgttagaatagcaaaaagcacctcggagaggtgctttttcgttacagctgcgcgagcagctcgcttaaacgttcatttgtcatggcaggggtatcacgcagcgggaattcgaggccgagccggtcgtatttttctatgcacagcttgtggaaaggcagaaattcgagcttttcgaagttcggatagctttccgccttcgccttgacgcggcggagatggtcgagcgagtcggtgagaccgggcacgaccacatgccgaatccacagcggtacgcccttcatcgcggtcagctgcaaaaagcgctcgatctgtccgtaatccgcgcggcagtttttgaggtagtcggctttagagagaaatttaaggtcgcacagcacaaggtcggtgtgctccaaaaccttctcggcctgtgcgagattgccgacgcccgaggtgtcgagcgcagtatgaacgccgtgttcatggagcttttcgaagaattccgcgataaattcagcctgaagaagcggctcgccgcccgtcacggtcacgccgccgccgtttttccagtacggacggaagcgcagcgccttgcgcaccagctcgtccgcgtcggtcggcgtgccgccctcggtcagccacgtatccggattatggcagtagacgcagcgcaagggacagccctgcatgaataccacatagcgcacgcccggcccgtcgaccgcgccgagggattggatggagttgacaaaaccggtcatttccgccgcttcctttcctgtaaaatgctttgtgtccccatatatattgttccgcagctcgcgcgacagcgcgcataaaatagaatttgcgcagcaaattccagaaaaccgggggcgtgtacctcggttttctgactgctggagggagaaagtttccgcatgggaactttcggacgactcgtgttttgcgaagtcaaaacacatcttgtcggcgaaactgtagtttcgcgacaggattagatcgcctcgtggaacgtacgcgagataacctcgcgctgctgctcgcggctcagcttgtagaagtttaccgcatagccggaaacgcggatggtcaggttcgggtactgctccggatgctcgtaggccgccatcagcgtctcgcggttgagaacgttgacgttcagatgatgcgcgttctgcgcgaaataaccgcccatgatggagacgaggttattgatctgctcgtcctcggtcttgccgagtgcgcccggcgtgatggagaacgtgttggaaatgccgtcgcggcagtaggtgtagctcagctttgcgaccgagttgagggaggcgagcgcgccggaaacatcgcggccgctcatcgggttcgcgcccggcgcgagcggttcgccgtgacggcggccgtctggggtgttgccggtctttttgccgtacatgacgttggaggtgatggtcaggatggacatcgtgtggatcgcgccgcggtacagcgggaactgggtgagcgcctgatagaacttttcgacctgctcgcaggcaatgctgtctacgcggtcatcgtcgttgccgaacttcgggaagtcgccctcgatctcgaaatcgacgataatgccgttctccgggttgcggatgggctttaccttcgcatacttgatcgcagagagcgagtctgccatgcagctcatgccggcgatgccgaacgccatcaggcggcggacctcggtgtcatgcagcgccatctggctcttctcgtaggcgtacttgtcgtgcatatagtggatggtgttcatcgcggagacgtaggtcttggccagccacggacggtagatgtccatgcggcggagaacctcttcgtagtcgagaacgtcgccctccatgaccggcatctccgggccgacctgctcgaacttgttctcgtcacggccgccgttaatggccatcatcattagcttggcgatgttggcacgcgcaccgaagaactgcatatccttgccgacacgcatcgcggagacgcagcaagcgatcgcgtaatcgtcgccgtagtacgggcgcatgacgtcgtcgttctcatactggagcgcatcggtgtcgatggagacctttgcgatgaactttttccagttctccggcaggttttcgctccacagaacggtgaggttgggctcggctgcggggttcaggttgtacagggtgttcagcatgcggtagctgttcttcgtgaccatgtggcggccgtcctcgccgatgccgccgaccgcctcggtgatccacatcggatcgccgccgaacagctcgttgtactccggggtgcgcaggtgacgcgccatgcgcagatgcagaacgaaatcgtccatgatctcctgcgcctcggactcggtcatgaggccggccttgatgtcgcgctcgaagtagatgtcgaggaaggtggaggtgcggccgaggctcatcgccgcgccgttctgctccttgatgccggcaagatagccgaagtacagccactgcacggcttcctttgcgttctccgccggacgagtgatatcaa

SEQ ID NO: 12874 - DNA, 875 bp, Unknown
  gut microbiota DNA sequence
tcatgtccttcagcgccttgatctggtcggaaagctcctctgcacagcggatctccttctcggtggtgggtacttcgccgagggcatccttgtccttctgcttctcctcgatcagacggtccacgccgtacagcgcaacacggcggtagtcgccgatgatgcggccgcggccgtaggcgtccggcagaccggtcagcaggccgacatgacgggcctcgcggacgtccttggtgtacgcagagaatacgccgtcattgtgggtcttgtgatacttgaactcctcctcgatcttcggggagacctcgtagccgtactgcttgcaggcgtcgcgcaccatgcgcatgccgccgaacgggttgcatgcacgcttcagcggctcgtcggtctggagaccgacgatgatctcgctgtccttgtcgaggtagccggggccgaacgcggtgatggtgatgacggtttcggtgtcgatgttgcggacgccgcccttttcgcgctcctcagcgagcagggcatcgaacttctcgcgcagagcggtcgtgcgtgcggtagccggcgcaaggaaagcgctgtcgccgtcatacggggtgtagttcttctggataaagtcgcggacgttgatcccggtctcccagtcgccgccattgaagttgttccatgcgttcattgcaatattcctcccatttgtggtcgctgtcccttttattctgccccgaaaagagcaacaaaaaaggacagcatcgcgttaaaaataatcacgacactgcccagacggtcggcatgaaaacaggtacaggcgcacctgtctctgatacggaacttcctgctccccggtggtttgcgctccaccttgtccgtcagttgcaggaaatctgtct

SEQ ID NO: 12875 - DNA, 604 bp, Unknown
  gut microbiota DNA sequence
ctccatgatcttgagcaggatgatgccgaaatcggggtcgtcctcgtccatgtcggcggggagcgccgcgagatagtcctgaccgtcgagctcaaactcattgagaatttccagctcgaactcgttgccttcctcgtcctcgatcgtcagataatcgctgccgaatgcttcactcatcggggtgtcctccagtcgtgatcgtgttctggtttcagtgtaccccatccggcgtgtaaaatcaagtccttttacgaccccagatcctccagcagcagcaaaagctgctcctgactgccgacggtgatgccgccgcgcagcagctcctggtcggcgcggcgcagcccggcgacctcgatgccggtcacctgcaggggtttgcggtcggcgtcggaggcgaacacgctcacatagccctcgtaatcccgcaggatatattccgcctgcgcgccgtcgtaggatgtggccggcgcggccgcgcccggctgctgcagggaggacatcgccgcccccgcgacgaatggcgacacggcgcacagcgccgtcacgaccgtcagtgccagcgttcgtttcatatacctcgctcctttcaccggaaagtttgtcc

SEQ ID NO: 12876 - DNA, 2144 bp, Unknown
  gut microbiota DNA sequence
ataatgtgtattatcagggaggtgcgtcactgcctatggcaaaacgaccgaaaccatcatcaaccgccccgcgcgcggcccaggctgcggatgcgaccgtgagcgtcgcgggggcgatcctgcgcgtgctcggcacgatcctgctgatcgtgctcgtcacggggctgctgtttttgtgcatcttcgcgtactatgtgaaaaactgcctgtccacggacctcgacgtgcagctctcggacttcacggtctcgctctcgagctcgatcctgtatgaggacgccgacggcaactggcagaacctcacgaacctctcgagcacggaaaaccgcgtctgggtcgattatgccgacatccccaaggacatggagcacgcggccgtcgccatcgaggacaagcgcttttacaagcacaagggcgtcgactggtaccgcacgaccggcgcgttcatcaacatgttcctgtcgatgaaaaacgacttcggcggctcgaccatcacgcagcagctcatcaagaacctcaccaagcaggacgatatcaccgtccagcgcaagctgcttgagatcttccaggcactcgaatttgagaagtcctatgataaggaagagatcatggagtggtacctgaacatcgtctacttcggcgaggggtgcaacggcgtctacaccgccgccgagacctacttcggcaaagagccgaaggacctcacgctcgccgagtgcgcgagcatcatcggcatcacgaacaacccctcgaagtacgaccccttcatcagccgcgagaacaataagacccggcaggagaccatcctcaagcagatgtacgaacagggctatatctcgaaggagcagtacgacgaggccatggcgcaggagctcgtgttcgtgcgcagcgagtccgaagagagcacccagaccatctacagctactatgccgaggccgtcatcaacgacgtgctcaacgacctcgtcgagcagaagggcgtcagccgcgacacggcgcgcacgctgctctattccggcggctatcaggtctattcctgctacgatcccagcatccagcaggcgatcgacgatgtttataccgacctcgacaacatgccgcagcgcccgtcggcctccggccagcagttcgagtccgccatcgtcatcatggacccctacaccggtgagatcaagggcatgtccggcggcaccggcaaaaaaaccatcaacttcggcacgaaccgggccacgcagtccaagcgcccgcccggatcgtccatcaagccgatcgcgacctacggcccggccatggagctcggcctcatcacgcagtacacgcaggtcaacgatgcggcggacatcaagctctccggcacgagctggtatccgaagaactccggcggcggcaactacggcgtcgtcaccatccgcgaggcgctgcagcgctcgctcaacaccgtctcggcacagatcctcgacaagctcacgccgcgcgcgtcgtatgagttcctcaaggacaagctcggcgtcacgagccttgccgagtccgactgcgactatgcgccgctcgccctcggccagctcacccacggcatcaccgtccgcgagatgacgcaggcgtactccgccttcgtcaacgacggcgtgttcacctacggccgcacgtattcgtatgtcaaggattccagcggtgaggtcgtgctcgaaaaccccgcgcgcacgatcgtggccttcaaggccaacaccgcgtggaacatggccgacatgctctgcaacgccgtcaacagcggcaccggcaccgaggcccgcctgaccggcatgcccgtcggcggcaagaccggtacgaccaccaataactgcgaccgctggttcgtcggcttcacgccgtactacgtggccgccgtctggaccggctacgacatgcccgagtatatgaacttctccggcaaccccgccgcccagatctggaagctcgtcatggacccgatccataaggacctgccgaccaagagcttcccgacgccgaccatcggcgcgccgaccggcattttcggcaatttctccggccagtcgcaggacaccggcgacgatgccgacgccggctgagccgcgcgcaaacgctttgccccatcgtgcgtccccgcgccgaaacgacggcgcggg

SEQ ID NO: 12877 - DNA, 5541 bp, Unknown
  gut microbiota DNA sequence
gccaagcagattgaaaaagaatttcatgacatcatccactcacaattcacgcaatttccggcactccggcaatctctgaccgccgccggtgccgtcacagaaaacacctttaaggtatcacagatccgcgcaatgcgcaatcataaattggtgattttgtcgttttttgggctcttctcgaggcagccccgcttaagtgtccttttaatgggacagtaaatatgctatcatcgaaccaaatcgcaaggagggatcttatgctgcacctgctctatggccctgccgccagcggcaagaccgacctgctcatggggcgcatccgcacggccgtcgcggcgcgcacgccggggcaggtgctgctcgtgccggagcaatacagccacgaggccgagcgcgcgctgtgcgccgcctgcggcgacagcctgagtctgtacgccgaggtgctgagcttcacgggcctggcgcgccgcgtcgcggccgagaccggcgcgggcgaggcaccgctgctcgatcagggcgggcggctgctgtgcatggcgctggcgctgggccaggtggcgccgcggctgcggctgttcggcgcggccgcccgccggccgcagatgcagcagacgctcctcggcgcggtcgacgagctcaagaccgcgtgcgtcacgcccgacgcgctcgaagccacggccgcgcgctgccccggctatctgggcgacaagctgcgcgacctcgcgctcgtgctcgcggcgtatgacgccgtgaccgcgcaggggcacgccgaccccaccgaccggctgacccgcctggccgagcgcatccccgcgagcgcgctcgggcgcacggggcacttctatctcgacggcttcaccgactacacgcggcaggagctggccgtcgtgcgcgcgctgctggaagccggcgcggacgtgacggtctgcctcacgctcgatgcgctctccggcggcagcgagatcttcggcgccgcccggcgcacggcgcgcgtcctgctcgacatggcggacgactgcggcgtgcaggccacggccgaggcctgccccgcacgtgcggccgacacgccgctgcgcgtactcgagcagcagctgttttcctacacctccgcgcactttgacgatcccgcgcagacgatcaccgtccacacggcggacgatctcgcggccgagtgcgcctgggcggccgcccgcgcgctgcagctcgtgcagtcgggctgccgctggcgcgacatcgccatcgccgtgcgcggcttttccgactacgcgcccgcgctcgagcgcatgtgcgcctactacggcgtgccgctctatttcgcccgccgcaccgacctgctgcaaaagccgctcgtggcgctcatccgcgcggcctacgacatcgtgaccggcgggtgggacgcggaggacgtctcggcctacctgcgcacgggcctcgccgggctcacgccggaggagacggacacgctcgaaaactacgtcctgctctggtccatccgcggcagcgcgtggacgcgcccggccccgtggcagcagcacccggacggctacggcgcgccggacacggatgaatccgccgcccgcctgaaggagatcaacgacctgcggcagcgcgcggccagccccctgcgcctgttaggcgcggagagcagcgccgccgccacggcggaggcgcaggccatggtgctggcggattttctcgagcggctgcacctcgcgcagcggctcgatgcgctggccgaaagtctgcgcgccgagggccgcgccgcgctcgcggccgagtatgcccagctctgggagctgacgatcggcgcgctcgaacagtttgccgccatcctcggcggcacggagatggacgccgacacgttcgcaacgctctttttgcgcatgcttgcctgctacgacatcggcacgatccccgtcgcgctcgaccgcgtgacggccggcgacctcgaccgcatgcgccgccgcggcatccggcacctgatcgtgctcggcgcgtcggacgaccggctgccgcgcgccggcgagccggacggcgtgttttcgcccgaggagcggcgtgagctgctggagctggagctcgacatcggcggcggcacggacgacgcgctctggcgcgagtacaacctcatctaccagtgcgtgacgctcccggcccagacgctcgcggtgtcctatccgctctttgacggcagcggcacgcccacgcgcccgtcgtttctcgtcacgcgcatcgctcagctcttcggcacgctgccccgccccgcgaacccggacgcgcagcgcctgctggccccggccccggcgctggagctggccgggcgcacactgcgcggggcgaccgaccccgccgccgtcgcggcgcgcgcgtggttcgatcagcacgaccccgccgcgctcgccgcgctcacgcgcgcggcgcatactgcccgcggcaagctctcgcccgagcgcgtgcgcgcgctctacggcaagcagctgtacctctcggcgtcgaaggccgagcgcttctccgcctgccggtacgcgtactttctgcagtacgggctcaaggccaagccccgccgcccggcggcgttcaatccgccggagatcggcacgttcttccactatgtcctgcagcacacggcgcaggacgtgacggccgccggcggcttcgccgccgtgacggacgagcagctcggccgcttcaccgaccgctggacgcagcgctacatccacgacgaactcaacgactttcaggagaaatccgcgcgctttacctacctcttccgccgcctgtgccagcaggtgcggcaggtcgtggccgacatggcgcacgagctgcgcgcgggcgactttgtgccgctggattttgagctcaacttcgcagaccccgagcagatcgcaccaatcacgctctcggacggcgaggtgacgctcaacatgagcggcgtggccgaccgcgtagacggctggctgcacgacggcaagctctacctgcgcgtcgtcgattataagaccgggcgcaaggcgttttcgctctcggacgtgtggtacggcatgggcctgcagatgctgctgtacctcttcgcgctcgagcgctccggccccgcgcgctacgggcacgagatcgtgccggcgggcgtgctctacgtcccggcgcgcgacgtgctcatcccggccgaccgccggctctcgcccgaggaagcggcaaaagagcgcgccggtgcggtgcgccgctccggcctgctgctcgacgacgagagcgtgctgcacgccatggagcacagcgacacgccgcagtacctgcccgtctcgccccggcgcaggacggaggcacttgcgagcgcagagcagctcggcctgctcgcgcggcacatcgaaacaacgctgctcgacctcgcgcacgagctgcgcggcggcagcatcacagccgacccctacttccgctccgggcaggacacggcctgcacgcactgcgactatctgaccgtctgccacttcacgcccggcgcggggggcgactgccaccgtgtgctcaccaagctcccggccgacaaggtctggagcagcctgaaaggaggcgcgccggatgcctgaactgaacttcacgcccgagcagcgcgctgcgatcgacacgcgcggcagcaccgtgctcgtgtccgcggcggcgggcagcggcaagacccgtgtgctcaccgagcggctcatggcctacctcacggacgcagaggccccggccgatatcgaccgcttcctcgtcatcacctacacgcgcgcggccgcggccgagctgcgcagccgcatcctcgacgggatctatgcgcgcattgcttcagaccccgaaaactgccgcctgcggcggcaggtcgcgctgtgcgcccgcgccgagatcggcacgatccacagcttctgcgccgactttctgcgcgccaactgcgccgcgctcgccctcgcgccggactttcaggtcgccgataccgagcgctgcgccgccctgcgcgcgacggcgcttgagcacacgctcgagcgcgcctacacgcacatcgacaccgacgcgcccttccgcctgctggccgacacggtcggcggcgggcgcgacgatgcgcgcctgggcgagctggtgctctcactctatgacaagatgcagtgccacgcgcggcccgagcagtgggcgcagcggcaggtggacctgctcgcgctcgacggtgtgactgacgcgggcgccacgccgtggggccggtcgctgctctcgcgcgtgcgcgagagcgcggcgcattgggcgggtgtgctcgacgagcagctagacatcatggcggcgcaggacatggcgtggctctacggcatttacggcacgagcttcggggccacggccgccggtctgcgcgccgtcgtgcgcgcctgcgatcagagctgggacgccgccgtcgcggcgctgcaggacgtgccgttcccgcgcctcggcatcacgcgcaagccgccggacccggacgtgcgcgaccgcgtcaaggcgcagcgcgacgcggcgaaaaaggccatccagacgctgcaaaagcagatcaatgtcccctccgcgcaggcgctgcaggacctgcacgcgaccgccccggccatgcaggcgctgctggcgctgacgctggacttcggcgcggcctacgccgccgaaaagcggcggcgcagcctcgtggacttctccgacctcgagcacatgaccgcgcagctgctcacggacgatgacggcgcgccgacggagctggcgcgccagctctcggggcgctacaccgagatcatggtcgatgaatatcaggacgtgtcagaggtgcaggacctcattttccgcgccgtgtcgcgcgagggcagcaacctctttttcgtcggcgacgtcaagcagtcgatctaccgcttccgcctcgccgaccccacgatcttcctcgacaagtacgcgcgctttgcagacttccgcgcggccgcgcccggtgcgccgcggcgcatcctcctgcgggagaatttccgctcccgccgcgcggtgctggccggcgccaaccacgtcttttccaacatcatgtcccgcgcgctcggcgagctggactatgacgacgcggcccgcctgcgcgccggagcaagctatccggacgacggcgagcggccggagctcgccgtgctcgagctgccggacgcggacgacgacgcgcccacgccggaaaaggccgcgctggaggcggactacgttgcgcggcgcatccgcgcgctcatcgacggcggtgcggccgtgtgggaaaacggcgctgcgcgccccgcgcactatggcgacgtggtcatcctgctgcgcagcgccaacagcgtcggccccgtgtaccgcgctgcgctcgaggcgcacggcatccccgtgtcggcggagacgagcggcgggttctacacgtccgaggaggtgtcggtgctgcgctcgctgctggcagtggtggacaatccgcaccaggacgtgccgctcatcgcggcgctgcgctcgccgctcttcggcctgacggcggacgatctggccgccgtgcgcacgtgcgaccgc

SEQ ID NO: 12878 - DNA, 7003 bp, Unknown
  gut microbiota DNA sequence
cggcatcatcagcatcgcgctcggccacagtcgcgaggacaccgcgattacaaattatattcgtaatctttaatgtaaaaatccgcctctgtgctgtgaaaacttgcgcagaggcggattcttatgttgtatgcaatataacgagatgtatgaaaaatacatagcgattctttcttcgcaaaaaattctccgcggcactctcccatcctggaagaagagccgcggagaaataaatatattttcagtgccaatacaaagaccattaatctttacaccactttgctttttccaatgaaaagatcggagattactatacagaaaagcgacaggcaaatacctgtcgcttttctttgaggaaaatgaatttaccacttcgtaagttcccatgccttaatatcgtcagcaatgcttccattataggaagaaaacttacgtttattaccgatatgaatgttggcacgaacctcgttataaagtgcctcatccggatggttcggatatgcgatctgaagtgatgtttgcaaagtccgggatatccgcagcggtcagcagcggcttctgggtcagctctgcatccggaccggcgccgaggcccttctccagcatgtagaaagccagctcgcgcgagcagttcttatcatagttctggggagtgatcgcaccgaggttcggcagacactgcagatcgttgatgcagtaatcaacaacgccataagcccaatacttggtattgtttgcactcttgcccgcatagccctttgcagaacaaatcagttttgccatctggccaatcgtgagcttgtcttcggggccatacttaccgttgccgtagcccttaataagaccgccttcggacatcttgttgatgtaagaggtagcccagtggttagacggcacgtcgctgaaattagatgccgcaaaggcggatgccgtcatacttgccgccaatgccgccgccagtgctaatgaggtaattcttttgcacgtgtgttcttaaaccacttggcatatggattgaattttccgccgctttctctcccggatgagcgtagatttgctgatgccggtgagcttgacgacctgcgcgtaagaatggtcatcgagcagcgccatcgcatggtcaagctgctcggtgtcgaacttgggcgggcggccctcacggaaattcgggtcggtggcgcgcgcgaccgccttgccctcctgcgtgcgctggacgatcatgtcgcgctcgaactgcgcgaacgacagcagcacgttgcgcagcagcgtgttgaccgagtcgttggacaggatgccgaggttcaatacattgatggtgatgccctcgtcgatcatatcggtgatgaggtcggaggcctgcgacaccgaccgcgcgaggcggtcgagctttgtcacgatgagcacatcgccgcgccgcagctgcgcccgcagcctgtcaaactccggacgctcgatcttggtgccggtaaaggtatccgtatagattttttccgcgcccgccgcggtcagcgccgcctgctgcgcgtccagactgttgccgtcgcgcgcctgcgtcttggtcgagactcttgcgtagccgaatgtcatgccaatccctccgttttcacggttttgacaccgcgagttttgaatataggttttgatacccatattatagcttatgccaccgggttttgcaaccggtggcaatacttgaaggttttgagacagactcgcatcatatcgagcaattacatgcagatatttttataccgcctccagcagccagcccgtcaggttttcaaccttgatgccgttgtaattcccgagcgtgagccggccgttggtcagcacgatcttttcgcagttgtcctgaatcccgatcaacagccgcagttcgcgttcgaaccactatatgtattgtgtattatttctacacaaattttatattgatgctatattctaatttgtctatgcgctttgcttgacgatgatacattactttgttagaaagtaatgtgtgaatgtcaatcaactgttgactgatacacattatttatatataatataatgtgtgaatgttgagcgaggtgatagcatgaacaacatagatagagtagagaaactggttcgatcttctcctaacggtatcatcacaactgcacagctgacgaacgccggtctgcatcgaggctatctgcatgatttcgtcgaacgcggagaactataccgttttgggcgaggcctgtatgtgcagagtaacgcatgggaagatgatttttaccttttgcagcaaaagtacggccgcggtatctattcgcatgatactgctctttatctgctgggttattccgaccgcaccccggctcggtatacgatgacctttccaaagggctacaacgcaccgtccctgaaacaagaagatttgatcgttaagcgtgttattccagaaaattataacttcggcattatcaaaatccaatccccctccggcaatccgatttgtgtttatgatctggaacggacgctgtgcgacatcctgcgcggcagcggaagcgatattcagatcgtaggagctgctatgaaacgttatgccgcatccaaagacaaggatattcacaaactgatgcagtacgcagaacagcttcgcgtaaggcccaaagttctgcgctacatggagattttactatgattacaaaaatccaatgcagttaaaagcctatattaaaaggaaagccgccgagaaacacatttccgcgcagcttgtaatgcagaattatatgctggaaagactgctggaacgtatttccttttcaccgtataagcataacttcatcattaaaggcggctttctcgtgtcggccatcgttggtctggatacgcgcgctactatggatttggacacgaccatcaaaggctttacgctgacccatgaggcgattctgtccattttcaaagacgtgtgcgcagtgcagattgacgataatgcacagtttgaaattgtgggggttgcggacatccgtgaaacggacgattaccccggtattcgagtatccctgaaagctaactacccaccaatcagtgtccctctgacagtagatgtcaccacgggcgataaaataacgcctcgcgagatcgagtataccttttcaacgctgttcgatgaccgcacattcagcgttttagcctataatcttgaaactgtgctggctgaaaaactggagactgtgctgtctcgcaatattgcaaacactcgcccgagagattattatgacatctatattttgtccacactgcgcggagacgagtgcgacaaggctctgctgcggcaggcgatggaacggacagcagaaaagcgcggcagcagcaagatcttaacacagtacccggaaatcatgcaggaaatccgggaaagtgatacactgcgcaggcaatggaacaagtatagccgcgaatatgactatgcaaaggaaatttcgtttgacgatacctgtgatgcgatccagaaaatcatggacgaaatcatcaaatgaggtcgattatgatgtgtaagcgtggagatatttatttcgtggattgcggtcagaacatagacacctgtaagcagagcggtatccgtccggcggtcatcacggtcgttcccttggcttccaagatttataagaaaaggatgctccccacccatgtctacatcccgcgagggtgtggaacgggtctgccgcagaacagtctggctttggccgaaccggtggaaaccatcgacaaaaagtatttgctggaacggcgtggtgccgtaagcgatgatgttgttatgaccaagctgacaaaagccctgcaaatccagatcggtgccgtggagcgatataattgagaaagagcagacacggcggccgctctccccttctgcggttatacgccatatgttatggataaccgcagttgacacgccctgttttctatgctctaataggagcatcaaagaacgaataccggctgcaaaagagaaccgaaggccgtcctgtgcaggcgcagctgcgtaaagccgataaggagaacgccaagctctccgcgatgatcgaacaactgaaaaaataaaaccagaaagggtgcgtcgatatgatccagcgcgcagtctgtctttgtgacggaaagtacatcggtatcgaaagcatttacacggtaatcaacggaaagcagatcaatatccctgaaaaactagaggcgcttcgggcgaaaagcagaaacggcgagttgttctgcccatgcggctgcggtgcgaacctcattctcatcgccggtgacagaaacctgcgtgcgcagcatttccgtctgaaaaccggcagcggcaggtatgaatgtaccgccgaaacagaaggcatcatctcgatctattccagaatcgtgctgaaatgctggctcgatgaaaagctcgcctccggtgatgtggaaacgcgcgtaccgatttgtcagctcggcgacagcaaacgcagatacgagttctcttttctgtcgcgcacacgcaagattgctgtcagctataccgcaaatcgcgcaaacctttctgacgaaaaattcgatattcttcgtacaaacagcagcggcattcagcttctttacttcacagatgccgcgaatacaggtactcacggccagtatcccgagtatctccagaaaatccagaaacgcaagggctattgtctgctgctcgatgtgaacagtccgtcttatgaacaggccaggctgtatgcggttttttacgctcaggactgtgatggtctgtggcaggaagtccgttttgccgccggtctgcttgctgatttcggaattaccgaaggcggacagctcctctataagaatgtcccccttcccgttttgctctccgaaaagaaagacgctttcagcgaacagctaaagcgcgaacaggcgcggcgtgaagctgcgcgcaggcagtatgaggagcagctgaagcagctcgaacacgagcgccgcacaaggcaggcattgcagaaaaagctggcaatggaaaagctggtgcgcgagaaggaagctgctgccctccgcgcccgtcaaaagcgtcaggacgagctgtcagcaaaagacctctctgccctgctcgatcggtcccagacagaagtcatcgactcgaacggcgttcaatggctgaaatgtcattactgcgaggctgtcggaaacgctaatacctttttctcacgcggtcatggcgcgttcatcaaccacggcatctgccgggactgctggggacgtggacataaatatattcgctgaaactacagctctctgaattacacataaacattgtgtatacacgatgctattacataatgtttatgtgtaattttattatatctatatataatgtaatgtttctacatatatagttacatcgacatgagctgtaatctttcaaatttcgcatatagatcgaaaaacatcctgtttacaagctaaatatcaaagttttattatgaatataggtaaatttcttgacttcgacataggaacgtggtacagtataaaatatacagcagaatattacacatacttataaaaattacacaattatattgtgtaattgaattgcatcatttgggaggaaaatccggtatgacaatacttgcaatcgccaaccagaaaggcggcgtcggcaaaaccacgacggcctgcaccctggcatatatggctgcacatgacgggaaacgtgttctgttgatcgatgccgatgcgcaatgcaacagcacggatacgagccgcgcacagagcgatggcgtcagcacgctgtatgatctcattatcaataaggacagcaaggattgcgtacagcatactccctacggttatgacattatcgccggtgatccccttctgcgggatgctgataaaatgctcagtggttttgctgatgtatttgttctgaaagagcagatggaggccgcaaagctcgattacgatctaatcatcatcgacacaccgccggcactcggcacgttgctgatggcttctcttaccgcggctacaaccgtcctcgtccctatgactgccgaccgctatgctgctcagggcatcagccgtctggcacgaagcatcgctgacacgcagaagtataccaatcaaggcctgtcgtgctgcggtgtactgctgacacgcaagggccgtccgactacgctttcccgagagatcgaagcaggtcttcccgagcttgcagagcagctggggacggctgtgctcgaaacagcaatccgcgaaaccgtgcgtgttcgtgaagcacaggcggcacgtcagccgcttatggaatggaatgatacttgtactgcggcacaggattatcgtgcgctgtacgatgaactgaaacgaaagggtgtattgtaatggcgaagaatatcgcaagcgaaaatatttttgacggactgaagggcggaccggcagcagcccagaaaaccgttccggtacaggaagccacactagccacatctgctccggtcaagccggaaaacgaaatcaaggtaacaccgcgcagcgataaaaaccgtaccgcacgtgctcagatcgttcttaccccggaactgaagcagcgtgctgtaaaggtcgcgcagcataccggagtcagctttaatgaactggttaatcagctgcttgaacagtattgcgcagtagtagaaaacaaccaggactaaaacataattctgagaaaaaagccgattccgatacaattttgtcgaaaaagagacgatttacacatcgtttctttattgtttttctcaaattcatttgaagtgagagtaaaaccgcaggacggcattctttgagaagtcatcctgcggtttttgttatacaatgtatttagtgatcgtatcgatcaattcctctgtgttaatcggcttggaaatatggtcattcatgcctgaatccagggattcctgaatatcatctataaaagcatttgcagacaaagctataattggaatcgtaactgcatcggaccgctctatacccaaggctcgaatgg

SEQ ID NO: 12879 - DNA, 12466 bp, Unknown
  gut microbiota DNA sequence
ctgacggtccgcctctctgcgcagcggcggattcatacgcgcgtaggtgccgtgcgccggaacgtcatcctcggtcagactgagatgatgcggcgtgacttcggcatagattttcgcgccgagcgccttgcccgctcgaatgagcgcagcggactgaccgctcgaaacatgctgaaacagcacgcgcgcgccggtatcgagggacagcgcaatatcgcgcgcgatcatggaggtctccgccgccgccatcgcgcccggcacgccgaattttttcgcggcttccgagccgtagtttacgcccggagagggcacgagcgagggctcttcctcatggaacgacagaataacgtcgcgcttcgctgcctcgaccatcgcgcggcggcacagtcccgcgctcgtcaaattgatgccgtcatcggtcaggcagggcgctccggccgcgagcagcgcgtcaaaatcggtcattttctcgcccttcaggcccttcgtgaccgcgccggcctgcaaaacctgaaccggacagttcttcgccttgtccgtgacataatggatgatctcgggcgtgtcgcaggtcggaacggtgttcgccatgcagatcaccgtcgcgtagccgcctgccgcagctgcagccgcgccggtcagcacatcctccttctgcgtctggccggggtcgcggaaatgaacatgtccgtccacaaagccgggcgaaacagtcagtcctgccgcatcaaagatcttgcagtccgccggggcgtcgattttttccgcgatcttcgcgatcacgccgtcgttcccgatcagcacatcaagctgcgcgtccgttcccgtccatggatcgagcacgcggccattctggataagtaacatagaaaagccctccgtttttcctgcggcagctcatctgcccggatttttctaattatagtctatcataaatccgcaaaacccgcaatgaaaacgccgcccttctccccttctgaaaattgaaaaacaggcttgacatccctattctactattgtagaatataatcaataaaaggtattttacatttgtagaacaaggagggttgactatggcacagacaaagcggcttcccgatgcggagcttgaggtcatgcagaccatctggacgctcacgccgcccgtcacggcggcagaggtgcagcagcacgcgagcagcgactggaaaatgacgagcgtgctcacgttcctgtcgcgtctcaccgacaagggctttctgtcctgtaccaaggagggacggcagaacctgtatacgccgctcatctcggaggaggactaccgccagcgcgaaagcgtcggctttatccgacgtctgtgcggcggctcggtgaaaaatctcgtggcgagcctgtcggacgccggtgcgctgagcgaacaggacatcgacgagctgcgtgcctttctggacgcgcaggagcagtaaggaggggatcttatgcggatttcgtatatgcagattatgaacaatctgatgcagaccggactgaccgtttcgctcgcggcgctcgtgccgctgctgctgcggcgcgtgctcaaaaagcgttatccggcgcgtgcggtctgtctggtctgggcgctgctcgcgctgcggctgctcgttccggtgcagctgacgctgccggaagcgccggtgcaggtcacgccgcgcacaaattatgtgatgcaggacgaccggatgctgttcgagcaggccggtctgccggtcgagcagacgccggctcgatgggtaacggacgaacaggcggccgcgctcagccatgcaggcacaagccagacgacgaccttcaacctgaccgcagtcctgctcggtctgtggctcgccggtgtcgtcatttccgccatccggcaggctgtcagctacggaatgctgaaaaggcggctggaccgcacggcaggaccggcggaacgcgccgacctgctcgacgttctggcctctcagcgcagcggtctcggtatttcccggaaaattccgcttctgatctcccctgccgcagactgcccgatgctcgcgggttttatccgcccggcgctctatctgccggacgagaacatttcgaccgcagatgccgccttcatctttcgccatgagctgacgcactgccgccacggcgacctgtggctcaagctgctgctgacagcggcgcagtgcgtacactggttcaacccgctcgtatatctgatcgtgcgcttcgcgcaggaggatattgagcttgcgtgcgacgatgcggtcgttcgcggacagaacgcagcctaccgccgcgcctacggcgagaccatcctccgctccgctgtcgcgcagtccagacggcggcagtcgctcgtttcctgcttcggagacgacaaaaagacgctcatgcgtcggtttgagggtctgttcgacaagtcggtcaaaaagcgcggcgcagcgctcatcgtgctcgtcgccctgctcaccgccaccctcggcggcacgatcgccgtcggcacgaaaaaagaccctgcggcagctgaggcgcgcgcgctcctcatggcgaacaccttcgcgcaggcctatgtggacgaggatgcggcggcatatatgaaatacctcgccccggacagcgaccttgcgaaatacgatgattatttctcgaccggcgccgcggtctacaggcgctatgtgacccggtatgaccccgaaaccgggaccgcgctcatcgttttcgagtacgtatgggacgcggaccgcgtagccgcaatggacgtccatgcgccgtcgcccggcgttccgttccgcgaagcggtacggctgcacttcaccggcgagggaagcgatatgctgatctcccgcatgacatttgaggtcagctcggactcgttcacctctgacccgaacaacaactatcttgtctcctcgctcgacgacttcaagctgctgtacgcaaatgacctcggtctgccggatttcgtcgcggcttccgacggactgaccatcggcagcggcgacccgacgcaggcggcggaaaccctgctcggcctctctccggcggccagccagctgagcggcaccgacagcgctgcccccgacatcaccaaggtaacgtttaccttccgcgacaacagcaaggtcatcctgaccatggtagaccagttcggtcagggctggctgccgcaggactggacggacggcaaaaacgccgctgaccgcagtgcggccgacctcgcgcagcagtacgcgcgcggcctgctccacaagagcggacagtatatctaccccatccttacccccgaaaagcagcaggaattcatctcgcagcagtacgatatgaccggcggcacgcagtggacctggaaattcggctcctcttccccctctgtgcgcgactatgtgctcgtcccgactgacgacgacagcgcgtaccgcatcatctgccgcatggacggcggcggcatcggtgatgtgcgcaccggctatctcgtgcagaccacctgtgaggacggcggccgccgcatgatctccgacgtcactgagctgtccgacgcggacatgacgcagagcgagctgttccgtctgtattacagcaccggtctggctctgcccagcctgcccgacgaggtcggcaacttcagcggtctgccgcgcaccgactccctgaccgccgcgcaggatgccttctactacttcggcaatccggtcgacggctcgaaaaccggctggatcgcagatgtgacccagatccagagcatcgtgcgctccgacattcgcggcggcgcgtatattgatatcgttcagctgaccttcaccgacggcagcgacccgatcaatgtccagatggagaagaccggtacgggttactggaagccgaccggcattcaggaggatgtttccgccatgagcggcgcaaatgtgctcccggtcagcgcggacgccttcggtgccatttccttcgccaatctgccgacgctgaatacgggcgacattatcatcttcaacttcggcagcaagcctgtcgacggcgtaacgctcgtcaaccggctggtaaacgcagccggttccccccgttatcagaacatgaccgacgacgagaccacgctcacgcgaacgaacagcggctacgtctacaccataccgcagagcgtgagcgagctgctggcctccgacctcagcgtaccgttctaccatgcgctgacgctcgaatacacggatacgcagcacatccgccacacggcggtcgcggcctacatgacaaacgccatgtcgcagcttgagaacccgccgctcccctccggcggctattacagcgatgccctcggctgcatcctcaagctgccgcaggagttccggaacgcggtttccgccaatatcaatacggacgggaccacgaccttcttcgtgaaggatacggacagcgtactcatgacgctgaccgcgcagctgctctctgttctcaagcgtgatttcggcgaaaactgggcagaaaactatccggttccggtccggccgctcgcagagcgggacggactggcgtacttcctgatttacccgtccgatgtgcagtacgacccggcggatgagcaggcagccgcgcagtatcaaacgctgttcgaggccgcgcagcgcatttcccccgaggatctggcgctggatgccgacctgcatgacacctcggtctatgagcggcgcaatatggaggataccgaacattacggcgaccgcacgacggcggagctgctgttctatctgccgatctcggacggcgcctacaccgagggtatcctggcgacgctcgatgcgcgctatcgcgaggataaagccgcgttcgagcaggcgctgcgcgccgcggacagcacggcgcagtcgctctgggcgcagcatctggccgcacagtaaacaaataggaacaaaaagggcttgctactcccgtccggttttggtatactatataggtaatccggacggggttgtagctcagctggtcagagcgttcgcctcacacgcgagaggtcgtgggttcgagccccgccaaccccaccaaaaagttcgtacccgaacccgattctctatgagaaagggttcgggtacgttttttatttgcggaaggttctgcggcgagagtacccagagcagtaaacgaacaaaagcagggtatcaccatgacggtggtatcctgccttttgttttgatatgctgtatcagtagatcacagcatccgttgcagtatagccttcgagagaattctccttgacctgaatacaaatataagtgatctcagaattgcttgcagcaaagaactggcgctttgccacgggagaaatcttcagccagtcacctgctgcaaggctgatttcttcaccatcgataacgaccttacctttgccggaaagaacaccgtagatttcctcatttgccttgtgggagtgaacaaacggaacatttgctcccgcgggaagcgtattcaggctgatctccgcaccggtcagggcgagtttttcatgaagctccgtccgattttcttttccaaccgtcatttttgtgtagcttgccattgtaagcacctccattttgattcgcaatcttttattgcctgagttaagtatagaagctcgcacattcaaaaacaagtacgcacttttttgtaactgtacactcaaaaatgaatgtgctacactatatacagaggtgactgatatgcgtacaaaagaagaactgccggaatgtccggttgcaaccgcagtatccttgattggcggaaaatggaaactcttgcttctgcgcaatctgaaagagcgtccatggagattcaatgagttacaaagaagcatcgacgggatctcgcagaaggttttgaccgagagcttaagacagatgattgatgatggacttgcctaccgccatgattatcacgagaatcctcctaaagtagaatatgggttgaccgatctcggaacggaaatgttgccaatcgtcaatgcacttgcagactttggaaattactataaatcagtcgttgatcggtcatgatcgatattatgaagctgggtttgggacaggcacgccccaacaagaacacttcaaaaacgcgggaggaagtgttggagtcgagtgctgcggacaatgctccaccaaaaagttcgtacccgaacccaattctctatgagaaaaggttcgggtacgttttttattggaatggttcttgatatcaaacatcaaggaattggttgtttgattggatggggcatatggtttattatgtttgttctgctgctgattgacagacataaaagagagctttgaattccagtttatcgtgctgtccgccgcacagttttatccccagacctgtgcaaaacttttgggataacccggtgcaggaatgcaaaaaccgccgcacagctttttcgctgtgcggcggtgatttttttacttatacggatcatccggcttgaggtagcagcactttttgtactttttgccgctgccgcacggacacggatcgttcgggccgggcctgttgccggcacgcttcggggtcggtgcgaccgaaccgtcggatgcgcctgcggcgccggtctcctttgcgacctgctcgcgcttgggctcctcacgggtacgcacctgcgcaaggaagatcatgcggacggtgtcctcgcggatggaatcgatcatcgcatcgaacatatcgaagccctcacgcttgtactcgacgaccgggtcatgctggccgtaggcgcgcaggccgatgccgtttcgcagctcggtcatggcgtcgatgtgatccatccacttgctgtctacgttcttgagcagaatgacgcgctcaagctcgcgcatgatcggagaggtgagcgcctgctccttggcgtcgtagaccttgtgcgcctgctcggcaagctcggcggtgagctgctcggcggtcagatcgtcgcactcctcggcggtaaacgtgcagtcatccgggcgcaggaagatgccgatgaacggacggcgcgcctgctcgaccatttcgagcgagatcagatgattttcgccgatcgcggcgtgtactgcgtgcgcgatggtgtcgtcgatcatcttcatgatgctgtccttgacgtccttgccctcgagaacctgaagacgctgcgcatagatgatcttgcgctgcgtattgagtacgtcgtcgtattccagaacgtgcttgcgcgccgcaaagttgcgggactcgatctttttctgggcgctctcgatcgcgccggacaggatcttctggtcgatcggctcattctcgtcgatgccgagcgtatccatcatgttctgaatgcgctccgaaccgaacagacgcatcagatcgtcctcgagcgaaatatagaagctggactcgccggggtcgccctgacggccggcacggccgcgcagctggttgtcgatacggcgggactcatggcgttccgtgccgaggatatacaggccgccggccgcgcgtaccttttccgcgtctgcgtcggtctgcgccttgtgcagcttgtacagctcgtcgaacttcttgcgtaccgcaagaatgcccgggttgtcggtctccgcatggccgtttgcctcgtagaccatcttgtctacaaacatcttcgccgtacgctcgtccagctcgccctcctgcaccttgctctcggccagcttgatgaggccgcgcttgaggtcgtcgagcgccagcgtctcggcgttgccgccgagcatgatatcggtaccacggcctgccatgttggtggcgatggtgacggcgccgtacttgccggcctgcgcgacgatatccgcctcgcgctcatgatgcttcgcgttcagcacggtgtgcttaatgccctttgccttgaggatcttggacagctcctcagacttctcgatcgagatcgtaccgaccaggatcggctggcccttggcgtggcattcctcgatgcgcgaaatgatcgcgttgatcttgccgcgctcgttcttgtatacggcatccgggttgtccttgcggatgaccggcttgttggtcgggatctcgatgacatcgagctgataggtgtggcggaactcctcctcctcggtcagcgcggtaccggtcatgccggacagcttgccgtacaggcggaagtagttctggaaggtgatggtcgcgagggtcttgctctcgtgctggaccttgacgccctccttcgcctcgatggcctgatgcagaccctcgttgtagcggcggccgaacatcagacggccggtgaattcatcgacaatgatgatctggccgtcacggacaacatagtccacatcgcgctgcatgacgccgcgcgccttgatggcctgattgatatggtgctggagcgtggtgttctccgggtcggacaggttctcaaccttgaagtacgcctcggcgcgcttctggccgtgcggcgtaagggtcgcggtctttgccttctcgtcgacgatgtaatccgcctcgatgtcgtcctgctcctccttcgcgtcaacctccttgacgcgcaggcacttgaggccgacggcgaagcggtccgcgatctcgtacatctgcgaggacttctcgccctgaccggaaatgatcagcggcgtacgcgcctcatcgatcaggatggagtcgacctcgtcgacgatcgcgaacgcatggccgcgctggaccatcgcctgcttgtagatcgccatgttgtcgcgcaggtagtcgaagccgaactcgttgttcgtgccgtaggtgatgtctgcggcatacattgccttgcgggcctgcggcggcacctcatggatgaccagaccgacgttcagaccgaggaagcggtagaccttgcccatccactcgctgtcgcgctttgcgaggtagtcgttgacggttacgatgtggacgcccttgccggtcagcgcgttcagataagccggcagcgtcgccatgagggtcttgccctcgccggtcttcatctccgcgatacggccctgatgcaggacgataccgccgatgatctggacgcggtagtgacgcatgccgagcacgcgccacgaagcctctcggcaggtcgcaaaagcctcgggcagcagctggtcgagcgtctcgccgtcctgatagcgtttcttaaattcatcggtctttgcgcgcagctcctcatcggagagcttcttgtactgctcctccagcgcttcgaccttatccgcaatggggtagatcttcttcagctcatgcgaggaatgcgtgccgaagatcttggtaaaaaagtttgccattacttgtattcagcctttcaaaagggcatagctgccccattcgttcatacgggtttattataccacattataaaggataaacaaataaattttttgtgaacggttgaaatctcctcggaattccctcttttcgaccgaaaaaatcccctcgtctaagacgaggggatttgatcttactttgcgtagtcgatggcgcgggtctcgcgaaccatgttgaccttgatctggccggggtaatccagctcgttctcgatcttcttggcgatgtcgcgcgcgagcagaaccattgcatcgtcggataccttgtccgggtttacgataatgcggatctcgcggcctgcctggatcgcatacgaactcgaaacgcccggcgtttcgttcgcgatgctctccagcttttccagtcgcttgatgtagttctcgacgttctcgcggcgtgcgcccggacgggcggcggagatcgcgtcggctgcctgaaccaggcaggcaacaacagtctttgcctcgacgtcgccgtgatgcgcctcgatggcgtgaacgatcgccggggattccttgtactttttggcaaggtctacgccgatctggacatggctgccctcgacctcgtggtcgatcgccttgccaatgtcatgcagcaggcctgcgcggcgcgcctgaaccgggtcgagacccagctcgctcgccatcatgccggcgatgtgcgcgacctcgatcgagtgctgaagaacattctggccgtagctcgtgcggtagcgcaggcggccgaggatcttgatcagctcggggtggatgccgtggatgccggtctcgaaggtagcgcgttcgccctcgctcttgatgatctgctcgacctcgcggcgggacttttcgaccatttcctcaatgcgtgccggatggatgcgtccgtccacgatcagcttttcgagcgccagacgcgcgatctcgcggcgtaccgggtcgaacgaggacagggtaatcgcctcaggcgtgtcgtcgatgatgaggtctacgccggtcagcgtctcgagcgtgcggatattgcggccctcgcggccgatgatgcggcccttcatctcatcgttgggcagcggaacgaccgagacggtcgcctcggaaacgtggtcagccgcgcagcgctggatggcggtggagatgatctcgcgggcagtctgctcgctctcgtccttgagccgctggttgatctcgcggaccttgacggcagcgtcatgctgcgcttcggcctcgatcgagttgacgagcatttcgcgtgcttcgtcgcgcgtcatgctcgcgatctgttcgagcttttctacctgctcgtccttgatgcgctggagctcgttctccttcttctgtacggattccagatgacggctcagctcttcgttcttgcggtcgagggtgtcgctcttcttgtcgagcgcttcctcgcgctgaatgagacggcgctcgagctgctgcgtctcgttgcggcgctccttcagctcgcggtctgcctcgacgcgctgacgatggatctcgtccttcgcctcgagcacggactcgcgctttttggtctcaccggccttgatcgcctcgttgatgatgcgggtcgcctcggtttcagcatcgccgatcgctttttcggcaacgctcttgcgataaagaaaaccaatgacaacgcccacagcgagacatacgataccggtgatgatcggtatgatgatttcggtcatgttaaggtgtgtcctcctgttgataagataggacagctcctgcctgtcgcggcgacgtttttgacaaatttatataaaatacgccctcttccccgcggtatcgggggaacgggaagcgcaagcttatattgttcagcaaaaatgccgaccacagcggaccggtgctgtcgagaaaatgcgtgtggtgtcttcggacaccgaaacgagcgtacaccgcagtatcaacctatgcggacacgctgcaataatgccccctgaaaaaagctgcacgctggcactgtgcagcccgtaggcgccgcaccggacgcctccggcgcagtgccatatcatatgagtattattatacatctaattgtaaagcctgttcgtcaaactgtcaagaaaaacacggtcctccccctgcggattttgtcgttttttgaaaacacggctcttcctgccttgagaatagctgtgaagtctgctataataatggctcaaagagcagtaaaaggcatcggctcctgctcctgcggaaagaaaaaaccggttttcgggggtgctcctgtggcaaagacgatcaatgacgtatatcttcagctgtttcatcggctgcgcgacggcggcgacccgcagccctcgatgaccgcgcgcgagctgacggccgtggcgtgtcatgccgaccgcgcccataccgccgcctgggcgcattcctatctggacaacgcgacggtggactacgcgaacatcctatgcgaccgcgtgctcggcggcgagccgctcgcctacatcctcggcgaatgggacttttacggactgaccttccgcgtggacaagtccgtgctcatcccgcgcgcggacacggaaaagctgtgcgagctgaccatcgagcaggcgaagccgcgcatttccccgcgtatcctcgacctgtgctgcggctccggctgcatcggcatcgcagcggcgcacgaggtcgaggacgcgcgcgtgctcgcggtcgacctgtcggacggcgcgctgcgcctgacgcgcgagaacgcacaccggctcggcgtgagcggccgtctgctcgccatgaaggcggacgcgaccatgccgcccccgggcggcgtcggccccttcgacatcatcgtttccaatccgccctacatcacgcgcagcgaaatggcgcagctcgaccacagcgtcgcggatttcgagccgcacgaggcgctgtacggcggcgtggacggtctggacttttaccgcgccatctgcgaaaactggagcgataccctcgcccacggcggcattcttctgtttgaatgcggctggaagcaggccgatgcggtcgctgagatcctgcaaaagtacggtttctccgacgtctgcatcgaaaaagatgatgccggcgtgccgcgtatcgtcatcggccgctcaccgcgcgaggacgacgatctgacaaaataacctcttgacactccctccccagagggagtgtgagactgtcgaaaaacttcgtttttccgacaatctgtgttttgacttcgcaaaacacggacgtccgaaagt

SEQ ID NO: 12880 - DNA, 4080 bp, Unknown
  gut microbiota DNA sequence
caaccgctaccttgaccgccagtgggacgagctgatcgcctggacgggcaacaaggacaaggacacatccgtgcaccggctggtgaagtacgtcgtcgagcgcaacaccgcctccgccggcatgcgcctgcacctgatccacgccgccatgctcggcgacgaggcgctgcgcgccaagctcatcgaccgctacgccgccttcgagcggctcatcgccgagaagatcgccgagcgcaccgacgtcgtctccgccgactatctcacgcagctgatcctgctcgcgtccgacggcatgatcgtgcaggaggcgctgcgcaacgacaattttgacgccgccgccttcgtgcgccagagcgaggcgtatctgcgcgttttgcgccccgctgaccggaattgagcgctgattttcaacaaatgtgtcgaaaatcaccctcttgtccggatttgtgaaagaattagcgtgtttgcggttgacaccgcacggaacacgtgatattttgaaaaggaccaggtggtagagcaagcgcctgctcgtaccgccacggtgccggggagcaccgaaattgttttttcgtatgtcgaaggcgccggaatgcacctgcatcccgacgcctttttacatagctgcaatgggaattattttgaaagaagggacaatatgaaagacctgaaacatctgattttcttcgaaaatctcctgcaggacgcgcagaatgagctcgtcacgcaggcggtcaacgacgggaaaatcgccctcgggtacaactgctattacatccccgaggttctgctcaatctgccgggctgcttctcgagccgtctgcgcgcgccgcgctgcgagtcgaccgacattgcgacctactacatgaccagccgtgtctgcccgtatgtccgctccatcctcgagcgcgccattgagggtggctacaactacctcaatgcgctcttcggcgccgagtgctgcgcgtccatggagcgtatggaagagcacttcttcctcatcaatcccgtgaagaacgatcgcttcttcgtcacgcagatcgatcccccgctcaagggcgataagaccagctatgactactacaagggtcagctgcagctcaaggtcgttgaccagcttgccgagcgctacggcgtggacacctccgatgccgccatgcgcgcgaccatcgagaagttcaacgagctgtgcgacgtcatcaccgagatcggcaacttccgcaagctgcccaacccgcccattaccggctatgagttccacgtcatccagctcgtgagcgaggtctgcccgcacgacctgatcctcccgtacctcaaggagacgctcgccgagatcaaaaagcgcaagcccgagccggagttcccgttccgcgcgcgcgtcgtggtcgccggctccgagatcgacgatcccgagttcacgaagctcctcgagacctgcggcgcgatggtcgtggccgaccgctactgcttcggcagcttcccgagccgcgagcgcatcgagatccgggacggcgagagcgcgttcgacgccatcgtccgccactacctgcactggaaccagtgcgcccgcttcatggagggtgcgaagatcgaccagcgccatgctgaggtcaagcgccttgtcgacgagttccatgctgacggcgtgatctacgagaacatgaagttctgcgagttctggagctatgagaaggtgctcgcctcccatatcctgaccgaggagatgggcgtgccgtgctgcacgatcgagaaggaatacgcgctcggctccgtcggccagctccgtacccgtttccaggccttcgtcgagagtctggaaatcaagaaaatcaattcttgaacaggaggggaatgaaaactatgaattgccctgttacaaaatttattgactccaagatgcagagattcgaccccctctggcaggctcagaacggtgtcggcggtctccgcagccgttactatgataagaccggcgtcgccaagtaccgtgagtggcgtggtctgcacgacaccatggtcgactaccgcgcatggctcaaaaacgtcatgtccatggctgccatggtcgcctccgcgccgatcccgtgcctgaagggcttctgggaataccgctggatgggctcctacctcggcacgttcatgttcatcgaccgcctgtttgagggctatcgcggccccgagctcgtgatcgcgcacatgaatatgcacgccatcgtgcagagcctgaccaagaagatcgcccttgtgctgtctcacgacctgcgcatcggcggcaaggacagcgataagatcatccctgtggacgaggtcatgccgccgctgttcctgaccggcttcaaagacctgatccccatcccgctgcagacgctgccggagttcatcatctgcgatgttgaccagcagctcgagccgtactacatcgacgtagccgagtccttcggtctgccggcagacgtctgctcccgctgcgcggcggagaccggcgttgccctcaacgacgacttcccgctcttcggcaaggccatgctctccacgaacatgccctgcaacgcctccgaggcgacgtccatgttccagcgtcgtcgcatcggcctgccggacttccagatcaccatggccatgatccacaacgagccggccgcccacccgtactccgcgcaggtcctgcgcgactgcatcgacttcgtcgaaaaggaatacggcgttgagtatgactggaacgccctgttcaagcgtgccaagcacatgaacgagcagaaccgtctcgagctcgagaagtgggattacttcaagactccctactgcccgctgaccggcatcagcgagaccctgtaccgtctgtacgcctgggcctccgccaacggccaggaggactacttcaccaagaacgaccgcaaggtcatcaagatcctgcgcaagtgctacaagaataagtacgtcccgtatggcggcaccacgcgtcaccgtgcgttcctgtggggaccgtccgccgtgtactacaccgacttcccgacctggacgcagaactgctggggcatcaacatcgtcctgaacatggactccaccatgggtcacaacatgatcagcacgaccgaccccgatcaggcgctcaaggatctggcgctgttcagcgaaaagggcgttatgcgtcacatggccgtcggcggctgggacaacgtcaactccgtctgggagtgggccacgaacttcaactgcgacatggtgctcatgaacgacaacatcgcctgcaagggtatgctcggcgtgcacgccatgatggaggagcaggcacgcgaccttggcttccacttcatcttcatcgagcacgacctcgaggactgccgcaccgtgccgcgccgcgatatgcgtaagtgcgtcaacgagtatatgtccatcgtgctcaacgagcagccgctcgacccgacgctggtcgacttcgacgactccgcggcgtactaagaaaggcaggtaccgactatgaatatgaaactcgctgcaaagattatgggcaaggtcggcctggtcggctttatcggcttcgttgcgaccttcacgatctatatgttcaatctggagaacaagctcatctactatgtgctgcgccccttcctgaacaagcactacgattctcaggtgcgcgacaagcgcatcgtctgagcgtttcgcaaatcgcataaatcgaaaccccgctgcttcggcagcggggtttttgcgtgtgccgcaggcacacgctccacagaggaccgcttcgctgggccctctgtggaagagaacgcagctcgctgcagcgcacgcattgaacaccaaaggcgcccaatgcgcacgtttgcgagccgagcggtattttctccgccgtacacgccgccggagaaaatgattgaaatttctttgcgtctgcggacgcaaactctgcgaggcttcgtgacgttacgaagtttttcggtcgtccggctgcggaggctcgaccgcgggtacgggcggagacgaggccttatgacgtcacaaatgccgcagggcgcgaaaaagcccgcgtgcactgcacgcgggctgcttttcgcaaggatcttgtccgatcttact

SEQ ID NO: 12881 - DNA, 1120 bp, Unknown
  gut microbiota DNA sequence
acatctcaataccaatggaattagcgttccggcagtcgttaaagtaactgccgccgcgttccctgccgcaattccatgctgtgtcgctgtcctttacgctctggtaaatctcgttcgggtctacaaagtagtgagccgacgcttccactacttcgcgtgcgaaataatccgcgttattctgcgcggtatcgccgttgttcgcggtaaagtgcaggcaaatccagttgatcgggaactctctgcccttgcggtagttactgggattacagcccttaaaagtgattttcatttttcctcatctccgattttgtccaccgcgtcctttgcggcagaaagtgccttttgcagccacgccggaacaggtgcaccgagggaaaccgcgttctcaacgatactgccgagttccgtcagtgtgtaccacacgacaacgagggggcagaacagcacagtatattcaaacggcagtgtaaccatgggcagatgccccataatcattccgacaagcaaatctgcaccgcctgcaaccgctacaatagcaatctgtgcaaccttgcgcgtaatgcccttccatgcaatctttttgttccatgcacccgcctgcatcgccgccgccgtgcccgtcaggtagtccgccgccattgcgacaacaaacagtaccaccagccagccgaaccacccccacagggcggtaaggacggcaacgcaagcggtaacagccgctttaaaattgtttacattatccatgcttttctctctttctgttgtacttctgtgtgagatacagctccgtaatcctgtatttgcgcaccgcctcgcggatttctgcaaagtcctcacgctgtctgatgtgcttcggaaaaaactcatcgacgatcatgttcggtgcagcggtgttttctgcgcccttcatgctacacctcctgcttcagcatttcggtcagcgtgttgtactcgctttcggtgagcttgcctgctgcaaaaaagatgtcgatcttgtctgcaaggccgtcggtatggttcttctcgatcatgcgcttcaaagtacgaaataacattgtgtttgctcctttcattcgttgagacccagttcaagcagggttaacctgtattcgtggtctac

SEQ ID NO: 12882 - DNA, 78060 bp, Unknown
  gut microbiota DNA sequence
agcacaaaccgaaggtcttgctgttatggcccgttggtcaagcggctaagacggcggcctctcacgccgcaaacgggagttcgattctcccacgggtcaccaaaataacagttgacaagacgtgaggaatgtgctaaaatctaatagttttctgatacagaaaggttgcgcgaagcgcacattgaagtttcttttgcttacttttctgtacacagaaaagtaagtgcgtgttaatggtgatgagggtacacctgttcccattccgaacacagtagttaagctcatttacggtgacaatacttggctggcgacggcccgggaagataactcaacgcgcacacggaacaccgatcctttgggatcggtgttttgttatacatatctatattcccaatacagtattccaatgaaattgaggcttttatgtatcagtatattctttttgatctggatggaacattgacggatccgcgcgagggaattaccaaatcggtgcagtatgcgctggataaaatgggtatctcggagccggatctttcatctcttgagcattttatcggccctccgctgtatgatgaattccgccgctgctacaatatggatgatcagcaggcgaaaacagctgtcgcggcctatcgtgaacgctttgggaccgttggctggacggaaaatatccttttcgacggcgttccggaactgcttggcgctctgcatgacgctggaaagaaaatcgcgatcgcatcctccaaaccgaccgttttcgtccggaaaatcctgcatatgtttgaaatcgagcagtattttgatgctgtctccggcgcgtcgctcgatggaaagatcggaacaaaagcgcaggtcgttcagcaggcactcgatgccctccgcatcgcggagtgtaatgatgcggttctggtcggcgatcgctttcatgacgttgagggcgcacgcgcgtgcggtctttcctgcatcggcataacgctcggcttcggcggccgggaagagctcgtgtccgccggcgcggctgctgtcgttgatacgctcgatgaattacgcgagattctccttggctgaccggcgcatgcctattagaatgcgtgaaaaaatgacgctaatgtcgctttaccccatcggttttgtgtggtatactatatctgcaaaggcttaattgagttttgacctgcctgaaagccaacaacaggcagattttacacgatggatacatatttgcacatgctcggctgtgaaaatagggaaaggtatgaaggattatgttcgggtatgaaccggaatatattgactgcggagatgcccgtatcgcctgctatgatatcgggcgaggacatccgctcattctgctgcacggaaacggtgaagacagctcttactggaatgcgcagatttccgaatttacccgtttcatgcgtgtgatcgctgtggacagccgcggtcacggcgcgtcggacagcggaacaaaggggctctcttttgacctgatggcacaggatctcaagcatattctggatgtcaagggcatcaaaaaggcattttttctcggcttttcggatggcggaaaccttgcaatcaagtttgcgctgcaatggccggacatggtcgggaaactcgtgctcaacggcgcaaatgtggaaatgttcttcggcgttaagccgtatgtacagctgacaacattcgccggctacggcgcagcctcgctgttcagccgcatcagccgaaaggcggcgcgtcggcgtgatgtgctcggcctcatggtgcacccttacggtgtgcgcatggacgaccttgcccggctcgaaatgccgacgctcatcattgtcggcgaacatgacatgatcaaggacaggcagacgcgcgagatggcggcgcatattccgcactgccgcgtcgaggtgttccgcgacggcgaccattttgtcgccgcgaagcagccgtctcgctttaaccgcacggttatggaattcattttagggagataagcaaacatggaatttttgaaagcaggagaacctgtcgagagcaatattttcaatcagctggacgaaaaaaaacgcgcgctgatcgaaaaaggcgttgacgtcatcaatctatcgatcggcacgccggatttccagccggacaagcacgtgatggaggctgtaagcagagccgctctcgatccggatatgtacaagtattcgctgaccgagactcccgagctgctcgaagccgttgaaaagtggtacaagcgccgctatgacgtcgatctcgcggacgacgagatcattcaggtttccggctcgcaggagggctttgcgcacatcggctttgcgtttgcagggccgaacgacctcattcttgcgccggacccgggctacccgatcttcaccttcggtccgctcatgaccggtgcgaccattgcgctctatccgctgcgtgaggaaaataactggcagctcgattttaacgatattccggaggatattgcggagcgcgccaaggcgatcgtcgtttcctacccgaacaacccgaccacggccgttgccgaccgcgcgttttatgaaaagctcgtgctatttgcacgcgagcacaacatgatcgtgctgcatgacaacgcctattccgacctcatgctcgacggcacggacggcctgtccttcctgtctattccgggcgcgaaggaggtcggcgttgagttcaactcgctctccaagacctacaatctgaccggcatgcgcgtgtcgtttgttgtcggcaaccgtgagctgatcgcgcgcttccgtgcattccgctcgcagatcgactacggcacgttctatcccattcaggcaggcgctgtggcggcgctgaacgggccgcaggacatcgtcatgcgcaaccgcaagggctacatggcgcgccgcgacgcgctgtgcggcggtctgcgcagcatcggctggaacgttcccgacgcgcagggtacgatgttcgtatgggcgaaggtgccggagggctacgcctcctcggcggagttcgcgctcgacctgctcgaaaagaccggcgtgatcgtcgttccgggcagcgcgtttggcaggcacggcgaaggctatgttcgcatggcgctcgtcgttccgcccgagaggatgcaggaagtcgtccgcaggattgctgagagcggcattctgaacaggtaacatgaagcaaggcggagagccggccgcagccggctctccgttttttagactcgaagggagcggaaagaatgaaactcatttcatggaatgtgaacggcctgcgcgcgtgcatgggcaagggctttctggagtttgtcgcggagcagcagccggatatgctgtgtctgcaggagacaaaaatgcagcaggggcaggcggatgtgccgctcgagggcggctatcacgaatactggaactcggcggagaaaaagggttactcgggcgtggcgctcttcacaaagaccgagccgcagtctgtgacgctcggtctcggcatcgacgagcacgaccatgagggccgcgtcatcacggcggactacggcgaattttatctggtcacggtctacacgccgaatgcgcaggacggcctcaagcggctggattaccgtatgcggtgggaggacgccttccgcgactatctgtgccgtctggacaaggataagccggtcatcgtgtgcggcgatatgaatgtcgcgcatgaggagatcgacctcaagaaccccaagaccaaccggaagaatgccggcttttcggacgaggagcgcggcaagatgaccgagctgctcgacgccggcttcacggataccttccgtcatttttacccggagctggagggtgcgtactcgtggtggagctaccgctttcacgcacgcgagaagaatgcaggctggcgtatcgactatttccttgtgtccagccgctttgtcgaccgcgttaagagcgcgtccattctgagcgatgtgttcggctcggatcactgcccggtgatgatcgaaattgagtgattaccgttattttccggacacggaagcatggctgaaccaggaaaacgaggagagagaccggactcccgagccatatttccgtccggatgctatcgacgaggacgcagaggaagaatgtgacgagaccggtctccctgctgattttctgcccgaaatgccgacagagccatgtccctgctgcggcgcggatattccggaaaatccctcgtggggctatatctgcccggtgtgcatgtgggagatcgattatgatgtcgaggatgatccggatgcgccgagcgatcagaacaacggcctcagcctgaatgaggcgcagatgaatttccgcgcgttcggcatcgcagacccgtggcttttgaaggatgaataaaaaacggctctcccggaaggaaaagggagagccgttttgctgtttttttgacagtctcagccgccgagcagctgacagagcgcgaccatcgccgggatggtgagggcggaaaaaatggtcgagaccgcagtcgcgcgggtcgagaacaggtaatccgtgccgtaggtcttgccgaacagcgaggccgccatcgcgaccggcgccgccgcgctgatgagcatggagcagcgcagcgtgtgatcgagcggcaggagcagaaaaaccgcgagcgtgatgagcggcaggatgagcaggcgcagcgcggaaacgaagtagacctgtgtgtcgcggaaacattcgcgcaggtcgcactgcgcgaggaacgcgccgaccgcgatcatcgcgatgggcgtattgagcgaggcgagataggagaccgccgttgccggaacgaccggcagcttgaacggcgtcagaaagcagaacagaccgatgaggttggaaatgacgccgggattgataaaggtgttgcggaggcgctccgcgcgcggcacatcacgggaaagctgacctacgccgtaggtccagagcagcaggttgttcaccatgatgaacgccgagccgaggaacagaccctccgagccgtacagcgcgtcgagcagcggcagacccatgaagccgcagttggtgaacacgacacagaagcgcttgtccgcgaaattggcgtgcgagccgtttttacggaagacgaggtgactgacgagaatgctcagtcccatggctgtgcacgtgcacagaacggaaatgatgagagccttgccgagggcggggtcgaattcacgctgaaacgagtcgatgacaacgcagggcgcgacaattcgtgtcagaataaaggaaagctgaccggcgccgtcatcgttgatgtatttttttcggtagcagaacgcaccgacgccgatgagcaggaacatgacgatgatctgagagactaatatctgtatgttttgaagcaccttgtgtgccctccttgaaaaagatcaatctaatcataaagcagcagggcaccgtttgtcaatgcagaaaaggcataatgcgcagacaaagcgcataaaatgcggcgaaaggggtggacggttgtgaaaaaactggtctgcgcggcggcgatgctcggtctgctgcttatgaatgcggcggctctgccggagctcggggcgctgcacgcgaaatcggccgcgctgtatgcggcgaacggacaggagctttatgtatcgaacgcggacgagaagctccagccggcgtccgtgaccaagatcatgaccatgctgctcgcgatggaggcgctcgagcgcggcgaggtgacgctcgacaccatgataacgggcagcgagcacgcctgctcgatgggcggcacgcagatctggctcgagccgggcgagcagctgacgctcgacgagatgctcaaggcgattgcggtcggctcggcaaacgactgcgcggtcgcggtggcggagcatctggcagggaccgaggcggcctttgtcgagcggatgaacgcccgggcgcgcgagctcggctgcacgggaacaacgttcatcaatgccaacggtctggacggcgagggcgagaggacgctcacgaccgcgcgagacctcgcgctcatttcctgcgagctgctgcgccatccaaagatactcgactacacgggcatctggatggacagcatccggggcggaaaattcgcgctcgcgaacacgaacaagatgctgcgcagctacaagggcctgaccggcctcaagaccggctatatccgcgaggccgggttctgcatctccgcaagtgcggaacgggaaggattgagccttgttgcggtggtcatggccgccccgaccaaggaggaccgcatggcggacgcggcagccctgctgaactacggcttcgcaaacttcactgcgtggactccgccggaggagagctgcgcggccgttccggtcacactggggcgcgcggacacagtcgcgctgcgcatggagggagacagcgtctgcgtgctcgaaaagagcgcggtatccacggtcgaggccgagcgaagggtacccgaaagcctgaccgcgcccgtcgaggaaggacagcaggttggcgagctgatcgtcagaaccggcggagaaaccctgctgaccgtgccgctgtgcgcggcggagagcgtggaggcggtcacggttttcgatctgttcggccgtttcgtgcgctcggtcacgggaacggaagcgtgatacacggggcggcgttttcggactgcgtactttttgacgaaagatttgcaaatccggcttgcgattttggtaaatctatggtacactaatagcaacctcaaaggttgggaggacaaaactatggtaaaacttattatcggcggcaccggctccggcaagaccaaggagctcattgatcaggtaaacgctgcagtaaaagaagaaaagggaagtgttgtctgcatttcgcgcggcgataagctgactttcgatatctcgcacgacgctcgcctgatcgacgcaaaggagtacccggtcaagggctacgatggcctgctcggctttgtcggcggcatccatgccggcaactacgacatcacccgcgtattcatcgacggtctgtacaagatcaccggcgagaaggacgcagcaaaggctgagaccttcctcgacgagctgagcgcattctccgagaagcacacggtcaacttcgttgtttctctgagcgaggatccggcagcagctaccgagggtatgaagaagtacctctgatctgattttacttataaaaagcagtgagcttgggcttgctgctttttattttatccggacagacggagccgcgtgataacagacgcgcttttttcatgcccggatttcgcagaatgagaaagagagcaggccgcagagagccgggccgacgccggatgcggcgggaccgcaaacgattgcgggcgaaaaattcgcatacgcatgatattctggtactcttgcacagaaaaaacagcagaatacatataaatgcaacattaaatttatgcaaagtgcctatgatgacaaaagggcacaaaaatttttttataaaattttgatgaaaaggctttcacattttgagtgcattaggtataatagggatgatatctgggagagaggacagtttgccgaaagaacattagacacaaattgtgctcagcatatcaaaaattatcacagggcagggggaatgccgttgacgaaaaagcaaaaccactggagcgtgctgcgctacctcatctattttacgcaggtaggcgtatcggtggtcacgccgccgatcctctgctgttttgccgcgctgtggctcaaacgccgcttcgcactcggtaacggcaccgtgatcatcggcatcgtgctcggcattgcagtggcagcatgcagtctgcgggatttcctcagactgaccgagcgcaaggccagagaaagtgaacgaaaggagaaatggcattgaagggatatgagatcgtccgtgaagagaccgcgcgtctcgcgcgcggcatggcgccgctcgcgcttatcgcgttcggcatcctgctgctcgcaggcttcgagcctctgcggacaggcgtcagcctgctcgcgggcacggcgtactcgatccttctttttgccatgatcggacggagcgcggcaagagccgttctgtttccgccggcacagggcactcgtattgtacggcgcggatattttttccgctatctgctcaccggcgcggcggtctttgcggcgatcaggctgccgcagctccagccgcttgcggcgatcctgccgctcttcttcccgaagctcattcttctctggcagcaggtgcacccctccgtgcgaaagggcggagaggaaaacggcatctgacgcactccaaaggaaaggaggttaggcggtgaatgttgcaataaacggccccgaaatactgggttatctgttcggcaacaccagcctgccgatcaccgagaccatgaggaactcgtggatcatcatggcattcatcctcttcctgtgcatctttctgacgcgccgcatggaaaagatcccgaagggcaagcaggccttcgcggagaaggcggtgctcatgatcgacggtctggtagacagcacgatgggagagggatgcagagcgttctcgccctacatcatgacgctcatgatgagctcgctgttcggctcgctggccagcctgttctggatgcgttctacgaccgcagacctgaacacgacgctcggctgggcgatcatcacgtttatactcatcacctacaacaagatcaagttcggcggcatcaagggctacctcaagggcttcctcgagccgatcttcgtcatggcgcctctgaacgtcctgagcgagatcgcgaccccggtctccatgtcgttccgtcacttcggcaacatggcaggcggcctggtcatcacgacccttatcatgggcgcgctcaaggtcctgtcgaacgcggttctgggcttcctgcccgttccgctgcttcagatcggccttccgggcgttctgtcgctgtattttgactgcttcacagcctgcatgcaggcgttcattttcagtatgctgaccatggcatacgtcggagacgcacgcggcagctgagaaaaagctgaaccaaccacaaaaatctgaacgaaaatcatttcaggaggaataaaagtatggatcccaaagcattcgtagcaggtatgtccgctctgggtgcaggcatggcgatgatcgccggcctcggccctggtatcggcgagggttatgcagcaggtcaggcctgctccgcgatcggccgtcagcccgaggcacagggcgatatcacccgtaccatgatccttggtatcgcaatggcagagtccaccggtatttacgcgctcgttattgcgctgatcctgctgtttgccaacccgttcgtcggccagttctgatcggtacagacagaaccggcacagtgcatcgctgtgcattgaaacgaaacggagaatacttccgttcgggaaggaggtaaacctgtgcaacaggcaatttacgaggcttttgtcagcatcggctggtgggagattctcgtgacgatgtgcaatacgctcatcacgtttgcgatcatcaagaagttcctgttcgggccggtccgcaaaatgctcgctcagcgtgaggaggaggtaaagaccatttactccgccgccgagcaggcacagaccgaggcggaacagaagcgcacggaatacaccgagcgtctctcgaaggcgaaggaggaggcagccgagatcgtcggctccgctacccgccgcgcgaccgtgcgcagcgaggaaatcctcaaggagtcctcgcagcaggctgccgctatgatgaagaaggccgagaccaccatcgagcaggagcgcaagaaggccatgaacgagctgaaggacgaggttgcgagcctgtccgtcatgatcgcgtccaaggtcgtcgagcgcgacgtcaaggaggccgaccacgagcgtttcatcgaagatttcatcgacaaggtagggtgatcgcgcatggctgatattgtaagcgaacgttatgcgcagagcctttatgaggtcgcaaaggacgaaaaacaggaaaaggagtatctcgaggagctgaccgccgtctgcggcgcgttccgcgaaaaccccgatttcctcaagctgctcaccaccccgtccatcgcgtttgaggacaagcagaacgtcctcaaaacggtatttgaggggaaaatccggccgtttatgctgaattttctcatgctcacgaccgaaaagggccgtatcggcctcatccacgagatgcgcgaggcgtataaggagcagtattatttcgaaaacaacatcgcggaggtctgcgccgtcacggctgtgccgatgagcgacgcgctgcgcgacaggctgaagaacaaaatgcaggccgtcaccggcaggcaggtcgtgctcgaaacgtcggtcgatcccgagatcatcggcggcatcgttgtcaaggtgaacaacgagcagttcgacacgagcctgcgcactcgcctcagcgagatcgccgcacggctgaccaataccattgcgtaaggaagtaggtgactttatggaattacgccctgaagagatcagtaatattatcaaggagcagatcacgcactaccagagccagatcaggctgactgacgtcggtacggtcgtcaccgtaggcgacggcatcgcgcatatccatggtctggagaactgcatgtcgggtgagctgctcgagtttccgggcggcgtatacggcatggcgcagaaccttgaggaggatctcgtcggcgccgttatcctgggttccgaccagaatatccgtgagggcgacacggtaaagcgcaccaagcgcatcgtcgaggttcctgtcggtgaagcgatgctcggccgcgtcgtagacgcgctgggcaagccgatcgacggcaagggccccatcaacacgaccgagtcccgcccggtcgagtgcccggctccgggcatcatcgagcgcgcgccggtaaacgtgccgctccagaccggcatcaaggcgatcgactccatgatcccgatcggccgcggccagcgcgagctgatcatcggtgaccgccagaccggcaagaccgcgatctgcctggacaccatcatcaatcagaagggcacgggcgttgtctgtgtctacgtcgcgatcggccagaagcgttcgaccgtcgcgcaggtagccgagacgcttgcgaagaacggtgcgatggattacacctgcatcgtcgccgcgaccgcatccgagtctgcgccgctgcagtatatcgcgccgtatgcaggctgctcaatcggcgagtatttcatgcacaagggcaaggacgtcctcgttatctacgacgatctgtccaagcacgcggtagcttaccgtgcactttcccttctgcttcaccgtccgccaggacgcgaggcttatccgggcgatgtattctatctgcattcccgtctgctcgagcgcgcggcgaacatccagaacggcggctctctgaccgcgctcccgatcatcgagacgcaggcaggcgacgtttccgcctatatcccgaccaacgtcatttcgatcaccgacggccagatcttcctcgagaccgagctgttcaactccggcatccgtccggcagtcaaccccggcatctcggtatcccgagtcggcggcaacgcgcagatcaaggcgatgaagaaggtcgccggcacgctcaagctggcgtattcgcagtaccgcgagctgcaggcgttctcgcagttcggctccgacctcgacgcggataccaagaagcgcctcaatcagggcgagcgtatcgtcgaggtgctcaagcagccgcagaacagtccgatcccggtcgaaaagcaggtcatcatcatctttgccgtcgtttcgggcgagctgctcgatattccggtagagctgatcggcacgttccagaaggagttgttcgagtacatcgacggcacctatggcgatattccggagaccatccgcgccacgggcaagctcgaggacgacatcaagtccagactgacgcaggccattgaggaatttaagaaaaagttcctttccgagcattaaaaacagcagggagggactgaacaatggcatccggaaacatgaaggacatcaaacgccgtatcaaatcggtgcagtccaccatgcagatcacaaaggcgatggagctggtcgcgtcctccaagatgcgccgcgcaaaggagcgcgccctgagcgtgcgtccgtacttcaacgccatgtatgagactgttgcgcgtctggcctctgtcacgcgcgacagcgactcggtctacacccgacgccgtgaggtaaagaacagcctgtacatcgtcatcgcgggcgaccgcggtctggcaggcggctacaactcgaacgtgttcaagctggccgccgccgagatggagggcaggaacgcctcggtcatcacgatcggcaaaaaggcgcaggagcattacgccaagcgtcagtggccggtcgcggcggactaccccggcgttgccgagaccatgcgcatcagcgatacgcacgagatcgtcgggtctctggtcgaggcattctgttcgggcagggcagacgaggttttcctctgctacaccgaatttgtctctccgctccagcaggaggcgaagtgtatccagcttctgccggtcagcttcgagcgaaaggagaacgcggacaagggcggcgcacatgtgctgaccgagtatgatccctcgccggaggcggtgttcaacgcagtgatccccgaatacctgtacggcgtgctgtacggcgcggtagtcgaaagctactgctccgagcagtctgcgcgccgcatggcaatggaggctgcgtccgacaacgcgggcgagatgatcgaaaatctgaacctgtcctacaaccgtgcacgtcaggcagcgatcacgcaggagatcacggagatcgtcgccggctcgggtgaggtaggagcttaatcactgaatcagaaacggagcgcagagggccgcgcggcctgctgagagccgctttctgatttctcaaagggagttttgccaatgagtgagcagaatatcggcaccgttgtccagatcaccggaccggtgcttgacattaaatttgccgctgacgcgctgcccaagctgctgaacgccatcacgatcgacaacaacggccatgtcatcacggtcgaggttgcgcagcatatcggtcaggataccgtgcgctgcatcgcgatggagtccaccgacggcctgatgcgcggcatgaaggcaaccgataccggcggcccgatcaccgttccggtcggtgacaagaacctcggccgtatcttcaaccttctcggtcagccggtagacaacaagccggctgtcgagggcgaggagcgctggccgatccatcgtcccgctccgtcctatgaggagcaggagtccacgaccgagatcctcgagaccggcatcaaggtcgtcgatctgatcgcaccgttcgcaaagggcggcaagatcggtctgttcggcggcgcaggcgtcggcaagacggtcatcatcatggagctgatcaacaacatcgccaagcagcacggcggtatttcggtattcaccggcgtaggcgagcgtacccgtgagggcaacgacctgtacaacgaaatgcaggagtccggcgttatcaacaagaccgctctggtctacggccagatgaacgagcctcccggagcacgtatgcgcgttgcgctgtccggtctgacgatggcggagtatttccgcgacgtcgagggccaggacgtgctgctgtttatcgacaacatcttccgcttcacgcaggccggttccgaggtatccgcgctgctcggccgcatgccgagcgccgtaggctatcagccgaccctcgcgaccgagatgggcgcgctgcaggagcgaatcacctcgaccaagaagggctcgatcacgtccgtacaggcagtctacgtgcctgcggacgacctgaccgacccggcgccggcgaccacgttctcgcatctggacgcaaaggtcgttctttcgcgcgacatcgcgtcgatgggtatttatccggcggtcgatccgctcgactcgtcctcgcgtatcctgaccgcggacgttgtcggcacggagcattatgaggtcgcgcgtaccgttcagtcgatccttcagaagtacaaggatctgcaggacatcatcgccatcctcggcatggacgagctttccgacgaggacaagctgacggtagcccgtgcgcgtaagatccagaacttcctctcgcagccgttctcggtcgcggagcagttcaccggcatgtccggcaagtacgttccggttgcggagaccatccgcggcttccgcgagatcctcgacggcaagcatgacgacctgccggagtcggcgttcctgttcgccggcaccatcgacgaagtcgtggagaaggctaagaagggggcataatatggctacctttcctctcaaggtgatgacgatcgaccattgctttttcgagggcgatgtagaccgcatcgtcgtgcgcacctcgcagggcgacgtcggcattctgccgaatcatgtgccgtatatcgccgctctcggcatcggcgcgctgatcatcattcagaacggtgaaaagcgcatcgcggccattgcgggcggctttgtcgacgtgacgaaggagggcacgaccatcctcgcgcgctcgtgcgaatgggcggacgagatcgacgtcaaccgagcaaacagtgcagcggagcgtgcgcgcgccgcgatccagaaaaaggagagcgagcgcgaatacgaggtggctcaggtcaagctgaaaaaggcgctgaaccgtatccgtattgcaggcgacaagtaaacacgaaaaaagtcctctgggagcgatctcaggggacttttatatctgtcgcaaaaccagcgtttttgccgacaagatgtgttctgacttcgcagaacacggggcggcagaaagttcccgttcggaaactttctgccgccagaagtatgaaaaccgaggcgcatgtccccggttgctctcattgaatatttttgaggatagaggcctacgggctcatgcgtttgcgcggcaaacgctttttatgcgcgctgccgcgcggctgctgaaaatagacttgttttaatatgttcattagatctgcgagacgatatcccggcgcatttttgcgatgatgcgcttttcgagacgggagatatagctttgcgagatgccgaggcggtcggcgacctccttctgcgtcatggcctcgggcaggtcgatgccgaagcgcatggagatgatctgccgctcgcgcggcggcagccgggaaagcgcgcgcagcagcagcgcacggtcgacatcgtcctcgagcgggcgcatgacgctgtctggctcggtgccgagaatgtccgagagcagcagctcgttcccgtcccagtccgaggacagcggctcgtcgaacgagacctcggcgcggcgcccggcgatcttgcgcagatacatcaggatctcgttctcgatgcagcgcgaggcataggtggcgagcttgaccttgcggtcgctgcggtaggtactgaccgccttgatgagaccgatcgtgccgatcgagatcagatcctccgtgcccacgccgctcgattcgaacttgcgcgcgagaaaaacgacaagacggagattgtgctcgatgagcgtgcggcgtgcgccttcgtcaccggcctgacaggccgcggccgcggcggcctcctcctcgggcggcagaggcggaggaaggatttcgctgccgccgatgtaatagacggcaggcagacggcgaagctgcctgagaaacgcaaggatttgttcaagtttcatgattttctccctttcacacacagatcaggccctcgtactgtccggactcgaagccgggcggaccggcagcgcacacgcagtcgagcgttgtgccgtcggcctccagcacgcggtccgggcggaaatacagcagcaggccgctctctgtcccgacggcgcggtatggcacgagaccgcagtgcgccgccgtctcggccggcagggcggtgagctgatgcgcggcatcaccgtcgagcgggtcgttcagcagcagcgtcgcctcgccgcggcacagaatgagcaccggctttcccgagaccggttcggtcagcgagtggccggtatcctccagcacgcgcacgcgccgttcgcggccggaaaagcatatggtgagcggacggatgtcgcgccgtatggagccgtgctttgcgtcgccgcgcagcaggatgccgctgagcgtgtagccgagcgccgccgcgagcagcagcagacgcagcggaacagcaaagtaataccctgcgccgaacagcagccgccgttccgagaccgcgccgagcgctgcggcgagtccggcgaacgcggcggcggtcagaaaatacaggccgccgagccgaataagcgcccgttcgccgcagaacgccgcaaggcagagcgccgcgcctgcgagcacgcgcacgggcagagcggcgaggagagggagtagcgccgcccctgcggcatacacgccgccgagcagagaggcgagagcaagccgcccctgtctgacttttgcgccgccgagccgcgccgccgcgagcagcgtcacccagtccatcagcacgttcgtgaaaaacagcacatcgagatacacgaccaccgccgccccccctctcattcggtacgtctatcttaccacggcaggcggggcaggtgatgccgaaaacgggaagcgcgaaaaagcagaaaaaattgcccgaagccgcttcacttgtgaagagatgaaacggcctcggacaaagagtagtatgtaggtaaggtgtgggcaaaaagggaaagaggataaagcggaagaggtcagactgtcgatgaagctcatttcatgcaatcacagccgccgcgcggcagtgcgcatgaaatagaaatcgtgcagcgatttttatgcttccggagggagatggtttccgcatgggaactttcggacgacttgtgttctgcgtagtcagaacactgagtgccggcgaagcgttagtttcgcgataatcaaaaaacagcaaggaaccgaacgcccacattgggttcagcttccttgctgctgtatttatattaccgcagaacggcatttttatcatcgttcattgttcacaaaagtgaagcggcgaacaacgaaaatttttaacggttgaaatccccgatggttacagaacggcgaatttcgcaagcagagcggccgactgctcgacatcggagaccgcgcacatctcgctcggggagtggatatagcgggtcgggatggagaccgcaccggccgcgacgcctgcgcgcgccttctggagcgccgcagtatccgtgccgccgcactggaggatttcacgctgcgtggaaatgccgagcagctctgccgccttttcgaggccggcgcagaccgcaggagagcagatgaccgagcggtccatgaccttgacggccgggccgccgcccatctcgaccgccatcgcggtcttcatctcgggcaggtcgcccgtgtcggtcacatcaacggcgatcgctacatccggctcgactgcgaacgccgccgcgcctgcgccgcgcagaccgacctcctcctgtgccgtgaacacgaaatacaggtcgttttcggtctcggcctccgccagctgctccatcatcagcaggagcgtcacgcagccgatgcggttgtcgaggtacgggccgcagagcacgccgttctgctcgaagcgcggcgcttcgaataccgcgaaatcgccgatttgcacgagctttttcgcctcctcggcgttctttgcgccgatgtcgatgaacatatgcgcgagggtcatgtccttcatcggggtcttttcctcgaaggagatcacgccgcgcgtgccgttggcgaagcggacggtgatgttcacgagatccgcgtagtacaggccgccgacctgcgagaagcggataaagccgttctcgtcgatataggtcgcgacaacgccgatcgagtccatgtgcgcggcgaacagcacctttttgccggcgccctttttgcggcagatcaggttgccgagcgcgtcggtcgtaatgtcgtcaatatatgcgcctgcgatacctgcgatggtctcgcgtaccgcatcctcacggccggacgggccaaatgcgccgcctacttccttccataaatcaaaaaccttgctcattcgtcgtcccctccgagttcttcaagaaatgcacgggcggccgcgaggactgcctcgcagtcggcctttgccgccacagaggacggcgagtggatatagcgtaccggagccgctgcggcgcatacgcgcacaccggcacggctcctgtgaatgcgtccggcatccgtaccgccggcaacacgggtcttggtctgccacgggatgccgcgcctgatgcaggcgtcgcgcagcagctcgaacagcgccgcgtcgtaaatggtcgcgccgtccatgaacggcagcacaacgccgccgcgcacgcggcagaccgcgtcagcgccctcgacctcggcgaggtcggccgccgtcgtaccctcgagcaccattgcaaagcccggatcgagtgcgaacgccatgctcgccgcgccgcgcaggccggtttcctcctgcacggtgaagcagaaccaggtgtcgacgggcggctcgtcctcgagcaggcggagcagagcggcgcagccgacacggtcgtcgatcgccttggccttgattaggccgtcgccgaactcgacaacagcggagtcgaatacgccgtaatcgccgagcgataccagcttttccgcggcagcgcggctcgtcgcgccgatgtcgatatagagattttttgttttcggcatggtgcggcgctcggcggcggtcgtcagatggacggccttgatgccgatgacgcccggaacatcaccgaagcgcaccggacggccgatgacaacgcgcggatcaacgccgccgacaaagccgaattttagcataccgtcctcggtgatctttttgatgatcacgccgacctcgtccatgtgtgcgcacacggcgaccggacggtcgagcgcctttctgcccttgcggaataccatcacgttgccgatggcgtcggtccggatctcgtccgcgaagggcttgacccttttgagcacgaacgcacgcaccgcgtcctcacagccggacgggccgggcagtgcgcacagttccttcatcagttcgatcatgccttcacctccccgtcaaattcgcgcaggaacgccgccatgaggtccgcgaccgcctctacgtcggcaagcgagacgacctcgaccggcgtgtgcatgtatttctgcggaatggacagcagcgcgcacgcgatgccgcgtccgacgatctgcatcgtccaggcgttcgtgccggtgtcgccctccatgatctcgagcgaatagtcgatgtcgttggccttggcggtccggatgagcgcctttgtcaggccgcggtgcaggttgggacccatgccgatggcggcgccgctgccgaggtcgaacacgccgtcagacgggccgtccggcgtcctgccgtgggtcacgtctaccgcgatggcgtattccggctgcacagcgaacgcaccggtctgtgcgccgaggccggtgacctcctcctgtgcgctgatgagcactgcgatgttgcagcgcagctttttgccctttttgagctgcttcatcgtgagcaggatggacgcgatgccggcgcggtcatccagacatttgctgcagagctgatcgcccgcgagcgaaatcggcgtctgaccgaacacgatgggcgtgccgacacggatgcggctcttggcgtcgaggagaccggtgtcgatcgccatctcgctgacgggcacggccttgtcctgctcgccggccttcagcagatggggcggcatgcaggagacgacgccgtagagcggctcgtctgcgagcagcgtgacctcgccgccgagcagcatgcgcggatcgacgccgccgaccggcgcgaagcggacaaagccgccgtccagcacctcggtcacgagaaagccgatctggtcgagatgcgcgtcgagcagcacggtctttgcgtttttgcgtccgcaggacctgaagccgagcatattgccgtttttgtccacttcgaccgtgtcgcagtacggacggaacagctcagccacagcctcggccgcctgcgcttcgtgaccgctgaccgcaggcagcgcggtgagcgtccgcagagtttgttctaactgcaaggaaattcctcctttaatagactgttgtacgcatctattatatacgtctgcggtagatttcacaagagccgacgtaaaattcgcccggcaattccattttcgcgcgggatatgctatactgtaagcaggcaaaagcaaaaggagtgcacagcgatgcagatcgagatcagacagtaccagacacacgacgcagccgcggcagctgcgatatggaacgaggtcgtgcgcggcggcgcagcctttccgcagcgggaggagctgacggaggagaatgcggacagctttttccggtcgcagtcgttcaccggccttgcggaggacgcggagacgggcgagatcgtcggtctgtacatcctgcatccgaacaacgtcggacgctgcggccatatctgcaacacgagctatgcggtgaaggacggcgtgcgcggccggcatatcggcgaacagctcgtgcggcacagcatggcgcagggaaaggcgctcggctaccgcatcctccagttcaacgcggtcgtcgcgaccaacgcgagtgcgctccatctttaccgcaggctcggcttcaagcagctcggcgtcatcccgggcggctttcttatgccggacggccattacgaggacatcatcccgcactatcacgaattataagaaaaaacggtcgaaaacgcggctgcacgaaaaaattccgtcggtatattccgcctgccgcagggggaaaatgctgatagaactgccggactttttgcgagagccggcacgcgacaggaggtctttttcatgcaggcaaaggttgaaatctgcggagtgaacacatccgagctgcccgtctattccggcgcgcagacggacgcactgctgagacgcgccgcggcgggcgacaggggagcgcgagacgagctcatccgcggcaatctgcggctcgttctgagcgtcgtgcagcgcttccgcgacagaggtgagtcgccggatgatctgtttcaggtcggctgcatcggtctgatgaaatccatcgaccatttcaacaccgagctcggcgtgcggttttccacctatgccgtgccgatgaacgtatcttgtggaaatcctccgatacatcataaaaggactgcgaaaaccatatataaaggagaaaactatgctattctgcaacattgacctgctggacgaaaagtttgagacgaaaagaaatcagtatgtcggcgtgaaggacggccgcatcgcctacataggcgcgtccgagccggaggaggacttcggcgagcgctatgacggccgccaccgcctgctcatgcccgccttctacaacgtccacagccatgcgcccatgacgctgctgcgcggctacgcggagaacctgccgctccagcgctggctcggggagaaggtattcccgttcgaggatcagatcgacgacgaggccgcttactacggcacgctgctcgccatctcggagatgctcgcgagcggcacggcgtcgttttctgatatgtactttttcttcggcggcatggtcccggctatcctcgagagcggcatcaagtgcaatctgagccgcggcctgaccgtgttcgacgacagcgactacaccgacctgccggcctaccgcgacaatgtgcgcctgcgcggcgagtggaacggcgcgaacaacggccgtctgatcggcgatctgtgcatccacggcgagtatacctccaatccgaagatcgtcgaggcggtcgcgcagcacgcccgtgagaccggtgcgcgcatccagatccatctgtccgagacgcagaccgagcacgaggagtgcaagggccgtcacggcctgaccccggcggcgtacatggagaagcacggcatctttgattctccgacgacggcggcgcactgcgtctggctcgaggacgaggatttcgatattctgaaaagacacggcgtgacggtcgcgtgctgcccggcgagcaatctcaagctggcctcgggctatgcgaacgtgccgaagatgctcgagagcggcatcaatgtcgcgctcggcacggacggcgcggcgtccaacaacaatctgaacatcatgcaggatatgtacctgttcggcgtggtctacaagggctatttccgcgacccgaccatcatcaccccggctgaggtgctccatgcggcaacgcgggcgggtgcgctcagtcagggccgcgacgacagcggcctgctcgccgtcggcatgcgcgctgacctgtgcgtgctgaacacggatacgccgcagttcaccccgatgaccagcgcggcgtgcaacgtggtctatgccgcacagggcgcggacatccgcatgaccatggtggacggcgaaatcctctaccgcgacggcgaattcaagaccatcgacatcgaaaaggtaaaggctgaggtgcagcgccgcacggacagcatcctgagccgcctgtaaggagggacaaaccatgctgacacatgatgaagtaaagcagtcggcggatttcctgcgcggaaagctgccgttcatcccggagatcggcatcgtcctcggctcgggcctcggcccgctcgcggaggagatcgagcagccggtctgcatcccgtatggcgatatcccgcatttccgcgtctcgaccgcgcccgaccatgcaggccgtctggtctgcggcacgctctcaggccgccgcatcgtctgtatgcagggccgtctgcacggctacgagggctacgcgccggacgagatcgcttatccggtctatgtgctgaaggagctcggcgtgggcgcactcatcgtcacgaatgcctcgggcggcatcaataccggcttcgaggtgggcgatttcatgctgatcgaggatcatatcaacctgacgggaaagagtccgctgaccggcgcgaatgacgcttctctcggcacgcgcttcccggacatgacgttcgcctacgcaccggcgctgcgcgaaaaggcgctcacggcggcggaacagtgcggcacggtgctgcgacgcggcgtatacatcggcgtgaacggcccgcagttcgagaccccggcggagatccgcgcgttccgcacgctcggcgcggatgcggtcggcatgtccaccgtgttcgaggtcatcgcggcggcgcactgcggtctgcccgtcctcggcatcgccatgatcaccaatatggccgccggtgtgctgaacaagccgctgtcgggcgcggaggtcaacgagatcgcggaaaagcgcggcggcgtgttccgcagctacgtgaaaacgctcgtcgagacactgtaagcaggggagaacggggcggcaaagactgtcgcgaaactatagtttcgccgacaagtgtgttctgacttcgcagaacacgagtcgtccgaaagttcccattcggaaactttctccctccagaagtataaaaaccgaggtacacgcccccggtttttatgcaatcacgaagtgattgctatttcatgcgcgccgccgcgcgacagcagcgacatctccctaaatgaatttcattgacagactgagggcggcattctgccgccccaaatccttgaaaaatacatggaaaaattttttgaaaaaagtgttgacatctgacgaaatgcgcgatataatataaaagctgtcacggagaacgtgagacggcaaatcgaggtgtggctcagcttggtagagcgcttcgttcgggacgaagaggccgcaggttcaaatcctgtcacctcgaccagctaaggatctgtttcgacaggtccttttttgttgtcatgcacagcctgtccgtgctatactggaacaggaaaaatcgcgcagagaggggatagagaaccatgccgcagccgagcctgaatgtacagtgttttgtggaaaagcaggtcgagccgatctttaccggcgaaaatcagccgaagctgctctatgtcagcgagatccggccggatgcgagcgcgcatccgcgcgtcatgcacgcgcacgcagatgccgttgagctgatcctgatctgcagcggctcgagcgaatatctcattcacgacaagaaaaccgtcatcgaggccggtgatctgcttgtgtataacgccggcgtggtgcatgacgaggtgtccgggccggatatggaggttggaagctactgtgtcggggtcgggggactgcatatgcccggcctgcgcccgaacgcgctcatcccggatgaggcaggctatgtgttcccgacgggcaggtatttcgcggatatgaaggcgctgtttgagatgatgttccgcaatctcgcggcaggagagccgcacgccgagctgttctgcagcagtctgatgcacgcgctgctcgtcgccgtcctcaccgtgaccgaggatgtgggggagacgcgggaaaatccggcggacgagccgcacatactcggcagccgtattaaagattacatcgaccggcactacatggagccgatcacgcttcagagcatgggcgaggccatgcacatcagtccgtactacctgtcccatgtgttcaaggaaatgagcggctattcgcccgtgcagtatctgctgcgccgccgcatcggagaggcgcagaccctgctcatcacgaccgagctctcggtcacgcgcatcgcggagatggtcggctatgactcgtcgagctattttaatcttcagtttaccaagaatgtcggcatgccgccgaataaataccgccataactatattgtatcggtcggcgaggaggaaaagccgcgccgccggaagggataagagaagactgccgcgccgccagaaagggctgccgcggcagtcttttttgcgtttgccacaaaacagcgaaaaaattcgaacgaaatttatacttttctttacgtagagacggtgatataataattatatatctgcatcttttgacgcagcggagagaaataaggggattctttcgataaaggagatgatgacacaggcgcggccgtaccgcgagaaaaagaaaaatgccggaggtccggcgcgggaacgcaggcgtttccgatgattccgcagcgacacgcggaatttttttgtgtcaaaatacatctataaggggaataaaaatgggaatgagcttttttaagcagctccgacgggaatttgcaggctataacggcaaaaaactgtcgcaggatctgatggccggcctcacggtcgcggcggtcgctctgccgcttgctctggcattcggcgtgtccgccggcgctacagcggcctgcggtctggtcacggcgatcgttgccggtctcgtgatctcggcgctcaccggcggctattatcagatctcgggtccgaccggcgcgatggcggccatcctcggctcgctgatcggcgcctacggcatgcagggcatgttcgtggcgacctttctcgccggcatcatgctgatcatcgcggcggtgctgcatctcggcaatctgaccgcgttcgtaccggcgccggtcattaccggctttacatcgggcatcgcggtcatcatcgcgctcggccagatcgacaattttttcggcacgcattctgagggcggttcggcgctcgccaagctcgcaagctacagccgtctgggatttcatccgaacatgacgacgaccatcgttgcgctgctcgtcgttctgctcatggtattcttcccgaagaagtggaatgcggtcgttccggcgtcgctcgtcggcatcatcatcgcgacggcggctaccatgatcttcaagctggacatcgcgaccgtcggtgacattccgaagtcgctcatgctgcccgaccgcctgtcaccgtctcagatcgactggacggcggttccggctctgctcgcaccggcgttttccatcgctgtgctcaatatgctggagagcctgctgtgcggcgcgagcgcaggcagagcgaccggcgtcaagctgaacaacgaccaggagctgttcgcgcagggcgtcggcaacatggtgctgccgatgttcggcggcattccggcgaccgctgcgctcgcgcgtacctcggttgctgtccgctcgggcgcgcagacccgtctgaccggcatcttccatgctgtcggcctgctcatcatgatgctcgtgctcgcgccgatcatctcgaacgttccgatggcagcgctcgccggcgtgctgatggtcacagcatggcgcatgaacgagtggagcgcgatccgctatgtgttccagcacaagttcaagggcgcgatggcgaagttcatcgtcaccatggcgtgcacgatcgtgttcgatctgacggtcgcgatcgttgtcggcgtcggcctcggtcttatcctgatggttgcccgtctgtccaagctccagatcaactacgagcgcgtcgatatgtcccgcctcaagagagacgacgacacgctgaacgagcgttatagcaacgcgatggttgcatacattaccggtccgctgctgttcgcgaacatcggcacgctcgaggagctgcccgagcatatcggccgctgcgacacgctgctgctctccatgcgcggtgtgccgagcgtggacgtttcggcggcgcagacgctgctgcccatgctgcgggagctcaaggagcgcggcatcgacgtcgtgctctgcggcgttccgagcgctacgatgaccatgctgcgccgcgcaggcattgttgagctgctcggcgagcagtcgttctactggagcgtcgagcgcgcgctgctcgaccaccgtccacgtccgctcgcggccttcgacagcgcagaagcgtaaaacaaaaagcacagaggaaaataaaacctctgtgcttttctttgcgcaaaatcagtggccgcggtgcttttcgcggcgcttttccgtgcggagcgcaaaccttcgggcctgtttggcctgacggcgtgcgcggctgctctcgcgtttttcgagcctgttctgctcacgcgcaagctgtaaagcctgctgcgagcgggtgccgatgccgcgctggccggtctcacgcgccgcctcgcggcggcgttttttcgggttcgcggtctcccttgacagtctgccttcgaccggcggcccgtagcggagccggtctgcgtgcctgagcacaaactcgaatacctccgcatcggtcggctgcgcgccgaacacaacacgggcggcgcgtatgacgccgtctgtctcctgctcgaacacgccgacccagaacggttcctcgaaaaaaacggtcagtctggatttgattctgctcatggttatccctcctgaaaaaatgtggaacagagaagggacgacccggagggagggttacttaccctgcgaaagacgcaggacggccgggctacctaccggctctggtgcagaatgcacgttgcgtttttatctctgtgtatatctgaaaagaccgccggcggaaatgccggcggtctgacagagcttgtgaggcgccgccttagatctgcgaggtgaatacccggtagccttcgcggctgagggtgtcgatgaggcgctttgcgtgctcgacgccgccgagctcacagacaacgtggatgatcgcttcgccgatctcgaggtcggtctgtacgcggtcatgctggaacgagatgatgttcgcgttctgctgtgcaacgatatgcgcgaagcgctcgagtgcgcccggcgcgtccggcatgagaaccgagaacttcagctgacggcagcgggtgatgaggcccttctcgacgatcttgtggatgaaggaaacgtcgatgttgccgccggagaggacgcagacgacctttttgcccttgacgtcgaccttgttgttgagcacggccgcgagcggagcggcgccggaggtctcaacgacctgcttgcagcgctcgagcagcagcaggacggcggaggcgatctcgtcgtcggagaccgtgacaacgcggtctacgtacttctggatatattcgaaggtcttttcgcccggcgtctttaccgcgatgccgtctgcgatggtgtgaacggaatcagacggcatgcgctcgcccgcgcggaaggagttcgcgatcgccggagcaccctcggcctgtacgccgatgatctggatgcgcgggttgatctgcttggcgcaggcagcgacaccggagatcagtccgccgccgccggccggaacgaagatcatgtcgacaaacggcaggtcgcgcaggatctcgagcgcgatggtgccctgaccggccatgacgtcctcatcgtcgaacggatggatgaactccgcgccggtctcctcgcagatctcgcaggccttggcataggcttcgtcataaatgttgcccgccagaacgacatcagcgccgtagccctgagtcgcggagaccttggcgatcggcgtggagcgcggcatgacgatggtggacttgacgccgaccgagcttgccgcgaaggcaacgccctgtgcgtggttgcctgcggaggatgcgacgactgcgtgcaggtcgccctcggcatagcgcttcatgatcttgttgtacgcgccgcgcaccttgaacgagccggttttctgctggttttcgtacttcagatagacctcggcgccggtcatggcggagaaggttgcagaagtcgacagcgggatgttgtggattacgtttttcagacggtcggctgccgcctcgaaatctttcagttctaacatatatctgtctccattatgcaggatttttttcataccattttatcatagcattattctgtacggaatgcaaggcgacagcggatagaaattgaatttttgagagagaaagagcctcgccgcaaaaaaacgggaggctccgggatttacttgtgatagagctttttggtctggtaatgcggctcgcaggtgaggttcatgccgagctttttgaaaacgccggtatcgacctgcgcgagcatgacggaggaatggacctcgcagccggaaagcttgggaagctgcgcgagcgcgagctccgcgaccgggttggtcgccgccgaaatggacagcgcaatcagcacttcgtcggtgtgcagacgggggttgtggttgccgagaccctcgatcttgagcttctggatcggctcgatgatgagctgcggcaggacgtgcaggtcgtgcggcagaccggcgagcgttttgagcgcggtgagcagggctgcggccgaggagccgagcagggcagtggtcttgccggtgacgatggtgccgtcgggcagctcgatggcggccgccggagcgccggtttcctcggcacgcttgagcgcggccgctgcgaccggacggtcggcggtggaaacgcccgcctgattcatcagcagctcgagcttgcgcacgctgctctcgtcgccgagacccatgcggacatcgcagagcgcctgatagtagcggcggatgatctcctggcaggaggcctcgcggcaggcgtcgtcatcaatgatgcagttgcccgccatgttgacgcccatatcggtcggggaatgatagggactttcgccggcgatctgctcgaagatggcggaaacgaccgggaagatctcgacgtcgcggttgtagttgaccgtggtcacgccgtaggtctcgaggtggaacgggtcgatcatgttgacgtcgttgaggtcggcggtcgccgcctcgtaggcgaggttgaccggatgcttgagcggcaggttccagatggggaaggtctcgaatttcgcatagcctgcggttacgccgcgcttgtgctcatggtagagctgactgaggcaggtcgccatcttgcccgagccggggccgggcgcggtgatgacaacgagcgggcgggtggtctcgatgtactcgttgcgtccgtagccctcgtcggaaacgatgagcggcacgttgcccggataacccgcgatggggtagtgcatatagaccggcatgccgagcgcggtcagacgctttttgaaggcgtccgcagccgcctgaccggcgtactgcgtgatcacgaccgagccgacatacagaccgatgccgcggaaggcgtcgatgaggcgaagcacatccacatcataggtgatgccgaggtcggagcggaccttgttcttctcaatgtcgccggccgagataacgatgacgatttccgcgtcgtccttcatctggcacagcatgcgaaccttgctgtcgggcgcgaagccgggcagcacgcggctcgcgtggtagtcgtcgaacagcttgccgccgaactcaaggtacagcttgccgccgaaatgcgcgatgcgctccttgatgtgcgccgactgggtcgcaatgtatttgtcgttgtcaaatccgattttcttcatattccggtcatgcccccataaatttaaaatttttatcaccctatattgtactgaatccgagcggatttgacaagtagggagagagaaaaaaacagaagtttcgacagcgcccgctttcaaattttttaatactccggcggttgctattgcccgcgcggtttggtatactgtattttataagagactacgaaaacggagggggcgtatcgaatggacgagcagacgaaggggtttcggagcgcggtgttcggcggctttcggcgcgaggatgtgctgcgctacatagaggagaccgacgcgaggtattacgaggagtcggaacgcctgcggagcggtctggatgatgcacagacggcgatgggcgagctgcgcgggcagaacgaaaagctcacggagaaaaatgcggagctgctggagcgtctgggcgcgatgacgctcgatatggaccggatacaggcgcagctcgatgagatcgaaaaagggttttcgctccagacgaccgagatcgaggcgcagaacgagcgcgcggagacgcttgcggcggaaaacgaccgcctgacgagcgaaaacgccaagctcgcggcgaaatgcggcgagtatgaccagtccaaggacaagatcgcggagatggagctttcggcctaccgccgcgccaagcagatcgaggaggacgcaaaaaccgagcttcagaagctgcgccgccagtcgctcgagaccatcgagcaggtgcgccgccagctcgaggagaccaaggaaaactaccgcgtgatgctcgcacgcagccagcaggagtcgcaggagatggcgcgcagggcgggcgaggtcatcggcgagatcgaccgcatctcggcctccctcggcaaaaacacaacggaaaaatcgaaaaacgggctgcgcgatgtgttgaacagtctgcgcccgaaaacggaggaaaactaaaatggctcattatgatctgaaaaccgaagagctgaaggaaatggctcccagactgcgtgcaggcgacacggtatcgctgaccggcatcgtttacaccgcgcgcgacgccgcgcacaagaagatcgttgcggcgatggacgcaggcgaaaagctgccgttcgatctggacggtgcggcgatctactacgcaggcccgaccccggcaaagccgggtcaggtcatcggctcggtcggcccgacgacctccggccgcatggacccgttcgcgccccgtctgctcgacgcaggcctgtcctgcatgatcggcaagggcgtgcgcaatcagaacgtgcaggacgcgatggagcgcaacggcgcggtctacatggtcgcgatcggcggcgcaggcgcagcaaaggctgcttccatcaaaaaggtcgaggtcatcgcgtatgatgagctgggctgtgagtcggtcaagcgcctgacggtcgagaatttctcggctatcgtttcgcaggactcggctggcggcaacctctataccgagggcgtcgcgaagtacaagaaggattaagccggcagtctgcggaaaaagcgttttccggcgcattcttcgcgcgacagcgcgcattaaatagaatttgtgcagcaaattcataaaaaccgggggcgtgtacctcggtttttatacaagggaagaaaaaatatgcccacagggcgcggtttttcttcaatattcgctcgaaagcgtggtttcgagcgagaaactggaacagtttcatagtttccccttcccgggcataatctgttatgacaggcgctcggggaggggatttttcttgaaatacggctttggacgtacagcggtgcagatggcgtgcacgctgctcgcgctgtgcctcggcatcggcctgctgcggcaggagaggatgcggacggtattttccgaggagcgcgtgacgctcccgatcatcatgtatcacagcatcctgaaggacggcgcgcggcagggaaaatatgtggtctcgcccgaggtgctcgcgcgcgacctcgatgcgctccgggcgcgcggctgcgagacggtgacggtacgcgatctcatcgcgtatacgagggacggcgcgccgcttccggcaaagccggtcatgctgacctttgacgacggctactataataactatgtctatgcctatccgctgctgcggcagagagggatgcgggcggtcgtgtcgatcatcggcagccagaccgcgctctttacagaaaacggcgaggaaaacgcctactggtcgcatctgcgtgcggagcggctgcgcgagaccgaggacgttttcgagatacagaaccattcgtggaatctgcatgaatacggtgagcggcgcggctgtctgcggcggagcggcgaggacgaagcgcattatgcaaagctgctgcacgaggataccgagcaaacccagcagctgatcgaggagatcggcctgccggcgccggaatgctatacctatccgttcggcgcgtgctcggaggagagcgaaaggattttgcgcgagatgggctttctgtgcacgctcggctgcgaggagcgcataaatacagtgacgcgcgacccagagtcgctctatcagctcggccgcttcaaccgcgccgccttcgagtcgacagacgattttctgcgccgcgcactgggggagtgagagtatgcggttttccgagctgcactgccgcgaggtcatcaacctgtgcgacggggcgcgcatgggtgaggtatgtgatctgatctttgacccggcctgcggccagatcagcgccatcgtcgtgccgtccgcgagcgggctgttcggcatgttctcacgcgagggctgcatcatcccgtggagctgcatcgaaacgctcggcgaggactatatcctcgtgcggtaccggccgaaataaggaaaaagcaggagcgcggcaggaaatcgagaaaacaggcggaaaaatgcaaaaaaatgattgacatcgggcaaaagttcggatatactattagagcatgaaattcgcacatcccgtaatgaaagcagtcggtgacggttccccgttgctgctgtcagatgatctgggatggaggaaaaaccaaggaggaaaactaaaatggcagtaatttctatgaagcagctgctggaggccggcgtacacttcggccaccagacccgtcgctggaacccgaaaatggcaacctacattttcaccgagcgcaatggtatctatatcattgacctgcagaagaccgttaagaagctcgaggaggcttacttcttcgttcgcgatatggcagcttccggtgagtccatcctgttcgtcggcaccaagaagcaggcgcaggacgcaatcaaggaagaggctgagcgctgcggtcagttctacgtaaacgctcgctggctgggcggcatgctgaccaacttcaagaccatgcgtacccgtatcgctcgtctgaaccagctgcagaagatgcaggcagacggcacctttgatctgctcccgaagaaggaagttatcaagctccagctcgagatcgctaagctcgagaagtacctgggcggcgttaaggaaatgaagaagctgccgggcgctctgttcgttgttgactcccgcaaggagaagaacgcgatcgctgaggctcgcaagctgaacatcccgatcgttgcaatcgttgataccaactgcgatccggacgagatcgactacgttatcccgggcaacgacgacgctatccgcgcgatcaagctcatctcccagaccatggctaacgccgttctggaaggcaagcagggcgagcagctcgaggtcgaggctaaggctgacgacgcaaaggctgagtaattcataactctatataaattcaagtgagttgttcgtagggcgcgacgacccggcgcgccgtggtcgttgtgccctacgttttttatcgtacaaatacaaaattggaggaatttaaaatggcttttaccgctgctgacgtaaagaagctccgcgaaatgaccagcgtaggcatgatggactgcaagaaggctctgaccgaggctgacggcgacttcgacaaggcaatcgagcttctccgcgagaagggcctggccaaggctgccaagaaggctgaccgcatcgctgctgagggcctggtcaaggctaccgtatgcgacaagtgcggcgtaggcgcgatcatcgaggttaactctgagaccgacttcgttgcaaagaacgctgacttccagcagttcgttgctgatctggctgctgtcgttatcaaggacgctccggctgacgttgaggctctgaaggcctgcaagatgggcgagggcaccgttcaggacgctctccaggagaaggttctgaccatcggcgagaacctgcagatccgtcgtttcgagcgtttcgacgactccaccgttaacgttgcctacaaccacatgggcggcgtaatcggcgttctggttgctctggaggtttctgacaacctgaaggacaacgagaccgttaaggagctcggcaaggacatcggcatgcaggctgctgctatgaacccgtccttcctcgacaagtccgacgttgacgaggctaccctcgcaaaggagaaggagatcctcctcatccaggcactcgaggagaacaagaccgctgctaagccgaagccggagcagatcatccacaagatggtagacggccgtatcggcaagtactacgaggagaactgcctcctgcagcaggctttcgttaaggagaacaaggtctccgtcgagaaccacatcaaggctgttgccaaggagctgggcggcgagatcaagctcgtaaagtgcgttcgtttcgagaagggcgagggcatcgagaagaaggttgacgacttcgcagcagaagttgcatccatggctaagtaatcttaattccatagatactttaagggcgtaaaggttgactttacgcccttttttgcgttacaataggaaaaacaggacgcgcacggcgcggaaaggacaatctaaatgaagctgttttcctcttttcaggtaaagaacatgacgctgcgaaaccgcactgtcatgccgccgatgtgcatgtacagcgcggaaaacggaatgccgaatgcgttccatttcacgcactacacctcccgcgccgtaggcggcgtcggactcatcatcattgaggcgaccggcgtcatgccgaacggccgtatttcggaccactgtctcggcctgtggaacgacgagcagatgcacgcgctcgcgccgctcgtttccgaatgccgacgcctcggcgcgaaggtcgcgattcagctcaaccatgcaggccgaaaatgcgaggcggaagagccggtcattcttgcaccgagcgccatcccgttcgatgaaaactctagaacgccgcatgaaatggacgagagcgactgcaaaaacgttgtaaaggccttccgcgacgcggcagagcgtgcggagaaggcaggctttgatgcagtggagatccatgcggcgcacggctatctgctcagcgaattcctttcgccgctcaccaatcttcgtaccgatgcctacggcggttcgactgaaaaccgctgccgcctgctcatcgaggtcctcaaggcggtgcatgaggtctggccgcaggaaaagccggtgctgctgcgcgtctctgccgaggactacgagccggacggcatgcacccggacgagatggcgaagatcgtggagctggtaaagccatatgtcgatgtgctcgatgtgagcacgggcggcgttgtgccgacgcctccttcggcgcttttccccggctatcaggtcaggatcgcggaatatctcaggcagcagagcgctctcccgaccatcaccgtcggcctcatcacggagccgcaccacgcggaggagatcctgtgcaatgagcgcgcagacctcgttgcgctcggccgtgcactgcttcgcgagccgtactgggtgatgaacgcagcgcgcgcgcttgatgttccgtatgactggccggaaccgtatcagcgcggatacaagacgagaaagtaacagataacgcagaaaagcggccgcaaacggccgcttttctgttatacattttcagaaagggaacacagggtaattcctgtgcggcaatgccgtggcttattcgccccagtactttgcaacgtgagcgcgggttgcctcagcagccgtcttgatgttctcctcgttggacagcttgtagtagtccggacggaacacctccatggtgcagacgtcgccttcaaagccgatcttcttgagggtatcagcgtagcgcttgtgatcgaggcagtcgcccggctcgcccggccacagacgcttctcgtcgttgttgtaagctgcgccgcagggcatattctccatgccgttcaggtgccatacgaagatcttcttgccgtcggccttctcgagagcctcaaaagaagaagccattgcatggaaatgatactggtcgagggtgatgccgacgagcggagagttcacttcctcgacaatcgcgtaagcgtcctcgaagcggttgatggacatggtcgggcagccgcagaactcgatggacagcttgatgccgtgcggctcaaccttcttgaccatttccttcagtacagcgacagcgtcagccttgatctcgtcgagggtagccggaacggtgaggtccatggacggaacgacgacgatcatcttgcactggagcttgttgcagtcctcgatgatctgatcgagctttgccataacggcgtccttttcctcctgggtctgcttcatgttgaagaagatcagggcgttgtaggacagcatcttcagatggtgcttcgggtcagcgaaccatgcggccagatcgtcgatggtgtacttgcctgctgcgatctcgcggtcgaggcactcggactggatgtcgatgtagtcaacgccgtacttctcgcacaggtcgagatcctcgagtacggagtgattttcgcagaaacggttgcagccttcgttaaaaccgattttcatgatggaaaactcctttattctttcttatctttaattaaggtgatatgcggagcgggcaggagcgatatcgctgtccgctccgcaagtgatacggtcttacttcttgtagaaatccggggtgccgccggttacgaccttctccggcacaccggaggtctgggacttaaccagcgcgtcagcggtgatggaagcaacgtagccgtcccatgcagaggagccgccggtctcgcccttgagtgcgtggtcgacccagtcctggatctcgacgtcgtaggagtcgatgaagcgcaggatccagttgtcctcgatcttggtagcgacctcgtttgcgtagcgaacggtcgggaaggacgggcacggcaggtttacaacgccgttctcgcagacgacctcgcagttgatgtcgtagccgaagccgcagtttacgtttacctcgagcatgttgatgatgccgcccttggtcttcatgatcatgatctgcgggtccttcagcgcgttcttgaccttggagttggtcttcggcatgatgcactgaacctcgtcccactcgtcgtttaccagccacggcagaacgtcgatctcgtggattgcggtatcggtaacagccattgcggtggtgtagtcatcggcaacgccgtctgcacggtgggtgcacttgatgaccatcggtgcgccgaacttgccggaatcgatcagctccttaacctgacggtagccgcggtcgtaacggcgcatgaagccaacctgtacgaggtgcttgccgccggccatctcggcctcaacgatctccttgccgtcagcagcggtgttcgccagcggcttctcggagaataccggcttgccggccttgatagctgccagaaccggacccttgtggaactgacccggggtggtaacgacgactgcgtttacgtccggatcgttgattgcttcgttaaagtcggtgtaaaccttggtgccggcgccggcgatctcagcgcccttctttgcgccctcctcgaatacgtcgcatactgcaacgatcttcgcgccgcggatgcggttctggatgcgttcgatgtgctcacggccgatcatgccgcagccgatcagtgcaatgttcaggttttccatgatgagttcctccttggataagtaaatatgaaataatgaatggaattttgtgatttgctgtagctgtctgtgtcaaatgcacgcctgtcggtttttcgctcgtgcagtcttgcgtgcacttcgcttttcatttgacgagatgattataactctgcgttcacgagaacgcaagaggaaatttcgaaaaatttcaaaaaaatttttgcggttcgggcagtgtgagcacggaaaagtgtcacactgccgccgcatagggaaaagggagaaaatggtttatgctgcgatgccgagaggagagaagaagatatagatggcaaccgcaaggataagaccgatgatggatacaacgtgacggtacttccacggggtcagatcgaccgcgccgacgtcctggatctcgtactcctcagccgggcgatacttgttcagataccacatgatgagcagctcgatcgggaacagaacagccattgcgtacagatagtggatggggttcgtgctgcccgggtagcagggcttgatgagcaggaacgcaccgtagcatacgacgtggaaaatggtgatgaccttgggcatgtacttcgggatgcgcttgaacatgaagatgccgaggatggtgcacagtaccggcagggatacaaactggctcatggagttgaggaaggtggtgatgccgcctgcgttcatgatgaacggagcgatgacgatcgagatgcagcctgcgatggtgccgtagatcttgccgaccttgacgcacttggtgtccgaagccttcggattgatggaagagcggtacaggtcgagggtgaacatggtggacgcggagttcaggaccgagttgaacgaggacaggatcgcgccgaacatgacagctgcgaagaagcccatgaccggcttcggaacgatctcagagatgagcgccggataagcgaagtcgatcgcggaggagccggctgctgcaagcttgtcctggatggacggcagatagaaagcgatgatgcccgggatgacgaggtacagagggccgaggcacttgaggaagccgcagaaaatagcgcccttctggccttccttgaggctctttgccgcgagagaacgctggacaaaggactggttggtgcaccaccagtacaggttgttgaagaacataccggtgatgatcagcggccacggaacctccggctccggtgcgttccatgcgttgattgcgttcatcttggccggatcagcctcgatcatgtactttacgccgtcgagaatgccgtgaccgccggttgctgcggacagagccgcgaagccgaggaacgggatcatcagaccgccgatgatcaggccgatgccgttgatggtatccgaaactgcaacagccttcagaccgccgaagatcgcgtagcagccgccgatgatgccgatgataacgcagaggattgcgacagcgacgaatttgctggtgcccatgatgccggagatgtcaaaaatctgctcgaaaacaacggcgcccgagtagaggatgaccggcaggttgaggatggagtacataacgacgattacgaccgagaacatcgtcttggtgcctctgccgtagcgctcctccatcagagacgggatggtcatggcgcccattttgaggtatttcggaaggaagtagtacgccagaaccagaagcgtgaacatcgagccgacctcccaggcgatcgggcccatgttggttttccagctctggccgttcagaccgacgagctgttctgcggaaaggttggtcaggagcagagaacctgcgatgaccacaccgggaagtccgcgtcctgcgaggaagtagccttcggcggtgtcgagctgttcgtcacgcgttttccatgcggaaatgatggcgaccagggcggtgaacagtacaaacgatatgcctgtccatgcgagcgaggagaagaatgtcatttggataacccccatatcattgatgttttgcgttctcgtgaacgctgtccctctaaaaacaatccccttgagcttttccggcgcgttctcccttgcaccgagcggcttgtttttgtggggatttgttttgatgggtatagattatcacgtttattttcggtttgcaagagggaaaagtgcatttaatttaaatttaggatttgctacaaaaaacaggggtggtttttgtagaaaaaatcggagtacagcgaaaaatgcgtgcatttgcgtgcaaaatgatagtaagaatacccaaaggaatagggatgacgttgtgcagtatgttgaaatggttgaaaacggaggaggatgcttgactgcatgatcatcgaaaaaggagagaaaaatgttgaaatacatcaaaaatgcacgcatacaattaaaatagtatgcgtgcgcggaaacgcaggagcgcataataacagttttataaaaatgcgtgcatttttcaaaaaaaagcattgcaagctgcgtgcattatgatatactataaacataaagagaaaccaaaaggagggaaacattatggcggtcaccgctcagcagattgcggatctcgcgggagtatcgcgcggcactgttgatcgtgcgctgcacaatcgaggccgtgtcaacccagaagtaaaggaaaaaattcaaaaaatcgcactcgagctcggatataagcccaacctgatcggacaggcgctcgtgcgctccaagcaggatttcaagctcggcgtgattctccagtccaccgaaaccccgacgatgcagatcgtgcgtgcaggcgtgctgcgtgcagcggaggagcttgcaggctcaggcgtcgagctcgttctccgcgattttcagggtctggacaccgagctgatgctcgaatatatagaggagctggtctcggcaggcgtgcagggtatcgcgctttccccggataccgcgccggaggtgcggcagtgcattgatgaactgcacgcacagggcattccggtcattaccttaaatgccgacgcgccgggcagcaaacgcctgtgctttatcggcatggacaactaccgcgccggtcagacggcggcgtgtctgctccgtctgatgctgcccgagggcggaaaggtgctcccgctcgccggtcatctgaataatactgcgcacaacaaccgcctgaacggctttctggatgccatcaaggcggaaaatacgctcaatatcagcacactggcgtttcagccgtgctttgaccgcgatgactattcgcacgagatcacgcagcatgcactgcgtgcaaatcccgatcttgcggcgatctatgttgcctccaacggtcagaagggcgtgtgccaggcaatcgaggaggagggccggaagggccgcgtgaaggtggcggcgttcgacctgaacgagctgaacatggagcttctgcagtcggacagtctgagcttcgtgctcgatcaggaggcgttcgagcagggctaccggccgccgtttctgctgtatgaatatcttctgcacaagaaaaaacccgaaaaagagctgctctacacggatatcgccatccgaaccaagtataacagcgacatggcgctcgtctgcacgactatgcagaacggcctttaagactgctgaaaaaggtgcgtgcaccgaacgctgagcgttcccgtacacgcaccttttctgctgccttttttcagtccgcgcgcagccagagcgactgccgcagatcgacatgcgtttcatctttgaaggccgcgccttccgcgcggagcaggtcagcctgctcagaccagcccggcgcgatgcggccgacgtggttgacaacgcggtgacaggggaaatgaccgtagtattctgcgtgcgaaagcacgcgcgccaccagacgcgcatttttcggccgcccgatcatgcacgcaagctgcccgtaggtcgcgaccgagccggcggggatctcctcgacgacagaaagcacctgccgcgcaaagtcatcattcagtctggttctgctcatattcggtctccttttatcggcatacgcttctttattataggcagcgccgcagctttcattgtgcggtgctgcctatagtatagcacgtttcgcggaaaggggaagacagattgttttttcggcagaaaatagacttttgctgtgatgcgtagtataatataataatgataacggacaggaaaggagaaggagcatgacgattttaacctgtgattgcggatatgagatctatattatggatgaaactgaggcgacggcgtggcagtgcgaccgctgcggtcagtggtacgacttcttcggcgtcaaggtaacgccgccgtccgaacggaagcaggagaaaaacccgaacctcgtcaactggagcgcaggggaggagctgtaacctaaggcaatgccgcacaaggaaagcggcgctgtttgctcgcaaatcgcttttgtcccgttatgcggtattgcctgaaaaaagtaacaggaatgtaaccttcattcctgttttttgatgctataataagcaaaggaaaggccggacaccgcgaaaagcggcgtcagacagtctgccgcggaaatcgcttctaaagcagacgacccccgcgtaaaatacagaaagcattaccggggtgtaaaaggcaggaagggaagagttcaaaatggcatatggtacggcgaacagctatgcacgtcctcgccgccgccgtcgaaaacgcaagagccactacggcgtgctggcactggtgatcgtgctcctgatcgcgctcatcgtgctcgcggtcaagctggtgacgacagcggtcagcactgtgctcggcaggaccggaacgcacgagatcgtctatcaggtggacaacaagctgggctactgcgacggaaagacgttcgaccttgaggcggcgccttaccgcgatcagagcggcaacctgttcgcgccgctccagtctctgtgcgatgagcttcagatcgatctgacctgggacgaaagcacgaagagcggcacggcagtctggaacaagcagaccgctgagatcaaggcctcgagcaccaaggttcagatgggcgaggagagcaggaacatggcggccgcgccttcggtgaaggacggcgtcgttttcatcccggcgaaggatttctgtgcggcgttctcgtggaagaccgccgaaaccgccgaggagcagggcgatctgctcattatctcgcagaaggacgacgagctgaccgaggacgcgatcaagcagatcacagatgacgtaacgaaggttctcggcccgtccgagaagcagatcacgggagacagcattctgatgcgcaccgactcggacaaggcgctcgttgccggcgagaccaggaccatggcctctgacggcgaaaagctgggcgagggcgtcatggagcagaacggcacgaaatacgttccgctgaaggcggcgatgaccgcgctcggcggcacggcggagttcgacggtaaaaagacctggacggtaaaatataatgataccgaaaccacggtcacgacgaacggaaaattcaagatcgacggcaatcgcgtcaagggcgacgatttcacagtctggctcgacgaggaaaaggaccggttttacgtctctgctccggcgcttgcgcagatcatcggcagaaactataccgatctcggcgacggtgcgtttgcattcacgacgctctcgcttgacggtctggacagccagaaaacctatctcgactcgctgcgcagcagtttgagcgacgcagtggacggagatatcccggaggcggacgtttatatcgcgctgaccttcgacgacggcccgaccggcaagatcgaaaactatccgaacggtctgacgaactatctgctcgacggactcaaggagcgcggcgcgaaggcgacgttctttgagtgcggctaccgcatcaaggagtacagtgcgtgtatgccgcgtcagctcgaagagggcagcgagatcgcgaaccacacgatgaaccatccggattcacgcctgaccggcctcagccgcgaggaagtcgatgtgcagatcaactccaacagcgaacttatcaaagaaaagaccggcagtctgccgacgctgctccgcccggtcggcggcggcgtcaacgatacggtcaaggcggtcgccaaggaggcgggcctgccgatcatcaactggagcgtggacactgaggactggaagtaccgcgatgctgagcacgtaaagcaggtcatcgtggagcaggcaggcgacggcgatgttgttctgatgcacgacctgtacccgacctcggtgaagggcgcactcgctgcgatcgacgagcttcaggcacgcacggacaagacctatgcgttcgttacggtttcgcagctggccgcaatccacggcatcacgctcgaaccgggcgtggtctacaacggcctgagcagcaaggtcgcacaggaaatcaaggacggcacctattcgccggctgagttcacttaacaagacagaaagaaaccgcttcgatgcgaacagataagcatcgaagcggtttttctctttagaagcggtaattcgggaaatatttcttgacgaacgcaatatccttcacccggaaggtctttccgtcgaggtattgcagcgccccggcgtcgctctcgaaggcgaaggtcagctcatacgaatagagcagctgaccggtctcgccgcaggcgcggttgcggtcgccgcggccgtacttgccgtcgccgagcaagggacagccgatcgaggccatgtgggcgcggatctggtgggtgcggccggtgagcagcgtgcactcgacgagtgagagctccttcgtggaggcgagcgtgcggtagagggtctttgcggtcttggcgcccgggaccggccggtcgtgcagcgtgacctgcttgcgcttttcatcgcggcgcaggaagttttcgatgcggccgcgcggcggctcgggtctgccgagcaccacgcagacgtatttctttttcagctcgtgctccttgatcttgtcgttcaggatgcgcagcgcctcggcggtcttcgccgcgatgacgatgccgccggtgttgcggtcgatgcggttgcacagagccggggcgaacgacgccgcgtcgtccggattccatgcgcccgactggtagagataagcctggatgtgggcgatgagcgtgtcgctgtcgcccttttcgtccgcgtgcacgaccatgcccggcaccttgtctgcgagcaggatgttctcgtcctcgtagaccacggtcaggcgcggcgttttgatgcggcggaacgcctcctcctcgcgtacctgttcaaagtattcgtcgttgatgtagagctgcactttgtcgccctcggcgaggcggcaggcagcctcggtgcgcttgccgttgagcttgatgcgcttgaggcgcaggtacttgtgcatcatgccgcccgacagccgcggcacggctttctctaaaaatttattcaggcgttgcccgctgtcgttttttgtgatataatattctctcaaagtaaagtcccttttctggcgtgtgttaccgtttatcgtatgtttatatagtataacgtattttacgcagaaagggaagtgcggcggcaaaacaataaaatacgcttttgctgtaaaaatcagttgacaaagaacgattgattgtagtatactgttttagtaccatgtgaggttgacatgaagattgagttaaaaaagctgaatgcgctgcagcatgccgttcttccgttttccgaggtcatcgacctgaaggatgagaagatgtacggcagaaatccttttcagagtcccgtctatgtggaaggcgaggtatcgaatgagagcggcgtgttacgcctgaagggcagcatcaaaaccgtgtactccaccgagtgcgcccgctgtctgaaaccgctcgacattccgctcgaagcggaagctgacatgatcctgtccgacgaccctgaggcggaggaagaggatgatcttttcgtgctgaccggcgacagcgtggatcctgcggacgtacttgtgccggcattgatcctgcaggtacagatgacttatctgtgcaaagaggactgcaaaggcctctgtccgcactgcggcgcagaccgtaacgtgaccgaatgcgactgcgagagcaggcagatcgatcctcgttttgccgcgctgcgcgccctgctcgataacgataagggcaactgattattgttttcattttattttaacaagatttgagtaggaggtgtatccaccatggcagtacctaagagaaaaatttctaaggcccgtcgcgataagcgtcgtaactcccactggaagctggacctgcccggcatgagcaagtgcccgaagtgcggcgagatgaagctggcgcacagaatgtgcaaggcttgcggctattacaatggccgtgaggttgtcgccgttaaggaagcgtaaggctcaaacagaacaaaaagaatggggaaggcgcacgctttcctcattttttttgaaaaattcctgcgcacacagcgcagaattatcacagatttgattgcaattttcctgcaaatgacttaaggcaacaccgcataattaaagctgcggtgctttgcggaaatttttcaccctgattgcgttgcgatttcttgcaatacgaaagtattgctgcaaaaccgcgccttatcagagcgcaaaatttgctcgcaaatcgctcttgtctaattatgcggtattgccttaaactgaccttgagggagggaaaacctatggcaaaacctatcgttgcgatcgtcggccgtccgaatgtcggcaaatcgcagctcttcaaccgtctggcaggcaagcgcctgtccattgtcgaggacacgccgggcgtaacgcgcgaccgcctgtatgcagacagcgactggcgcggccgtgacttcaccgtgatcgacaccggcggcatcgagccgtccaacgacaacgagatcttacagttcatgcgccttcaggcggagaccgcgatctcgcatgcagatgtcatcatcctcatcaccgacctgcgcaccggcgtcaccgccgccgatcaggacgtagcgtccatgctgctgcgctcgggcaagccgatcgtgctcgcggtcaacaaatgcgacaagccgggcgatcctccggcggaattttatgagttctacaatctcggtctgggcgagccgttcggcatctccgctctgcacggctacggcgtgggtgagctgctcgacgcggcttacgagcatttcccggcggcagacgaggaggaagaggacgacgagcgtatccgcgttgctctgatcggcaagccgaacgtcggcaagtccagcctgctcaaccgcgtgctgggcgaggagcgcgtcatcgtctcgaacgttgccggcacgacgcgcgacagcgtagacgctgacgtagacaacgcgcacggcaagtttaccttcatcgacaccgccggcatccgcaaaaagagcaaggtggacgagaagatcgagaagttctcggtcatgcgttcgctgctcgcggtcgagcgtgcggacgtctgcgtcatcatgatcgacgcgacagagggcgtcaccgagcaggacaccaaggtcgccggtgaggcgcacaatgccggcaaggcgtgcatcatcgtcgtcaacaaatgggatctggtcgagaaggacggctccaccatgaaggagtatacgctccgcgtgcgcgagggcctggcctatatgccgtatgcgcccgtgctgttcatctctgcgcagaccggtcagcgcgtggacaagctgttcgcgctcatccatgaggtctacgagcagaaccatatgcgcatcccgaccggccgcctgaacgccattctggccgaggcgacggcgcgcgtacagccgcctaccgacaagggccgccgtctgcgcatcttctacatgacgcaggcatccacctgtccgccgaccttcgtctgcttctgcaacgacgcacgcctgttccacttctcgtaccagcgctatctggaaaatcagatccgcgaggtgttcggcctgaccggcacgccggtgcgcatggtcgtgcgcgagcgcggcgacaaggaataaccgtgcgctgcccgaaaaaatgaattctgggggaaaaacgtcatgacacttacgcattttgcgatcattgcggtctgcgcgtatctgctcggctcgctgagctttgcgatcatcgtcagcaagctgacactcggtaaggatatcagaaactacggaagcggaaatgcgggcctgaccaacgcataccgcaccatgggcgcgaaaaagacgctgctcgtgctgctcggcgacatcgccaagggcgcggcggcggtttcgatcggcatggtgctcgccggtccggtcggcaagctgacagcaggaatcttcgtcatcctcggccatatgttcccgctgtacttcggcttcaagggcggtaagggcgtgctcgtcggcgcggtcatgctcgcgtttttcgactggcgcgtattcggcatcgcctttgcgctgttcctgctgtcggtcatcgtgaccaaatggatctcgctcggctcgattctgggcgcggtcagctttcccgtcactacctgggtattctatcgcgacccggtgctgaccgcgatggcgctcggcatggcggcggtcgtcgtattcatgcaccgctcgaatatcggacgcattatccgcggaaaggaaaacaaattttccttcaagagcaagaaaaccatgtctgactgagaggagactgcaaaatgaaggtttttgtactgggcaccggcggctggggcatcgcactcgcgatgctgctgcatcagaacggccatcaggtgacctcgtggacctatcagcaggcggaatgcgacctgctgcaccgcgaacgctgcaatgaaaagctgctgccgggcgttgtcatcccggacggcatcgagatcacgacggatatgtcgggcgcagcggatgcggagcttgttgtgcttgcggtgccgtcgttcgcggttgcgtccacggcggagaagctcgcaggcatcgtaaagccggagaccgtactcgtaaacgtcggcaaggggctggacagcaaacatggctactgccgcttttccgagaccatcacgcgcgccgtgaacggcagaaatccggtcgttgcgctgaccggtccgacgcacgcggaggaggtcgcgcgcggcatcccgaccgcaatcgttgcggcgtctgagagccgcacggcggcggagctgacgcaggaagcgttcatgaacgacacgaatttccgcgtttacacctcgtccgacatcatcggctgcgagctcggcggcgcgttcaagaacatcattgcgctcggcgccggcatttcggacggtctgggtctgggcgacaactccaaggcggcgtttatgacgcgcggcctgaccgaaatcgcccgtctgggcatcaagctcggcgcgaagcaggagaccttcgccggtctgtcgggcgtgggcgacctgatcgttacctgctgctcgatgcactcgcgcaaccgccgcgccggtatcctgatcggcaagggtgcgaccgctgaggaggccatgcgcgaggtcggcgcaacggtcgagggctactacgcgaccgaggccggctatcaccttgctaagcagcagggcgtttccatgccgatcaccgaggcgatgtacggcgtgctgtacggcggcctgtccgcaaaggacggcatcaggctgctgctcgcgcggccgcgcaagggcgagcacgaggaagtgtggctcggctgaggccttcgccttctaagggggacgctgtcccccttagatacgcccccggttccttgcgaaaccgggggcgataaccccctctcgtccgcacggcggacgaggccgcgccgcggcggcgcgggcagaggtataaaagtccggcagagctggacttttatggggaatttaatgcggcgctctgcggagcgcctgtcctgcctgttttgccgaaggcaaaatgcggcaggaaattgcgcccggagggcgcagaaaaggcacgcctttggcgtgccttttcttactttgagagggagaaagtttccgtatgggaactttcgggcgttcgtgtttttgtaaagtcaaaacacagattgtcggcaaacgaagtttttcgacagtctcgcttgccggcggaacggcagttccgcggcagattatagtttcatggcccgcgcaagcttgctttcgttctcggggacaaggtcgagctggtcggccaactcggcggcgagggcatggaacgccttttcgtcgcctgcgacatattccagctcgatctcgcacagcggcgcgctccgaccctcgcggcgcagctcacccttgtcgagcgcaagctcgcagaccgtatcctgctcctgaagcagtacggcgcagcggcggaacgagaccgtgcaaatcttcttgagctccgcgtgcagcagttcgccgcacagcgcctcgggcgcgcccttttcgggcagctgccgcagaccgtcttcgagcgtacctgcatcgcactgatattcctcgtgtgcgcgcagaccgtccgtgctttcctcctcgccgcgcagcttcatgcagcacaccgtgcgctcgttttcgcggcgcaggcgcagcgcagccttcttattgcgcagcatcccgtccgcggtatcgaaatagctcgactccatgcggatggtgcggctctggctgccgatgcgcgaggaggcccacagcagcgcgcggttcagcagcagctcgtccgcacgccatttgtattccttctccatcgttttattcatgctcttacctgtccgtttccgtagatgatatacttggtcgtggtcagcgcattcagtcccatcgggccgcgtgcgtgcagcttctgagtggaaataccgatctccgcgccgaagccgaactcgaagccgtctgtaaagcgcgtggaggcgttgacatagaccgccgccgcgtccacttcctccagaaaacgctgggaagcgtcgtagtcgcgggtgatgatgcactccgagtggccggtgttgaagcggttgatgtggtcgatggcctcgtcaagcgagtcgacgaccttgcaggagatctcgtagccgaggtattcgcggccgtagtcttcgtcggtagccggaaggatggcgtcgccgaggatttcggtcgtgcgcgcgcagccgtggatggtgacatggtcgtccgccagaccctctgccgccatcggcaggaatttcaacgcgacatcccggtgcacgagcaggctctccgccgcgttgcacacgctcgggcgctggcacttggcgttgacaaggatgttctttgccatttcgaggtctgcggaagcgtcgacatagatatggcagttgccggttccggtctcgatgacgggcacggtcgcgttcataacgaccgagcggatgaggcctgcgccgccgcgcggaatgagaacgtcgagatagccgttgagcttcatcatctgagtcgcggtctcgcgcgaggtatcctcgacgagattgatggcgttttcgggcagaccgcaggaagcaagcgcctcgcgcatgatcttcgtcaggcacatcgaggagcggaaggcctccttgccgccgcgcaggatgcaggccgagccggccttgaagcacagcgccgccgcgtcgacggtgacgttcgggcgcgcctcataaatgatgccgatcacgcccatcgggacgcgcttctgaccgatattgaggccgttcgggcgtctgcgcatccagagcacctcgccgaccgggtcgggcagggcggctacctgacggcagccctccgcgatgcccgcaatgcgctttttatcgagcatcaggcggtcgatgaggccgtcgttcagtccggcggctctgccgttttcgatgtcgacggcgtttgccgcgatgatttcgtctgcacgcgcctcgagcgcgtctgcgatggcgagaagcgcacggtttttatcgttcgtgccgagctttgcgaccgtgtatttcgcacgtcgcgcgtcctcggcgatttcaagaagctgtcgcattgattttcacctctgagttattcattgtttcgggaaaagagcgttccgacctgcttgccgtccacgatgtcgtacagcaggccctgcttgtcgccgttggccacgagcatggggatgttcgcgtccatgcacagctcggccgcgccgatcttggtcgccatgccgcccgtgccgagcgaggagccggcgccgccggccattttgcgcaccttggaggtgatgaccgggacatgggagatcagcttcgcctgcggattcttgcgcgggtcggagtcgtacaggccgtcgatgtcggagaagatgacgagcaggtcagcctcgcacatgcgcgcgacgacggcggacagcgtatcattatcgccgaagttttcgatgtgcttgagctcggcggtcgcgaccgagtcgttctcgttgatgatgggcacgacgccgatcttggtcagctcggtaaacgtgttatggatgttctgacgctgctcggtgtcgacgatattctcgcgcgtcagcaggatctgcgcgacattgatgccgtattcaaggaacattttatcgtaaatgtgcatcagctcgcactggccgacggcggcggccgcctgctttacggcgagctcgcgcggtcgctccttcagacccagcttggccgtgccgaccgccactgcgccggacgagacgagtaccatctcgaacccgcggttctgcaggtcgctgatggtgcgcacgagctgctcgatgcggcggatattcggcttgccgttgtcgtaggtcagcgttgaggagccgaccttgacgacgatgcgccgcacctctttcatgttcagcataatcaataaacctccggaaaatacggcggaagacagttccgtccgatagatacctctattttagcacagcaaagcgaaactcacaagagcgcagcccggcttttccgttcaggggacgtacaaaatccacctgacgcccaaacgccattttgcgcatattttccgttccacaaacacgaaatatgtggtatactgtaatttatgataatatgccctcttgcacgttttcgaaaggacgggagaaaatatgaaaaacagaattttactccgcatcgccggtcagaagtacacgctgatggcggatgagtcggtggaatacatgaacgaggtcgcctccttcgcccagcaggtcatcgtgtcctgcggcggcagcgcctcctttgcctcgacgcgcgcgatcgcgctggcgtcggtcaatctggccgaccagtgtatcaaggctaagcgtgaggcgctcgcagcggaggaaaaatgccgcaagctcgaggcagagctcgaggcgctccgcagcggcaaaaagactgaaaagaacggaaaagacagcaaatgaacgtaaaaattcctgaacttcttgcgccggcagggtcgcccgagggcgtgcgcgccgccgtgcagtcgggcgcgggtgcggtgtacatgggcttcggcaccttcaatgcgcgccgcaacgcgcagggcttttcgcacgaggaaatggcggacgccatcgcctactgccgcgcacgaaacgtaaagagcaacatcacgctgaacatcctcgtgggagaccgcgagctggacgacgcgctcgaggacgcgaagttcctgtatgaggcgggcgcggacgcgctcatcgtgcaggatctgggtctcgcgcggctcatccatgcgcacgcgccggatttcgctctgcacgcctccacgcagatgaccatccacacgctcgacggggcaaggcaggcgcgcgacatcggtttttcccgcgtcgtgctcagccgcgaatgcacgcgcgagcagatcgagcagatcacgcgcgaggcaggcgtcgagaccgaggtgttcgtccacggcgcactgtgcatgtgctattcgggtcagtgctacctgtccgccgtcatcgggcagcgttcgggcaaccgcggtctgtgtgcgcagccgtgccgcctgccgtacaacggcggctacccgctctcgctcaaggatctgatgctcgccggtcacgtggcggagctggcggactggggcgtgtcctcgctcaagatcgagggccgcatgaagcgcccggagtacgccgccatcgtcacgaaggtctacgccgacctgctgcgcgagcacagaaagccgaccgccggggagcgcgacatcctgcgccgcgtgttttcgcgcgacggcttcaccgacggctactacaccgggaaaaagggcgacagtatgttcggcaccaagaccgacgtgccgatgaacgaggtcaaggcgctctatgacgaggctgcgcgccgctttgccgagggcaaagaagcgccgctcgtgccggtgaatctgttcttcagcgcgcgccgcgacacgggcgctgtgctgagcgccggagaggtgaccgtgacgggcgggacggagcaggcgaaaaaccgtccgacgaccccggaaatggtggaaaaatcgctctccaagaccggcggcacgccgttttatgtgcagaacatgcatatcgaggtcgaggatggtctggtcgtcccggcgtccgtcatgaatggcatgcgccgcgatgcgctcgcgcttctgctcgccaagcgctcggtcgcgccctcgcgcgactggatggacggcaatgtgctgccgcgcgacgaggaggcggcgtcccgtgagggcttccgcggctatacggccgccgtccgcaccgaggcgcaggcgaaagcgctcgagggtctcggactggaggccgtctatgcgccgctcgaggtcgccgcgcgcaccggccttccggccgtactgccgcgcgtcttttccgacagcgagcagggacaaatcgaaatgctgctcggcgaggcgatgagccggggaacggacacggttctcgtcggcaacatcggccacatcccgatggcgaagcgcctcggctttgccgtgcacggcgatttcggtctgaacgcctacaacagccgcacgctgtgtgcgctcgcagaaatgggcgtttcgcgccagacgctgtcgttcgaggcgcgtcttgcgcagatccgcgacatggagggaccgctcgagaccgatctcatcgtctatggccgcctgccgctcatgatttttgaaaactgcgccatccgccgccagcacgggggcaaatgctcgtgtaaaaacggcgtgaccgtgctgaccgaccgccggcacgagagctttccgctgctgccggagttcggctgccgcaacacgctcatcggcaaccgtccactgtgcctgcgcgaggatttcgcgcggctcggcgtgcagactgcccgtctgctgttcacaacggaaagcccggaggagtgcgcacacatcgcacgtgcgttcctcagcggtgcgccactcgagggcgagttcacgcgcggcttatataaaagaggagtcgaataaatgaaaatcgtacttgcatccggctcgcccagacggcgcgagctgctgagccttatcacagaggattttgccgtctgcccggcggacgcggatgaaagcctgcgcgacggcgcgccgctcgcggacgaggtcgtccgcctgtcgcgcctcaaggccgaggcggcgatgcagtcgcatccggacgcggtgtgcatcggctcggacaccatggtgaccatcgaccatctgccgctcggcaagccgaaggacagagcggacgcggcggatatgctgcgccgtctgcgcggccgcacgcacgaggtgctgaccggacttgcggtgctgtcgccggacggcggcgcgcagacgctctgcacccgtaccgaggtcacgttccgcgacttttccgaggaggagcttgcggaatatctcgccaccggcgagccgctcgacaaggcgggcgcctacggcatccagggccacggcgcgctgctcatcgagggcatccgcggcgattattacagcgttatggggcttccggtcgcgccgctcggcgtgatgctgcggaagctgaacgctgcccgttgagaggagatttgttttgcgcagaagaaaaagcgtagagccgcggtttttcgtcggaatcgccgcggtggccgtgctgtgtatcctgtcggccgtgtacagcggcgtgacgggaaatccctcgccggtgagccgcgcggcaggcgcggtcatccgcccggtgcagcgccttgcgagcggcatcggcggcgtgttcggcagaggcatcggctattttaccgagttcgacgagctgaaggcggaaaatgaagagctgaaaaagcagctccgcgagaatgagcagctggtgcgcgacgcacaactcgccatcgaggagaacaaccgcttccgcgcacaggcgggccagcctgagcggcagcgcaaccttacgaccgtgaacgccgaggtcatcagccgcaatccgggcgacaccgcagtcacgctgacgctcgacaagggcaccgcgcacggcgttgcgaagggagacctcgtcacgacgatcgacggcatggtcggctacgtcagcgaggccggctcaaatacgtgcgaggtcacgaccgtgaccgacgtggacatgcagtgcggcgcgctcatcacgcgcacgcgcgagaccgccatcgcggagggcagctatgacctcatgagcgaggaccggctgcgcctttcctacctcacggcaggcaatcaggtcgttgtcggcgatacggtcgaaacctcgggccgcggcggcgcctttcccaagggcatcatgatcggcacggtcgagagcgtgcagcccgaggagaccggcatttcgtattatgccgtgctgcggccgttcgtcaacgtctcgaacgtttcgagcgtgtccatcatcaccgatttcaccgacacaacggagtgataccatgcagagagaactgatttcaatcccgaaaatgctgctgtacgctcttgtgaccgttctcgtctacgtcatccagacgagcgtgttcggcgcgcatccgctgttcggctaccatgtcgatctgctgcctgcggccgtgacggcggcggccctgctcgacggcccggtcgagggcgcggtcgtgggtctgctcgccggggtgctgtacgacgtcggtctggtcggcatggacggcatttatccgatctatttcatgctgtacggcctgctcggcggcctgatcagccggacggcgctcgccggcggctttctctccatggtgctgatgaacgccttcgagatgctgctgctcggcatgctgcgctattttgtgcagctcatgcgggagggtgcgtccttcctgctcgtgctgcatcagacggtcggcggaacgctcgtcgcgtgcatgctgtgctttatcgtctatctgcccatgcggcgcatcagccgcgcattttcgagggacgaccggtggatataaaggagcgaccccatggaaaataaacaacaactgctgcaccggcttgccgcgctgctcgtcatgctgctgctgtgcgcaggtctggcaggaagccgtctggtcgacctccagcttgtgcacggacaggaatatctcgagcgctcggcgcagtttctgacgacgacctcgacggtttccgctgcgcgcggcgagatccttgaccgctacggacgtccgatggtctcgaacaagaccggtttttcgctcgttctgctgtattctgacttctgggagaataaagaggacaaatttgaccggctgctcgaccttgcacagcgcgtgcaggcggatgcggcaggtctgaatgtgacgggcgacgtgggcaaaacgctcgcggcggcgaaaaagcaggcgcagcctgcgcaggatgaatatacggacgaaaccgaggaggaagccggggaggcgcgtgcgctcctgaacgatatgctgccgatctcggcctccgcgccctacacctacaccgccgaggcggggagcagcagcatggccacgctgtccgcctatatcaaggacagctgcgagacgctcggcctgaccgctgtgcagagcgccgtccggcaggcgaaggaagcgccggtcgagtacgacgcagacggaaacgtcatcgacaaaacaaagcagatcgacgcgacagcgctggtctctccgaccgaatttgttgcggcaatgggaaaatatatgaccgaaaagctcggcatggcggcaaatctgccgcaggacgatgtgcgcacgctcgtcggcgtgtattacagcatgcgtcaggtcggcttcagcaagaccatcacctttacgctcgcagacgacatttcgatggacctcatcgcctacatcaaggagcatcacggggagtatccgggcgtcgaggtgcagagcgaagccgtgcgtcagtatgacacaacggctgccgcgcatgtgctcggaacggtgggcgtcgtggacgcgaccgagtggaaggacacctataaggaacttgccggttatcagatgacctcggtcgtcggcaagaccggtctggaaaaagcgttcgagagctatctgcacggctcgtccggttcgcgcacggtggagaccgacctcggcggcaacgaggtcgcggagcagtccaccgcggcgccccggccgggcgacaacgtcgtgacgacccttgacctcgacctgcaggaggtcgcggagcgttcgctcgcggaaaaccttgccggaaacggcaggggcggcgcggcggtcgcgctcgacccgaatacgggcgaggtgctcgcgatggcgtcctacccgacgtacagccttgcggattacaattcgaccgcagcggccgaggaccgcgcgagcgacagccgccatcccgaggtgaaccgcgtcacgagcggcgtgtacccgcccggctcgaccttcaaggtcctgtccgccatcgcaggtctggaggagggcatcatcgacgcgaacacccagatcacctgcacgggcgttttcgagtacggcggccagaaattcacctgtaaaaaccatgacacgccgatgacgctcgacgtcacaggcgcgctcaagtattcgtgcaacacgtttttctataccgtcggtcagaagctgaccggcgcgcatctggaaaagtggtccgagcggttcggcctcggcgtcgtcaccggcatcggcatcggcgagcgctccggccacgccgcaggcccgacctaccgcgcggaaatgaaaaaggccgacccctccacgcgcggctggcagggcggcgacgatgttatcgcggcgatcggccagtcggacaacggctttacgccgcttcagctggcaaactatatctctgccgtcgtcaacggcggcacgctctaccagccgacgctcgtgcggagcatcaagagctacgacttttcaagcgtggtcaagaacgaaacgccgagcgccaaggaaaaaatcgagctttcggacgaaacccgccgccttgtcatgcagggcatgagcgaggtcaccgacgagggcggcaccgccggcagcgtgttcgcggactatcccatcaaggtcggcggcaaaaccggcacggccgagacctatgagaacggcgaggcgttcgacaacggtctgttcatcgcgttcgcgccgttcgacgaccctcagatcgtcatctgcgtggtcggcgagggcgccggtcacggcgcatacgtcgcgccggtcgtccgcgatatgctcgacgagttcttcacggcggacaacgtggaaaatgttgacgctgtgccgacggaaaacacgcttttacgataagttttttccgagtgtccgcgcacgcagcagaaaaagtttgcctgaccgcttgtcaaattcatggcgttagtttataatgtaaccaaatagaacttacacggcctgcgcggaaaaatattcgggcaggctcactttcggaggctgtatgttaaaggtaattctggtggcgtccggtaagggcggaacaggaaagacctctcttaccgccggcgtcggcgcggcgctcgccgcaaacgggcatcgggtgctcgtcatcgacggcgactgcggccttcggaatctggatatcgtactgggcatgtcggaccgggtggtctactcgtttgccgacgtggcgggcggcatggtgcagctcgcggacgccatggcgcgtcatcccgtgtacgagacgctgtacctgctgactgcgccggtcagactgcccgctctgagcgagcgcggcatggaccagctcgcaaagcaggcagagcaggccggatttgattatctcatcatcgacggtccggcgggactcccggcggagatgtcctttctggcgcatatcgccacgcaggccatcatcgtcaccgcgaccgaccgcgcctgtgtgcgcggcgcggagcgctgcgcacgtaccatcgagcaggaatactgcatccagcgcatccgcatggtgctcaaccgcgtgcgtccgaggctcatcagccgcggccgctcgggcaacatcgacgacgcgatggacgaggcagggcttccgctgctcggcatcgtgcccgaggatgaggatctgatcgcctgcggcaacagcggaacgagcatcatcgcagccaaaaagcacggtgctgcgcgtgcgtatcagaacatcgcgcgccgtctggacggagagcgcgtgccgctgatgaagatttaaccgtcacagagagacaaaatctgacgttgacacaagccaaccatggggataaggaaggagacgtttggaaatgaacatagcactgatcgcacatgaccgcaaaaaagagctgatggtacagttctgcatggcatactgcggcattctggcaaagcataacatctgcgcgaccggcacgaccggcaaattcgtcgaagaggcgaccggcctcaagatcgacaagtgtctggccggcatgcagggcggcgaggagcagatctccgcgcgcgtcgcctacaacgagatcgaccttgtgctgtttttccgcgatccgatgtccaactcgcagtacgagccggatgttcacgcgatcgcacgactgtgcgatatgcacaacatcccgatcgctaccaactcggcaacggctgaaatgctcatcctcggtcttgaccgcggcgatctggattggcgaaatattgtcaacccgaagaatagaaagtaacaacaacagaacgctgcaccggatgggaaaaatccccgttcggtgcattccgtctgtcttgaggagaattgaaacatggaaaaagtgaaacccagaaccctttccggctttatggagctgctcccggcaccgcaggtgcagatggagcgcatcatgcaggtgctgcgcgagacctacgcgctctacggcttctatccgctcgacaccccgctcatcgagtcctccgaggtgctgcttgccaagggcggcggcgagaccgaaaagcagatctaccgcttcaccaagggcgacagcgacctttcgctgcgctttgacctcaccgtaccgctcgcgaagtacgtcgcccagcactacggcgagctgaccttcccgttccgccgtttccagatcggcaaggtataccgcggcgagcgcgcacagcgcggccgtttccgcgagttctatcaggccgatatcgacgttatcggcgacggcaagctggacatcatcaacgaggccgaggtgccgagcatcatctataagaccttcacctcgctgggccttcagcgcttcaagatccgcatcaacaaccgcaaggtgctcaacggctttttcgccatcctcggtctgaccgagaaggcgggcgacgtcatgcgcaccatcgacaagctcgaaaaaatcggcgcggagaaggtaaagaccattctggtcgaggacttcggcgtggaagcggcaaccgcggacgagctgctgaagttcatcgagaccccgggcggcaccgagggtatcctcgcggcgctcgacagctacaagggcaaaaatgaggtattcgacctcggcgctgaggagctgaaaacggttgcgaactatatgaccgcgttcggcgttccggcggatcacttcgaaatcgacctgaccatcgcacgcggtctggactactacaccggcaccgtttacgaaaccgcgatgctcgaccatccggagatcggctccatctgctcgggcggccgctacgacaaccttgccgagtattacaccgacaagcagctgccgggcgtgggcatttccatcggcctgacccgtctgttctacgttctcggcgagcagggctatctgaacgaccagatgaacaaggccccggcggacgttctcattctgccgatgaccgacgacatgggcgcagccatcgaaaccgcgaccgccctgcgcgcttccggtatccgcacccagctctacggcgagcagaagaagttcaagcacaagatcggctacgccgacaagctcggcattccgttcgttatcttcctcggcgaggacgaaatcaatgccggcgtggtcgccgtcaaggatatggagtccggtgagcaggtcaaggtttcgcttgatgaggcggtaaacctcatccgtgcgggtctggcaaagaagaacgagggcaaggtaatctgcgacaagtctatctgacgcagcgaccgaccccgcggaaaacatatttaatattgttatcgtccaccacacacgtttgcattcggaggtgcgtttgatggaaaaattcgtctggagctgtaccaagtttctcgcggcgctgctttgcgcgttctgcctgagtacgctgctgggtctggcgggactggttgttttaggctatgtttctttcatcggcggactgttctgcgcggtctggatttattccaaggaaatttttccggttctccacaaggacgaactggagtaaccacacggacagcacggaggtgcgttctatgaaaaaactgatctggggttgtacacaaatgatcgtggggatgctcggcgtgattgcgtcgctcattttctttgtattcggcgcgtggggctggctgtctgacgcgctccaggtaatttcctttatcctgctctttctctgcgccttcgtggtgttccggggatacttcgactgtgttcgcccggcactcgcggacgataagacttccgaataactttttggcaacaaatcttagaaataaggattgataaaacatgaataacacatctatcgcaggcatgaagcgcacccatatgtgcggcgagcttcgtctggagcacgcaggtcagaccgttaccgtaaacggctgggttgaccgcgtgcgcgacaacggcggcgtactgtttctgctgctgcgcgaccgtgcaggcatcgtacagtgcaccttcgacaagtcggtcaacgccgacctgttcgacatcgcgttcacctgccgcaccgagttcgtcgttgcggtcaagggcaagctggtcgctcgtgacgcggcggctgtcaacaagaagatgccgaccggcgaggtcgagatcatcgctgaggacatccgcatcctctccaaggcggagaccaccccgtttgagatcgacgacaacaaggaggtcggtgatcagattcgtctgaagtaccgctaccttgacctgcgccgcccgtccatgcagcgtaatctgatgctgcgccaccgcgtaacgcaggttgcccgcaactacttcgacgagcacggcttcctcgaaatcgagaccccgatgctcaccaagtccacccccgagggcgcgcgcgactacctcgtgccgtcccgtgtacatccgggcaagttctacgccctgccgcagtctccgcagcagtacaagcagctgctcatgctctccggcatggatcgctacatccagattacccgctgcttccgcgacgaggacctgcgcgccgaccgtcagccggagttcacccagatcgaccttgagatgtccttcgttgagcaggacgacgtgatcgcggtaaacgagggcttcctccagcgcgtattcaaggaagttctggacgttgatattcagcttccgctgccgcgcatgacctggcaggatgcgatggacaagtacggctcggacaagccggacgtccgtttcggctttgagatcaaggacatttccgatatcgcgaaggactgctcgttcaaggtgttcaaggacaccgtggagaacggcggtacggttcgcctcatcaacgtaaacggctacgcggacaagttcccgcgcaaggaaatcgacaagctcggcgagttcgtcaagacctaccgcgcaaagggcctcgcgtggatgaagctcgccgctgacggcagcatgacctcctcgtttgcgaagttcctctccgaggacgaaatcgcagccatcaaggagcgtgcaggcgcgaaggagaacgacctgctgttcgtcgttgcggacgcagactggcagaccgccgctgtcgctctgggcgcactgcgctgcgagctggcaaagcgtctcggcctcgccaagaaggacgacttcaagctcctgtgggtcaccgagttcccgcagttcgagtacagcgaggaggagaaccgcctcgttgcgatgcaccatccgtttaccgcgccgatggacgaggatattccgctgctcgacaccgacccggccaaggtacgcgccaaggcttacgacattatcctgaacggctgcgagctgggcggcggctctattcgtatccacgaccccgagcttcagaccaagatgttcgaggcactcggcttcaccgaggagaaggccaaggagcagttcggccacctcatcactgcgttctcttacggcgcacctccgcacggcggcctggcttacggtctcgaccgtctgtgcatgctgctcgccggtctggactccatccgcgacgtcatcgcgttcccgaaggttcagaacgcatccgatctgatgatgaactgcccggatgtcgtagacgacaagcagcttgacgacctctcgatcgcggtcacccgcgtcgaggaagagccgcaggcttaactactgatagaaaaagccgctgtgcccgaaaacacggcggctttgcttttatccgagggaaagagggcaatctgtgggtaaacatgaactgaaaaataaaaaagacgaaggaaaatggaactgggcgctgcttgcggcgaacgtgctgctgacgctgtgcttcgcggcggttttctggcccatcctgcacaaaggctcgctgtccttcctcgacaagacctcgaacctgcttgcgcttgcggcgtttctgccgctcgtgctgcgtccgtggaagaaggcgtcggcgccgctcgcgctgctgcatgacctgctgctgctcggcagcgcgtctgcggtgagtgtggtcacggtcgagtacatggtcaagggcggcagcgtgggactcgagcagtcgttctggcagggctggctgtgctatatcggcctgtacgccgccgcctacctgattaccgcacgcggcaggctcgcggtctgcgtcggcatgggcatcagcctgctgcacggcctcatcgaccactacgtcatgctgttccgcggcacgccggtcatgctgagtgacgtgttctccatcggaacggcggccaacgtcgcgcagggttactctgcaccggtcgagctgtccgtgctgcgcagcgtgagcacggcggtgctgtactgcgtgctcgtctgcctgatgcagcgccgctggaagctgttcgagcgctggtatgtgcggcgcggctgctcgctcatcgtcgttgcgctcgcggcgtatgccgttcactacgggctcggcatcacgggcacgggcatcaatttctgggcgtcgagccgctcctacagcgagttctactacttcctgcgctgcgcagggaggtcgattgtgcgcgcgccggaggggtacagcgcagacggactgcaaacgctcgcggaggactataagggtgagccggggacgaaaaccccgaacattatcgttatcatgaacgagtcgttctccgacctcggcatcgtgggcgatttcgagacgaacgaggactatatgcccttcgtgcacagtatgcagaaggggcagaagaacaccatcacgggcaatctgctcgtttcgaccttcggcggcggcacggcaaacaccgaatttgagttcctggccggcgacaccatggcgttcctgccgtttggctgctcgccgtatcagatgtacgtcaagagcaagatgccgagccttgtcggcgctctggaggcgcagaattaccggacggtcgcgatgcacccgtatctctcgacctcgtggaaccgtccgcaggtctactcctcgttcggcttcgacgagcagtgctacgaggacagcttcccgagcgatgtcgagcgcgtccgcggccgcgtgagcgacagcgcgagctataagaagatcatcgagctatacgaaaacaagccggagggacagccgttcttcctgttcgacgttacgatgcagaaccacggcggctacgagcgcgagggatatccggcctttgaggagaaaatccacctgaccggcgagtacgagggcgggtatcagcaggtcgacacctacctgtctctcgtgcgctgctcggacgaggcggtgcaggagcttgtcagctattttgcaaacgtttccgaggataccgcgatcattttcttcggagaccatcagccgaatgttccgtcggcattctacgacgagctgtacggcaatacggatgcggagcgttcgcgcgagcagaagcagaccaagctgatcacgccgttcttcatctgggcgaattacgacattgggtcgcagaccggcgtggaaatcagcgcaaactacctgtctgcgttcgcactcgatgcgctgggctgctccacttcgggcttcgacgagctgcgcctcgcgacccgcgagagcgtgccgcgcattaacaactacggctattatctggcggacggctcgtggcacgacaatgaaacactgtcggaatgcgaggcgctgaccgcttaccgcggcgcgcagtacgcgcagatttttgatgcaaaaaaacggaaaaccgagtggtatcttccgtaaaattacgcacacgtttgcgtacacgacaccgggcgtttcccatgcgaggggagcgtccggttttggtttttcctgttatgaaaatctgccctttttcagatgaaagtgctaaaaaatgaaaacaatctttgtgaaaaacataacaaccaacgtcgaaatacacaaaaacaacacgcggtttatgtgcaaataaccaaagtatatcggaaaatgaaaaaaatctttgcctaaatgtagatatagtgttaaaatgattgacggaaaacgagaacggtatttcctgaacgcagcgatcatcgacaaaaaatcgacgatcctttttttaaagcgctgcgtgcgcgtacacgcaaggaaataaagttctgtttaagtaaatgcgaaaaaatggtaagagggaagccgctttttcgcgcgaaacaatttttacctgaaggggagaaaaggatgaacttcgtaaactccatggcgtttaccgcgattaccttcgtggcattcacggcactcgtcgcaatcatctcgtggtggaagacccgcggtgacaacctcgagacccaggacggctactatctcggcggccgcagcctgaccggcccggtcatcgccggttctctgctgatgaccaacctttccgcagagcagctcgtcggcaataacggccaggctgtccgcgtaggcatgtccacgatgggctgggaggtaacctccgcaatcgctctggttatcctagcattcgtactcatgccgaagtacctcaagaccggtctgaccaccgtaccgcagttctttgagcagcgctacgacgagggcacccgccgtctggtatccatcatcgttctgctgagctatgtcgttatcatgctgccgaacatcctgtacgctggcgcacaggtattcgtcaacatcttcggcatcgacgagatcttcggcatctctcgctttgcagcaatcgctatcgtctgtgttgcaaccgctatcgtaggctccatctacgcgatcttcggcggcctgaaggcaatcgcactgtccgactccatcaacggcctcggcctgatcatcggcggcctgctcgttccggtattcggcttcatgttcctgtccggtcagctgggcggcgacggctccttcatggacggctttgacaagttcctgcacaccgacccgtcttacctcaacgcgatcaacgaggtcaacacgccggagccgtggctcccgtggccgcttctgttcaccggcctgctggtcaacaacatgtactactgggcaaccaaccagtccatcattcagcgtaccttcggtgctaagaacctgaaggaagcacagaagggcgccgtattcgcaggcttcctcaagatcatgaccccgctcatcatcgttgttccgggcgttatctgcgcactggcttacccgggcaccgactggggttccggcgactccgcttacccgatgctggtagcacaggttatgccgaagccgatcctgggcttcttcgctgctgtaatgttcggcgcgatcctgtcttccttcaactcggttctgaactccgcatccaccatctacgcactcgatattcatcgtccgctcttcaacccgaccgcgtctgacgcgcgtatggttaagatcggccagaacttcggtactgtcgtagcagtagtttccaccatcatgtccccgttcatgctctacatgggcggcatcacgagcttcgtaaactctgctttcgctgcattcaacaccccgatcttcgtttgcctgctgtgcggcttcttctggaagaaggttccggccatcgctgcaaagatcgttatcccggtacacgttgttctgtacttcattctccagttcggtctgcgtaacgtcattccgttcctgaacaacatccactacctgtacttcaccgcgattctgttcgtattcgacatgatcctgatgtgggtcatcgtcaagaagtgcccgcgcgaaaaggacttcgagctgaaggacgtaggcgctgtagatctgaccccgtggcacaacggcaagatctgggctaccgtaaccctgatcatcatgtgcctggcttacgtaatcttctctccccttggcttcggcaagagcgagaagaccacctaccagacctacctcgagaaccagtccagtgcttcggtcgttaccaccgtacaggactgataagtcaatatcgatcgaccttcaaagggaccgcttcggcggtctctttttttatcctgccgtaaaactgacgtttcaccggcaggcgaagctctgagaaaaatgcgattttctccggtttcctctgtacaaacgggacgcgaaatgctatgctttacatagaggcgcgtacagcctcacagcaaggaggattaaccatgaaggaacattacaagggcctgggccatatcgccatttatacagcggatatggagcagagcatcgcattctacaagaacatcggcggcagcgttttcaagcgcgacggcgtgaagaccccggacggcgagaagaagctggcgctcgttgagttcggcggcttcctgctcgagctgatcgagccgcccgcaggcacgctcgtgccgtccggcgagggcagcattccgcacttcgccgtttacgtggacgacctcgacaagaccgctgccgacctcaaggcggccggaatcatcagcttcaccgcaccggaaaagaaggttctgccgaacaccttcggcggcctgcagaactggttcttcaccggcccgtccggcgagcagatcgagctgcttcagatgctgtaaaaatgagaaaacctcctgtctataatcgataggaggtttttttataccattatcgcagggcgggctgcccttacaaatgaaaccaccacactaattctccattattcagcccgcagacgacaaaaaagctcccaacctcacggttgggagctttcgtaaacctaaagcgagtttatcgcgcgctattaatagtggcgagcctcgaacaggtgatcctcgatcgccttgcgtgcagcctgaacctccggcttggtggagacctcagctacacctacacgccaccagttctcgtagcctgcggacatggtcttcggcagaaccttcatgtcgatcagggtggaaacggtctgcttcttggcgtcctcgattgcagccttcagctcgtcaagggtcttgacggtgtaggtcttgcagccgtaagcagcgccgattgcagcgtaatctacctggattaccttgcccttgtggataccgttggtaacgcccggctcgagcatattcttctcggtgcagatggacgcattgccctgacctacctcgaggttgttgatgcagccgaaggaagcgttgtcgaacagcatgacgttgatcttgtggcccgtctgaacggaagtgatcagctcagagtgcagcatgtcgaaggaaccgtcgccgcacatagcgtaaacttcctgatccgggcaggcgatcttagcgcccagagcggatgcaacctcgtagcccatgcaggagtagccgtactccatgtggtaggtgttctccttgcgtgcgcgccacagaccctgcatgtcgcccggcagagagcctgctgctgcacatacgatcgcgttgtcgtcgatcatgtggttaatggtgcccagaacagtggtctggcacagcttgcagccggtatccttgatgtacttctcaacgcactcgcggttagcgtcgttgatctccggggtgaagtgctccttgtcggtgtactcaacagcgtccagacgctcaacctcagtccaccactccttgcgcagagcagcaacttcctcagcgtaagccttgtcggtgtggtagccgatcttagccagctcctcgccgatcgcggtcagagcctcgttcgcgtcagcaacgaccggagtagcgtccatcttgtaagcctggaactcagacgggttgatgttgacgaactttgcgtcggtgcggtacagccacttggaagcggtggtgaagtcggtgtaacgggtgccgacaccgattacaacgtcagcctcgtgagccagcttgttggcagcgatgccgccggtgatgcccagaccgccgaggttcagttcgtgatcccagacaacagcggacttgcccgcctgggtctcgccgaatgcgatgccgaagtcctcagcgaacttcttgaataccttgtgtgcctcagcgtagcgaacgccgccgccgcagatcaggagcggcttctttgcgttcttgatgacctcaacagccttgtcgagagcatacttggtgatcggacggcggtcaacgcgccatacgcgcttcttgaagaagtcaaccgggtaatcgtatgcttcagcctgaacgtcctgcggcagagaaattgcaacagcaccggtgttagcggtatcggtcagaacgcgcatagcggagatcatgtcggtcataacctgctccggacggttgatgcggccccagtacttggtaacagcctggaaagcatcatgagcggagatagacaggttctgcggctgctccatctgctggagaaccgggtccggctgacgggaagcgtagatgtcgcccggcaggatcaggaccggaatgttgttagcggttgcggttgcagcagcggtaaccatgttgcatgcgccggggcctacggaagaggtgcaggcgaagatggacttgcggcgcatctgctttgcgtagccgacagcagccagagccataccctgctcgttcttgccctggtaaacgatcatgtccttgagctcctgctcaacgccgttggcgaagcctacaacgttgccgtggcccgggagcatgaagatgcccttaacgaacttgtgctcctgctcgttgccatccatatcaatgtagctgatatactggttctcgaggaagcgaacgagtgcctgagacgcagtcagacgaacggtttccatatgaatcatcgtggaaatcctcctaaatagaatacaaataataatgaatcaaagccagtctccaacaagccctgacttagcaccctccctctccaaaaggaggggcaagggaaccataggttcccaaacgcacgagacaggtctcgtgcctgccgcgcgcacgcggcagatgcagttccttatcaaagtccagctccgccggactttgataccactgcctcgggacgtggtgtcccgagcctcgttcgctgtgcgaacgagaggggggtatccgaacaagtttccatgggaacttgttcggtatataggggggacagcgtcccccctatactctgggaacgttagttaccagaggggcagtgccagatatgatcgttggcatcgtcctcgagcagccacagatgctcctcgtcgtcgatgcgggtcttgtcccacgggtcgcccggcagatgacggatgccccatgcgtagcagcaggagtagcccggagcggttacctgagagtgcatcttgtcggtgatgatcgcaaggccgttgtgatgggtctcgtagatctcgccgttgccccagcctgcgccgaagcccatcggcttgtcgaagcggtagaagtagcactccggctgcggatgatgatgcggcgggtaagaggaccacttgcccggcaggttgacgacctcgcccagtaccatgttggagtacggtgcgttgtcaaggtcgaagcaggtgcgaacgtcgcgcttgatgcagcccatcagctcgcccttgttgccgcgtgcccaggtatcggtgtcttccggcttgtacatcttgctcgggaaggtcttttcgttcagcgtcttctgaatgtagatgttgcacgggccgtgtgcgatgatctcgaacttgacgcccttgcatacgtgcaggcaggacggattgtagtcgaacgggttcggacggtcaacgtcgtaggactgatcctcccacttgatcgtgcacttgccgtcgaatacgagcgctgcaacttccttttccggctcctcgcagctccaggtgtcgccatcctccataacgaggagagcaacgtccatcatggcatccttgccgatgccctcgtcaagacggatatactcgttgtatccgcgcttgacctgcttatccatgtacatagtaaatctccctccaaaaaaatatttttttggttcggtgcgcggagcattcctgccctgcgcccggcagaccggccgtaatcagacctgtccaccttctattatagcacgagagcacgctcctgcgcaacctcttgcgtgctgtcggaaccacttcgtcatttgtcacaaaaagtcagaagcttcttttgacatatgatacaacaaaaatacgattttattttgccgcactcttgcgcgtagttccttttacgattataattatagcagattgacgcgaaaacgcttgcaataaattcagaacgaataacacaattttaaggagttctgcggcgggaaaactgccccggaacaagaggaggagacgcgatggatgcggcaaggcgcgaaaagaaggagcacggcacgctttcctttccgtttcagatctatccggcgctcgacgggagcgaggcggatgacagcgatttcatcccgtatcactggcatcccgagctggagatcatcacggtggactgcggccgcgtctcgctgacgatcgcggaccggatgtacgagggagcccggggagacgtattctttgcggcgtccgaggagctgcatgagatacgcgccgccggacgagaaaaccagttccgctcgttcgtctttgcggcggattttctgcagttcgcccgtgccgacgagaccgagttcgccctgctcgagccgctcgtagaggggcggctgcggttcgcgacctgtctgcggtcgggcgagccggggcagagcgaggtgcgcacgctgctcgcgcagatcgtccgcacatggcagcagcaggcgcccggctgtcagctcgccgtcaaggcggcgctgctcggcatcgtcgcggtctgcgcgcagtacggtcggctggaggggcggcccgtgcgtcccggcgcggactacagggcgcggcagctgcgcgagatcgtcggctacctcggcgagcacttcaccgagccgctctcgctgcccgaggtcgcgtcgcatttcggcctgtcgccgcagtatttcagcacgtttttccgggaaaacttcggccgcacctttacgcagcacatcaactctctgcgcatcgagcaggcggcgcgtctgctgcgcgagaccgatcttccggtcatggaggtcggcttcagcgtcggcttcgacaacttcagctatttcatcaagcgcttccgcagcgtatacggcgtttcgccctcacactaccgcaagggataacaggcacgaaaaagatagagaaacacccggaacggccagataaaaggcgttccgggtgtgttttcgtgcttattccgcgaggtagtagcccagaccgcgctcggcgcagatctgtgcctccgagccgatggaacggagcttgcggcgcagcagtgtgaggtagacctcgatagagttgtaggtggactgactgtccgagccccagaccctggcctgaatggtctcgcgcgaaacgacctgaccgggattggaaaggaaaatgtcgatcagcagcgtttccttgcccgacagacgaatctcgcccgagcggctctttacggtgcagcggccgcggtcaaaggtcagatcgcccgcggtgaggatctcgctcttgatggccgggctgcggcgtgcgagcgcgcgcaggacagcggcaagctcatccgagacgaacggctccgcgagcacataatccgcaccggcatcgagcagacgtgctcggtcgcgcgccgagggatggggaagcacgataagaatggggatctgcgtgccttcctcgcggatgagcgacagacgcgcgcaggtctttacgctgcggccgtaggaaaggtcggacgtggtcagtatggcggcgtcatacacgccttccgggaaaacgaacggctcgtcctcctccggcggcggcaccatatcgaaagcaatgttctcgcactggagcgcctgcggtacaggtgcgctgtcaaattcttcaatcagcagaatacgcatattctgttcactcctttcggcactaatatcatgaagcagtattgtggatgtttcgtgtagaaatgatggactgaagcaaaattcaatctctgactaagtatacacattctgaagcaggaatgcaatcgcaggagggccggaaaagagaaaagttcgaaaactgtttacaaatcgtcgggacatctgtgccggagggaaggaacggtctggcaatcaagtccgtttcagcgatgcagacaaaaacatcgccgtccggagaaggggacggcggggcgaaggatcagagcagggaaagctgatcatatgcgcgaggggagagattgatgatgcgcaggccgctgccctgtgcgtagtgaacagtctgtgccgtgccgccggcctgcccgtcgaagtagcagatgagcagggaggaagagtcgaccatgaagcggttgcgcacggaaaaacagccggagaaataattcgatgcgaatacgcgcacggcgtccgaattgaccagacagacattatagcgctttttccacgagggagggaagcggtcggactgatggtcgtgcggaacggcgcacagcagacgaatgtcatgatgcgcacgcgcgcggatgacggcctcggccgcccagatatcgaatccggctgccatgccggagagaaaggtgtgatagccctgcgaaacggcgtgttcgaccgcgcggtcgagcgccgcctcgagcgcctgcacggcgtccgggtcgtatgtgcggaagggcatcttttcgggacgatacccggaaaaacaacaggtatggctgcgcggatcttgcatatctccacctccgaggcagaatagtcgcaggaatggcatctgccttaagtatacaccaggggcagagaaaacacaagagcgaatacgaacaaatgtacgaaaaacgttttcgtgcagacggttgtaaaaccgtgcaaaaactgatacaataaatattatataaaggtaataccgcataatgggacaagagcgatttgtgagtgaattttgcgtactgaaactgcaacgaagtcagggcgcagaatttccgcaaaccgccgcagctttcattgtgcggtattgcccggagggaagggggagccggcttgaacggacagaatcggctggtctatctggtgcggcgcatggtactccgctttttttcggacggtattccgcaggcggcggcggccttgtcgtattttctgctgttttccctgctcccgcttctgatgtttgtcaatgcgctcgtcgcgcggctcggcatttcgatcgaggacttccggccagtgttcgagctgatgccgaaaagcctgcaggagctcatcctgtcgtactttgagcagatcacggcgacgccgtcgttcagtccgctgctcatcgggacgctgctgacgctgtattttctgtcgcgggcagtgcgttcgatcatgcgcacggtagacggcatctaccgcgtcgaggtacaccgccgcgcggtgctcgatattctgctgtcgttcgcgatgacggccggctttctgctgaccgtcgtgtgcagctttgtgcttgccgtcgccggacgcatgctgctgcgtctgctgccgcaggcgctgccgatccctgcaccgatcctcgaggcggcgcgcggcacgggcttctggatgatgatcgccatcgtattcgcgttcctcatgctgttcaaccgcatcgtcccgaacctgcatctcgggttccgcgaggtctggccgggggcgctgttttcgctggtggcatgggtgctcgtgtcgtggtgcttttcgttctatgtggacaatatggcgcggtattccgtgctttacggctcgctcgcgacggtcatcgtgctcatgatctggctgtatctcgtcagcatcatcctgctgatggggccgcagctcaatcacacgcttgtcgtcatgcggctgtaccgcatggagcagacggcgcatttgaaataacagagaaaccggcggacgcgccgggtgaaaacaggaggacaagaaaatgaaggttgtagcaatcaatggttcgccgcgaaagggcggaaactgcgcacagatgctggacgtactgggcaaggtgctcgaaagcgagggcatcgagttcgaggtctgccagccgggcgcgaaggtacatccgtgcatggcatgctatcactgccttgacaacggcacgctgcgctgcgtgcaggatgacgacggcgtgaatgcgatcatcgagaaatgtattgaggcagacggcatcgtgctggcctcgccggtataccatggcggaattgcgggcggcatgaagtgcgtgctcgaccgtctgatcctcgcggcaggctgcggtgagaacaggctgcatcacaaggtaggtgcggcgctgtgcacgctgcgccgttcgggcggcatggagacctatcagcagctgctcggcacgatcaacacgatggagatggtgctcgtgacgtcggactactggaatgcggttcacggtgcggaaaagggcgaagtcatgcaggacaccgagggtgtcgaggtcatcgaaaagctcggccgcaacattgcatggatgctcaaggtcatcgacaaggcaggcattgagccgcccgaaaccggacaccgcacgatgacaaactttattcgctgacgcgaattccaggggggactctgtcccccctggatacccctccggttccggagaaaccggaggggatacccccctcgcccctgcacggcaggggcggccgcgccgccgcggcgcgggcagtggaat

SEQ ID NO: 12883 - DNA, 28201 bp, Unknown
  gut microbiota DNA sequence
cacgaagaagcaggaatacggtgtactgcaagcggtaggcatgaccaataagcagttgaatctgagcttacaaatacagggcttgatttttacggttggcaccatctgcgtcgcacttgctgccggtctgccccttggctatgcactgttttcctatgcgaagcataatgggatttttggaatgaacgtttatcacgttcctcttatcccgattcttgttatgattcttctggttggtattctgcaaattgtgctttcctgtgttttaagcagtaatctgaaaaaggaaacgctggtagaaagaataaggtatcagggatagcaggtattgccgggatatcctctttttcatcaattataataaatttgattaagcagccggtattcgttctttgatgctcctattagagcatagaaaacaggaaattgttctgtaaatagagtaaaaccgcaggatggcattctttgagaagtcatcctgcggtttttattatactatttgattggtttctccagccttgggtagtggcatatctggacaggcatccagagtatcttgccggatttccggattttacagacgcagagatatatggggagtataactttttgaattattgaaagatatgacaccggggaaagccctgttcgcggcctgcctttcggtgctttgcctgcgtgttaaatccggggggtcacttcgcgctgcttccagagcgtcgctccgtggcggccgcacgcttctcaaaacgctgtaaagctaaaaagttgcagagttataactttacaacgttataactctgcaactttctatttattgataccgcgtccagtcggggacgctcgtcagcttcgtccagctttcgccgacttcgccctgacggttgaagtcatggctgttcgtggcctcctgcacagcaaggtagtgccagtcggacggcttgttgtccggccacgttaccatgctgtccagcaggtcgctttcgctctgcggcatacggcagagtacgcggttgatcatggtcatggcctcagcgcgggtgatgcgggcgtcggggcggaacgtgccgtccgggtagcccgaaatccagccgaacgccgccgctctctcgatctcgttttccgcccagtgaccggaaatgtcggagaagctgccgctgttctcgaccggtttggtgttgaagcgcgcgcagatcgccgcaaattccgcacgagtgatcgaggcatcagggtcaaagcggtccgcacggcggcccttgacgatgccgagcttcgccatcgtggaaaccgccttgttgtgccactggccgtccgaaacatcggaaaattcgttgtcggcggtcagatttccgtcgcgaatgtcggatttgagcagtctgaagaagatcgtcgctgtttccgcacggctgatattgccctccgggtgcacctttccgtccggatagccgatgacgtaggcgaaatggtcgtcgccgttgagcttgtccggcacaccggtcgcctcccagcctgcatagaccgtcttgtcgctgttcatcgtcacggtcgtgatcttctgcgtcagcgccttgtcggcataccagccggtaaaggtatagctctcgcgggtcggggtcttgccgagcgtcaccttcgtgccggaggaacagcgctcatccttgtaagccgtgccgccgttcgactcgtagtgcagcgtatagcgggtcgagtggccggaagagctgccgccgccggtgctgccgaaccggtagacataggtcacatctccggtaatgccgttcgggtcggtgttcggcgtctgttcccagccgccggcggtattttcgtatcccggcgccgggagcatgatctgcggtacatagcttgcgtccagcgtgccgctcgcggtgccgtccgcctgcggatagagcacgaccgttacggtcttgtcctctgctgcgccgcccgaccatgtgccgttgacgatgcggaacgtgacggcggcattttttgcccagtgtgcatacagggttgtggggcggttcaccttttcttcaaaattcgcccgattgccgccgtcggccgccgtataccagccgaggaaggtatagccgtttctgaccggcgtactttccgccgcaaccttctcggtatctgtctgaattttcacatagcgcatggcctcgccgctgctccatacgccgccgttggcgtcgaacgtcacgatcggccaccactgggcgacgaaggtcagattggagcgtacaggcatattcagaacatccggatcggtatagaaaaggttatccagatcccagtccttgaagaaatagtaggtcgcctcaccgggaaccggggtcggcaggcttatgcgttccttccgcagggtagagccgtagggaaccgtatatgtaagaacaacggtctgtttgttcgcatccaggtatccgcgttcggccccttcataatccgcgagaaacgttacggtacagtagtcaggatgtgtccatttgccgtagaggtcgatattctgacctgcgctgctgcacgttaccgtggttacggaagtgccattgcaggcctcgttagtataccagcccgagaacttccagccctctactggggcaaccgttgcgaccggataaggcgtatccttggtcactgtcgcctgcggcgggagggcggcggaatccgggttctccgtgctcacccagtgataagttaccgtgcattcgtccttctgagggaaggtataggtatagacatagtttcccgtctcactgatgccgtcggcgttcgtgttcgggcggctgtcccacgcgccgggagcctggtatccgccgtccggaatcatacccgtcggcacgtcattctcagacagcgttccgaagccgttgcgcagatcgacggtaacattcttgtccgcgctcaagtggtccgaccatgtgccgttcttcaccttgaaggtcacggtctgcgtgagcctcctccagcggccgtaaaggtcggtgtttgcggtcagaacctcgccgccctcttcgaatttctgcgtgcaggcggaatctttgtaccagccgtcgaactcgaagccgtccgccgtcggcgcagtcgccttatagcgataggttccgtttccgtcaagcgaaaggctcagcgcggacggcgccgcgattttattgccgtccccgtccaccgggatgaccgagccggcccagtgaaacgagacctgaatctcgggcaaccagcggccgtacagcttgaggtcgctgccgaacgccgggaacacggtcccggtgtatttgacgtaggtatttccgttgtatgtccacgttgactttccctggtcgatcgtctcgtcccacaggcggtaccagccgtcgaatttcaggttcaggtccttcccggccactgcgttctgcgtcggcgcggcaggcttgtgcgtcgttccgcgcgcggcgtgctcgtgtttgggcagaggaatgtccggcttccagcgcccgatccagtcatagtcgatgcagaccgggtcggtgatggtgatgacgaccttctcgccgtaattcgcgcccttgatcatctcgcctgcctgcgcctgcggcggaatcggcagaatgttcagagaggtctggatggcgttgccgcggccgatgtccgcaaggttctgttcggtatggcgggagggcgtcgactcgaacagcggcgttccgctgctgtcatagccggtgaagcggtaataatccaccgacgcgacctcgcggatgctgccggcggacaggatatggtggccgtccttcagctggctccagctgtatccgcccgcgccctcggtgaagtggtccacatcaatgctcagcttctcggctgcgccctcgccgacattggcgtcgattttggtcatcagctcgttgagcgcctcgtcgatgtcgtgcacctgactgagtcccttgaaatagtccgcgccgcttgtagacgcattgccgcagatggacgccatggtggagttgaagaagtcccgctgcttgtcggggtcgttcagagactcactgcttcccaggttcagcttgttgaaatcgcccagaccgaaaatggtcgcgccataggtttccttgagcgttttcgccgcctcgatcgccgcgtccgggcgcagcgtctgataataggagctgttctggtaggggagcgagctggcggcgatgcagacgatcagatttcgatccttaccgtctgccttgtgcgccttggcgatctcggcaagctgctccgtgatggtcagaccggcgtccatgcgcgccgcaccggcgtaccacggcaccatttcaccggcgtcgatgacctgcttggcgttgccgaccgacaggaacacatcgtcatagccatctgtaccatctgtatttgtcagatagcccgacggcagcttcggcagggacgcttcatcttgactgtcgcattccgtccagtatttcttcgaatgaaagccgtctttggtataatagccggtgttcaggctgtcattactgctcggcagcgtgccggggtagagcgcggcatcataggggtcgccgatgccgtagttgttgatgcggccgtagcccgcgatcgcaatgcggtgctcgccgccggtggtcggcttcggcatcccgtccagcaggcgttctatagcgcccaggatttccgcgcgctcgtcgccggaactggccgagccgttctgcgtattcatgaattttgactgctcgatcagaaaaatgatgtcgcagggcttgaccgtccgggtcttgttggccggatcggtcatgtaggcctcgatctgcgcggtgatctgtccggtctccgcgtgctgcacggtggccgtgacggtcggcgtcgcgttttctgcgttccctgctgcctgcgccggtgccggaagcagggcgaagatcatgcagaatgccagaaaacaggataaaatacgtcttttcatatccatatcattcctttctcagcatgaaatatactgtgtatttcccaattatagcaccggagcggagcgtattcagggaataaactggaaggaaacgatgcagaaaagccgcagaaagtgtatttttctgcacggcggctctcccgtatccgttttctctgttccgcgcgcggcgcacaaactaacaagttgttaatggttatttttcaggttccgctgtatcctacaggtacggtggaacctttttatctgcattctgagaaaggaggggagggcagatggagcggaaatatatcgaggccgtccgtccgctcggcggtcatgtgcttcaggtcgatttcgtctccgggagcaggctcctgctggacatggagccgtatctggacaagttccgattccggtctcttgccgacccgcagatctggaacagcgcggtgacgaacggcatttttgtccgcttctgcgacgtggagctgagccacgacgagcttctgtccatggcggagcaggaacaccacagaaaaggaggaaaacagtatgaataaaaagcgaacgatacagcggcggggactgagcgcaggactgtctgtgctgctgtgcctgagcatgctgccgatgggagcgctggcggaggagccggacggcagtgaagatgcgctccggaacactatcgttgagaaagctgatactgagaatatcgaaaacacgactgacaatgacgctgtcgtcgagaatgtcatcgttaaagacacagttgttgagaacgacgctgtggcgagcagcgatgatgcggatgttgacgctctggatattgatgcggatgctgttgacgttcaggctgctgccgcagaacacgctcatccgatttgcggcagcggggacgcctgcacagacccgaatcatgccagccacgaggttatcacggactggcagccgatcagcagtgaaagtgagctgtcgaaaacaacagcgaacggacactactatttaacggctgatgttgttattgatgagtattggatgtgtcacaacagtatcgtactgtgtctgaatggccataccatcacttttctggaggcaaaggacagcacgacgaacggcggtgttacaatcacaagcgatacaactttcacgctttgtgactgctcgaaaaaacagaccggtaaaatcaccggttctacccgcagtggtgtaaatgtaagtggaagtaaagcaatcttcaatatgtacggcggtaaaattaccggaaacagccataaaggtactaatactgattcgaatgcttatggcggcggcgttcgggtaaggcgcgagtgtactttcaatatgtatggcggtgagatttccggcaatcagagtatttcaagttggtattcctatggcggcggtgtctgcgttgaagataaaggttctatcttcaatatgtacggcggaaaaatcaccgaaaacacagccaagaatggcagcgatgttgctttgtataggtatggccgtatgtgcctttccggtgcaccgatccttggcgatatctacttggttcacttagatatcgacggtattgatgtaggagaaggcggcttagctgaaaatacgacctatcagatcaactttgctggaatggaatcccccgatacggttttccactgcatcggtacgatgagcaaggaggatgccggtcatttcccggcacccagcggagcaaaatacgaccatggaaacccctggagcgcgtggtataacggagaacagctctttttcgtgcgtgaaagcgccaaacaccagggcggcattcatccgatatgcggagacggtgcagactgcacggctccggatcatacagaaaatcacgaaaatatagcctggacaccggtcgagtatatccatacagagactcacggagacgaagaatggatagagccgggaaactattacctgaccaaagatacgatccttgccaatagtgcctattcaagaaagatcgtcgtcaccggagacgtgaagatctgcctgaacggtcatacgctgaaatacaggcctcggacgaccggactatcaggccttcgtcgtatttatctggaggaaggcgccagcttctctatctgcgactgctcgaagggacaaaccggcaggatcgttcagatttcggatggcgggaaaacgtattcgtctctgttccaatgcctgcggaacagcacgctcaatctctttggcggcgagatcagcggcggcggcagcagcaaggtaccggataacactgcctatccgggcgcagtaaagctgtatggcggtacatttaatatgtacggcggtaagattacgaactgtacggcaaatgcacagtcggttattgatgtagacagctccagcgccagtggactgtactatggagaaacaagtgttccgggtgtatttaatatgtacggcggtgaaatcagcggcaaccaaatgacaccgtatacaggtcagcacaataccgccgcgattgatgcaactggcaataaggttaacatttacggcggcaaaatctgcaataacaccgctgtcggaaatggaaatgtggcgcatggcgtagatgtgatttggagcgaccttaccatcagcggcggcgaaattaccggcaacagcggctatggcgtatggatgacgaataaaacaccggcaactgccttgtccggcggcaagataaccggcaatgcaaagggaaacttctgctttgcattccagcggacgagcggttatgtttcctctactgctgttctggataaaaatatggcacccgacactaacatcggcattaccatatctcctttggagaccgacaaagcatcgtataccctgtccgaagcctgcgacacggataacagccgctttttccactcggatatggcgggttacgccgtaatctatgatgaggaaagcaaaaccctgcagctgcagaagggcacggcgctcaccggaacgctcgagatcaacggtgctgcgaagtttggacaggagctggcggcaacgctgaccggtacgaataacaccggcaccttgacctataagtggtatcgcagcggtgaagacgtcccgatcgcaaccgataccgacaagtacacgctgactgcggacgatatcggccagaccatcaccgcgatggtaaagagcagtaaggaactcggttcgatgactgctgttaccaaggtggtcgaaaaggcagacggtcctgcggctccggctgcatttacccttggttttgcactcaatgatgaccaaaagacgttcacagcgaccattccggaggtgaaaaacgcggagtacagcttcgacgggaaacagtattccgcagtcaacaccaagacggactgtgcgccgaacacggaatataccggctatgtgcgaatcccggaaaccgatacgcagaaggcaagtgcggtgaccagcagcacgcagaccgctcccaagctgaccgttgcagcgccggtattcaagccggacggcgcgaccagcttccgtggtacgcagatggtggagatttactgcgcaacacccggtgcgtccatttattacacaacggatggcacaacgccgaccagcaccggcacgatttacagcggtgcgatcagcctgacctctaccaccacgatcaaggcgattgcggtcaaggcagacatgaatggcagtgccgttgccgaagcaacctttaccagacgttcgtcctccggcggcggcggtggcggtggaggaggcggcggaagcgtctccgcacctggctattcggtatctgtagatgatgtaaagcacggcaccgtgaccgtttctcccgagtccgcgtccaagggcgacactgtgaccatcacggcaacccccgacaagggctacaccctcgaaagcctgaccgtgctggacaaggacggcaaggcgctcgcgctgaccgacaagggcggcggcaggtacaccttcgtcatgcctgcgggcaagatcacggtgaaggcggtctttatggacgacaacaccatgctcaacttcttcaccgatgtccgcgcggaggattactactatgatgcggtcctctgggcggcgcagaagggcattaccggcggcacgagcgatacgctgtttgccccgaacgccggctgcacccgtgcgcaggctgtcaccttcctgtggcgtgcggcaggctcgcccgagccgaaatccgctgacctgccgttcaccgatgtcccggcggacgcttattacgcgaaggcagtcgcgtgggcggtcgaaaacggcgtcgcgaagggcgtgagcgagaccgcattcgctccagacgccgcctgcacccgtgcgcagatcgtcaccttcctgtggcgcgcgcagcagtccccgaagtccggcggcgaaaacccgttcgctgacgtttccgcggctgcgtactactataatgcagtgctctgggcggtcgaaaacgatgttgcgaagggcgtgagcgagaccgcgttcgccccgaacgataactgcacgagagcgcagatcgtgaccctgatttacagatgcaggaagtaaatacaacagaaaacggcatagaatgcgaaaaaatgcaaaaaggggagcggcgaaagccgctcctttttccgacagacgaaaacgagaccgcttaaaagcggtctcgtcttttattcctgtgaagtttcgcgacagtcttttatcccagtacgcggaacacgccgaacacgagggtgctgacggccagcatggcgaagccgttgatggcctcgtagccgagcagcttgagtcgctcgttgatgcccatgttgacgccgcctgcgctgacatggaagaacgagccgtgcggcagaccgtcaaagacgaatacgctcgcgttggtcatggctgcggcagccagcggcgcgatgccgctcgcgactacggtcggcccgaagatctggcttgcgagggtcgtgcctgcggtagcggacgcggtcgccgcgcccatcatcatgccggcgatcggcgcgagcatgaaggcgggcaggccgagcgtttcaatgccggaaatgataacgtccttgagcgaggagttggagatgatgcccgcgagcgcgcccgtgccgatcagcagcatggccacgccgctcatcttcgcgagaccggcggtgaaatagtgacccatttccttggtcttgcccatcgcaatggtgccgacgatgccgccgaccgggagcgcgatcagggggtcgatggtgatgccggcgatcgggcgcaggaccaggatagcgatggtgacgaacggaccggcgagcgccgcccacaggggaggcagatccttgctgtcgatcgtgttgacgtcgctgtccgcgatctcggtgccgcgcatgcgcagatggtaggcgaggagcgaggtgacgatcagagccacgacggccgggatgatgccgaccgcgatgatcgaggtcagcggcacgccgaagccctcagccgccgcgatgtcgttcgggttcgggctcatgacgttgcccgcgcggaccgcgccgagctgcgccatcagcacgcccatcttgtgatagcctgcacgcttcgccatctgaagggcgatcggtgcgaccgtgatgcacgcgacgtcgccgaacacgccgacggcggtcaggacccacgtcgcgagcgtgatcgcgatcaggcagcgcttcgcgcccagcttgttcatgatcgcttccgcgatgcgctcggccgcgccgctctcgatcagcgcaccggcgaggatgccggcggtcacgatgcggatgatggcggagacgatgccctgcgtgcccgagatgatatagtttacggttccggtcagaccggcgccgccgatgaggccgccggcgaccgcgccgatcagcatggcgtaggtcggctggacctttttcagaatgagtacgatggccacgacgagagcggccagagcgcccagaacggatacggttactccatccatagtgaaattcccctttccgtcggcttacaggtggtcgaacttcatgacgccgccctcagagccggaggccgcgagcttgcagtacaggccgagccagcccttcttgaacttgggctcggggcgcttccactgcttgagacgcgcctcgatctcctcgtcgggcacgagcaggttgagctgcttgttatcgacgtcgatctcgatggtgtcgccgtcatggacgatggcgatcgggccgccctctgccgcctcgggggagatatggccgacgaagcagccgttgttcgtgccggagaagcggccgtcggtgatgagcgcggtggtcttggcgaggccgcggccgtacaggtacttcatggccttgaacatctcgcgcatgccggggccgcccttcgggccttcgtagcggatgacgacgacgtggccgtcatggatcttgccggcgaggatagcctcctctgcggcctcctcggagtcgaagcagatggcctcgcccttgaagtgatgcaggctcttgtcgaacgcgccgggcttggtgatgccggtgtcgggcgcgaggttgccgcgcaggacagcgacgccgccggtgtagccgaacgggtcgtcgagcgtgtggttgaccagaccggtcgccgggtacaggtacttgtggctgtcgatattctccgcgagggtgtgcgcggtgacggtcatgacgtcggtctcgagcatggagcgcaggttctccatcagacgcggaacgccgccgtccttgtagaagtccacgatgctgtacttgcaggacgggttcatgcgcgccagctgcggcgtggtgtcggacaggctgtcgaactcgtcgagcaccttgatgccgagctcagcctcgtaggcgatggcggtcaggtgcatgacggcgttggtcgagccgctcatggccagacatgccttgatggcgttgcggatggagctgtcggtgatgatctggcgggcggtgatgttcttctcgaccagctccatgatcttgacgccggtctcctcggccttcatcatgcgaactgcggaggtcgccggggcggtgccgccgtccggcagggtcatgccgagcgcttccgcgagggcgcacatggtgttcgcggtgccaaggtaggagcacgagccgcagcccgggcaggcggtatcctccagagccacatactccgcctccgtgatctttccggcggaaagcataccataagcctcggtggcagaggtctggtcggcctgacggccgtcgaactcaacgccgccctccatcgggccgcccggcaggaagatgcacgggatgtccagacgggccgccgccatcagcatgcccggaacgatcttgtcgcacgagccgagcaggacgaggccgtcgaacaggttgatctgcgccatggactcgatggaattggcgatcagctcgcgcgagggcatgatgaagtgcatgccgtcgtggccctgacccatgccgtcgcagccgccgatgacgccgaactcgatgggcgtgccgcctgcgcggtagatgccgtccttgacgcgctgcgcgacctgacgcaggttgtagtggccgggcacgcactcgctccaggcgttcgcgatgccgatgagcggacgcttgagatcctcggtggtaaagcccatggatttgtaggttgcacggtaatactggttgcccaggcccttcagaatatgttcgctgcgtaacataacgcattcctcctgtaatatcttttcacccgaaaattttctatgctgacccccggaaacgccggctgttccggagcaggtctctatactcagcattataatttttgaaaagatgtgtttcaagttgtccaaaatgctttctacttttgcaataaaatttttttataaaatcgtgcaaaaccatcaaatcgcgtaaactgtttgcgcatttttgcgggaaatgcgcgggaaataagaaaaagcgagaaaaaaacatcggacaacttcaggctgcgcgcaaaaaaagcgcctgcattgcaggcgcttgagagactgtcgaaaaagtctgtattcacgatgctgacgctgccgcgcggcagcgcgcattcaaaagcgtttgctgcgcaaacgcaaaaaaaccgaggacatgcgcctcggtttttttactcccagagggagaaagtttccgcatgggaactttcggacgtccgtgttttgcgaagtcaaaacacacttgtcggcgaaactgtagtttcgcgacagttttatcgcgccgttttcgtctggcggatgaagatgcggttcgtgtcgagatgcacggacatggcgctgcgggcggcctgcgggtcgcggtcacgcacggcgtccagtatctccttgtgcgtgtcgatggtcatggtgagcagctccttgcgcgtgatgttggcgatcgagatcacggccgcgtcgatgatcggcatcagcggctcgacgaccatgttgtgcgagcatttcgcgaggtaccagtgaaagcgcatatcctcgatgaggtagtcttctccggcctcgatcttttcgcgtaccgcgtcgcagtattcggccagctgctcgacctcctcgtccgtgcggttctgcgccgcaagcgccgcgatcgtcggctcgagcatgagccgcacgtcggtcagatcgagcgcgagctgcagcttgtcctcgaccgcgtccagacccagcggattggcgtggagcgggaacagggacgcgacgtaggtgcccgagccgtgtttgacgcgcagaacgccgcgcgagacgagcagcttgaccgcctcgcggacggtgccccggctgacctcgaaatgcgccgccagctcatgctcgttcggcagcttcgccccgaccttcagatggttgtccagaatgtacgcaaacaaacgctcctcgatccgttcggtcagcgcctgacttttgatgctcgacagctccgacataccgaaatctccctttcctttttctgtctgtgcggtatttttctgagataagaatatactgcattttctccggctgtcaatctttttttcgccgggcgccgcaaagctgtaacgttataacgttaaaacgttgcaactttactccgcgtatcggttcgcagaacgcgaaaatcccgacggaaaacgtcctgttcctccgtgaaagattgcatgaaacgttataactttgaaacgctgtgactttataactttacagcaccttgacgccgcgcggacggcgctcacggccgcagacgagaaaagcgtaccttcgggagcagcgcctcgacggcctcgcgttcggcggcctgcgtgccgctgcacatgacgttcgccgcgccggcggcggtcgagaggcggacggcctcctcctcgctcagtccctgcgcctcggcatacgcgagcgccgcgaccacgctgtcgcctgcgccgaccgtactgccgaccgggaccttgaggccctcggcgtaaatcgtgctgccctttcgcagatagagcgcgccgcggccgccgagcgagatcacgacccgttcgatgccgcgctcgagcagccttctgccctcggcggtcagttcctcgagggtctcgagctttttccccgccagacgcgacagctcgtcgtcgttcggcttgatgaggtacggcgcggccttgatcccttccgcgagcagagcgccgtccgcgtcgagaaagacccgtgcgcccgcctttttgcacgcggccgtccaggtgcggtaggtgtcctgcggcgcacccttcggcaggcttccggcgagaaccacgatgtcgcccggccgaagctccgccagcagctcgcgcagcagcgcgtccagctcggccgccgtgacggtcaggcccggctcgttgatgtcggtgttcgtgtgcccctcgcggtcgatgatcttgaggttggtgcgggtctgcccctcgacgaagcggaaccgcgtcgcgaagggctcgccctcgagcagcttttcgagcatttttccgcttccgccgccgaggatgccggccgcacagctctctccgccgagcttcgcgatcaccttgctcacgttgatgcccttgccgccgggatcggtgcgcatttccgtgatgcggttgacggtgtcgagcgccatgccggggatctctaccgttttatccagtgcggggttgagtgttaccgtgtagatcatgaaatgacccctttcagacgtttgcagtcaaggctgcgctcgggatagccgccgcgccgcccgcctgctcgagccgcagcagcgcttttttcatctccgtgccgccggcgtagccgcccggcgagccgtccgcgcagatgacgcggtggcaggggacggcgatgaggatggggttcgcgtgatttgccatgcccaccgcgcggcaggcgttcggctgaccgatggcctcggcgagctgtttatagctgcgcgtttcgccgtagggaatttcgcgcagcgccgcccagaccctttgctgaaagggcgtgccatgcaggcggcaggggaaatcgaacgtccggcgcgtcccggaaaaatactcgtccagctgacggaatacgagtgcggtcagctcgttcggcgttccctcgcagatgccgaacggggcgagacgcaaggccgtgaccgcgccgtcctcccagtccagctgcattttcccgaacggcgaatgataaacggctgttcctttcatgtgcgtttttcctcctgtaagacaggttttttagtgaaatcggggcgttttcgcaatgaatgcgagagtaaacgttataacgtttcgaagttataaagttttaacgttatgcagttttgacgttataacgttttcgggaaggctctctcacggcagtatgttttcgatcatcgcgagcagctgctgcatatcgaacggcttggagaggtggccgttcatgccggctcttgcggcgttctggcggtcctcgtcaaaggcgttcgccgtcatggcgacgatgggcagggccgccttttcggcgtccggcagggcgcggatggcgcgcgcggcctcgtagccgttcatgaccggcatctgaatgtccatcagcaccagatcgtagtacccgggcgcgttttcgcgcaccttgtccaccgcgagcttgccgttttccgccgtttccaccgtgaacccggcttcctcgagcatggtcaccgcgatctcgcagttgagggcgttgtcctcgacgaccagcagccgttttccggcgaactccgccggtttttccgtcggctccttttgttcctccctgcggaacggctcggccagcacgcggcgcagctcggacaggaacagcggcttggcgcagaaagcggtcacgcccgcggcccgcgcctcgacctcgatatccgtccagtcgtaggcggtcaggatgatgatcggcgtggcctctccgatcagcttgcgcacgcggcgcacgacctcgaggccgttcagatcgggtatcatccagtcgatgatgaacacgcggaagtcatcgccctgatcgagcgcgtcctgcgcacggacgaccgcctcgcgtcccgaggtcgtccagtccgcccgcatcccgatcgtgcgcagcatcttgctgacgttcaggcaggtgtcggtgtcgtcgtccgcgacgagcgcgcgcaggccctcgagctgggggatgcgcgcgggcgcggcggcacgctctccgctgaccgggaagcgcagggagaccgtgaattccgagccttttcccggctcgctctcgaccgagatgccgccgtccatcatgtcgaccaggtttttcgtgatcgccatgccgaggccggtgccctgaatgccgctcacggtcgaggtctcctcgcgcgcgaactgctcgaagatgtgctcctgaaacgccggactcatgccgatgccgttgtcgcggatatggaattcatagtccgcgctgcccttcggcgcggtctgcttctggacgatgcgcagggtgatcgtgccgcccgccggggtgaacttgatggcgttggacaggatgttgagcatgatctggttgaggcgcatggggtcggcgatgacgtcctcgtcctccacgtcgaccatgtcgataaagagcgagatgcgcttggcggagatgcccgactgaatgatgtcgcgcagatcgtgcacgagctcgggcaggtgcaccgggcgcggctcgagcgagaccttgccgctctcgatgcggctcatgtcgagcacgtcgttgatgagcgagagcaggtgctggctcgccgtcgcggtctttttcaggtagtcgagcacctgttcgcggttgtcgatatgggtggccgcgagcgaggtgaagccgatgatcgcgttcatcggcgtgcggatgtcgtgcgacatattgaacaggaattcgcgcttggcgcggttggccgccgtttcctgacggacggcgcgttcaagctcggcgtttttctgctcgagtgaggtctgatatgccttttcgagcgttttctgctgctgcaggaagctcttttccgtgcctcggcgcacgaacaggagcagcgtcagaacgcccacgcaggcgaggaacgccacgatcatgttgaccggcgtgtccgtgtagagcagtctgcccgggacatatatgtagtagtagaaatcgcgcccgtggctgtacattccgtagtaccgggtcagacccttccgcccggcatagaccagcgtttccgcctgtccgctcgaacggatgcggcggagcagctcgtttgcggtggtgtccgtgccgatgagggacggatcatccgacgcggtcacgcggttgccgtccgcgaggagcacgactcccgtgatcgcggcgtcgtagccgtcgagcaggtcctgcacggagagcacggatttctgcgcgaacgcggctttggtgtgccgccaggcgagcaccgcgccgctgccgtccgcaaggctgtgcacagcggtgtcggcgaacgagccgtcggtcagctgcacgcggcggacgtaggtgctctgcggatggccgaccacggcgagcacgcgctccggctccagatcggtctgaagccgggcatagccgatgccgtccgtgctgtattcgcagaccagccgtcccttcgcgtccacgaccgaaacgccggtcagccacagccgctcggtgtactcccgcagcgcgtcctcgccgcagtcgagcgtcaggccgtccagctcctgcatcgcggtcgtgccgcgcacgagcgccttggccacggcggtctcgttgtactgcacgtaggcggaggactgctccttgacgaagctgatcagctcgttcatgcgatgctcgcagtcctgcgtatctatataacgggacagcccgaataccatcccgaggaacatcagtccgcccgcaaggcacaggcaggcgaaggctttccgcgagcgcggctgccggtttttactgttcaagcgcatccacctccagactgtgcgcggggtcgtcgagatactttccgacgagcttttccatgctgccgtcctcgcgcatctgctcaaagacctcgtccagccgcgccgcaaggccgcgcgtgtcatgtcgggaaaaggccacgccgatgccggtcacgagcagcggctcgtccaggatgcggaaattcgcgccgtagtccttcatgtactgccggatggcctcctcgtgcgccgcgaccgcgtccacatagccgcagtcgagcatggcatactgcacgccgcggtccgcgagactgatgatgtcccggaaggccgggacgttatcgccgccgcgcaggaagatcgcctccggcttgccggtcgcctgcaccgcgatggtctttccctcaagctcgctcatcgtctcgatgccgctctgcgcgtcgaccgccacgacctgacggctcgccagatacggccccgcccactgatagtcgttctctcgtcccgccatggaaaagcagccccagatgcagtcgatctctccgctgtcgaccagctcggtctttttctcccagtcgatcgtggtgaattccgcgcggtagcccatgcggcggaacgcctcctccgcgatctcgacgtccagaccggtgatgtcgccgttgttatccatgtaaacatagggcggataggtgtcgctgccgacggtgagcgtcggcagcgtgctgtcggacgccgcggacggggcgcagccggtcagcaggagcgccgagagcgccgcaaaaagcgccgaaacgcgcctcagccgtttgtattttatcatagatcgccgtgtctccttttgtctctctttccctgcggccgaaaataccgcatattatcatttagtataacacgatttcgcccgacggtacaatcctattattctccgggcgctgctgccggaagttctcctttattctgcattgttttggtagtataataaaatagtgaatatgtgacaaaatccgacaggggagggaccgcgacccggctgcggtcgaacgactatgaaccgacagaaaatcctgatcgttgacgactcggagatgaaccgagaaatactcaaggccattctgggcgagggatacaaatatacagaagcagaggacggcgcgcaggcgctgcgcatgctccggcaggatatgaacatcgacctgatgctgctcgacatcaatatgccgaaggtggacggctttaccgtgctcgagtacatgaaccagttccgctggatcgacgagatcccggtcgtcatgatctccgccgccgacgaccacgagtccatcgagcgctgctacggtctcggcgtttccgactacatccgccgtcccttcgacgcgttcatcgtccagcgccgcgtcaagaacacgctcacgctctacgccaaccagaagcggctgatgggcatggtctccgaccagatctaccgcaatcagcgggacaacaatgtcatgatcggcatcctcagccacatcgtcgagttccgcaacagcgagagcgcccagcacgtgctccaggtgcagaccgtgaccgggatgctgctgcgcaggctgagcgaaaagaccgacgtatatcatctgaccgaggaaaagatccgcctcatcgtcaccgcctccgccctgcacgatatcggcaagatcagcattcccgagagcatcctcaacaagccgggccgcctgacgcccgaggagttcgacgtcatccgcacccatcccgccatcggcgcgtccatgctcgaggggctgacgccgtaccgcaaggagccgctgctcaaggccgccatcgagatctgccgctggcatcacgagcgctgggacggcggcggctacccggacggcctgctcggcgaacagatcccgatctcggcgcaggtggtcgcgctggcggacgtatatgacgcgctgacgagcgaccgctgctacaaaaaggcgtacagccacgaaaccgccgtcaccatgatcctcaacggggagtgcggcgcgttcaatccgatgctgctcgactgccttcaggagatcagcgcgcgcctcaagagctcgctgccgcggctcgcggccgagcggagcatgaagaagaacgcgcagcgcctttcctccgagctgctgaaaaagaacgagctgccgcgcagcgaccgcgcccagcgcgagctgaaccacgcccgggaaatgctgacctttttcgcgtcctgctgcggcggcgtgcagttcgagtacgacacgctctcccggtcgatcaccgtggtcgactggagccgcccgtggcggaagagccggacgatcctggacgcggacaacccggacagtatgcgcctgctccggccggctgacctcgagcggctccggtgcgccctcaaggccacgacgcccgagaacaacgagctttccatcagcctgctcctgccggtcgagggcgagcagcactggcacagcatccggatgcacacgctctggtcgccgctctcgcccggcagatatgtcggcgtgatcggctgcatgaccgacatgcagaaggaccgggacagccgtgcgcctttccgctgcacggacaagagcgcggcgaacaggccgttgatcgtcgaagatatccagcgcctcggcacagtctttgacgtcgtccgtctggtcgacccgtcggccaatgccgtgctcgagatcgacgcggacggcgtgctgcaccgcacgggcgagcgctgcaccgcgttctgggacaacgacagagactgcgccaactgcatctccactcgcgccctcgccgagcacaccacgctcaacaagctcgaatttacccgcaacgagatgtatttcgtcatcgcgaagtacgtttcggtcaacggcacgccctgcgtgctcgaaatggtctcgcggctcagcgatggccgctggatcgacgcgaacggctcgcgcttcctgctcgaccgcacgcgcggcgaggatatgcagctgttcctcgacccgctgacgggcgtctattcgcgccgctatttcgagacctaccgcacccacctcgagggcatggagggcgtagcgctcatcgacgtgaacagcttcaagcacatcaacgatacctgcggccacgccgccggagacgcggcgctgcgcgacatcgcgggcgcgatacgctcctgcatccgcaagaccgacatcctcatccgctacggcggggacgagttcctgctcctgttcccgcgcatgaccgaggagatcttccccgagaagaaaaagcagatccagcaggccgtgcgcggcgtccgaatgtccgagttcgcggacatccggctctcggtcagcgtcggcggcgtctgcggcgtgcatccgatcaccgaggccatccgcaaggcggattacctgatgtatctggacaaggcggagcagcagccctgataaaaagcgaaaacccctgccgggaagacagaaagcctgtcccggcaggggttttttgtgctctttttgcacgcttttaattcttttcgaccgaaatgaccgtgccgtcgaacgggtcggcctcggagaccgtgcccttgtaggtgacggtgaccgaatcgccctcggaaacgtcatccagaccctccggctttgccgaggcgtcgaaggtgaattcatacgccgcgcccttttcgtcggtcacgacgaacatgaagtccttcttctcgtcgagcgtacccgagagcgtgctctcggtcgatgcgctgtccgaggacgaggagccggtatccgtatccgtattttcagtcggcttgctgccgcaggccgtgagcgaggccgccaaaagcgcggtgcacgcaagcagcaggaatgtttttttcatgataaatgccttctttcccgaagagacgccggtgtctctgtctcttcgtcagacttagacgcagcgcgtgcgggaaagttccgcgtcgggaaaaatttttttcggaacattcacgcctgattttccgcctgcatctccgcgttccccgtgagcagccgcagcaggtcgtccggcggcagcggacgggagaaatagtagccctgtatcatgtccacgttccagctgcgcagcagctccatctcctcctgcgtctccacgccctccgcgacgatgcggtagccgaggcggcagaaggccgagacgatgctctggtagaagagggcggcgtttttgtccgtgcagatatggaacaggagcgagcggtcgagcttgatgaccgagaagggcagctgcatgaccgtgttgaggttggcgtagcccgagccgaaatcgtccagacacaggccgatgccggccgtctggaggctctccgccacgcgggtcaggctcgcggaatactcggtcgcgacggtctcggtgatctcgaactggaagcaggagcaggggagaccgtactcgccgaggatgcggacgaggtggctgccgctctcgctttggatgaggtcgagcggcgagagattgatcttgacgttggcgatgctcgcgcggagcgccgggttttcgcacagaaaacggcagacgcgccgcagctggagctcggtgatctgggtgatgaggtggttcttttccgccaggcggatgaagatgtccggggagatccagccaagctcgggatgccgcaggcggctgagcgcctcgagggtgacaaagcgctgctgatgcagcgagtagaccggctggtagtagacctcgaacagatcctccgcgatcgcgcggtgcaggaactgctcgacctgtttgttgtagtggaagctgtccatggtcttgcggtcgttctggatgacctgggtctcgccgctccgggagacgagggactcgagatattccgcgtagtcgagcacgagaccgctcgtgcccagcttttccgcgttcaccacgccgcacaggatgaccggcgtgggggcggcgtgcgcgtcgtccggctgcgtatggaacagctgccgcaggcgcgtcaggcaggtctcgtactcgcgcagcgagaacgtcatcagcaggaagcgcttgcccgagatgcggaacacgttccgatccgcgatctcctgcatccgctccgccgcgcggcgcagaaattcgtcgccgttctgcacgcccgcgaccttgtttatgtggtcgagctggtaggcgtagaccgtgatgatgtgaaaggccttgtgcgcgtcggtcagctcatccattcggcgcagcaggtattgcttgtcgttcaggccggtcaggctgtccatacacgcgcaggggttgttgatggtcagatacatggcgaggatgctgagcgagaggccgaagccggtcgtcagcaccgaaggattgacggcctgcgcggcgatgccgagagcggcgagcgcaaagaccgcgagcagctccgtgagcgtgcggcggctgacagacgcgcggtgcaccgcgacaaagaccgccgcccccgcgatgtgcagcagggcgctgacgtacagcagcagataccacgggccgtggcggtagccggtgctgtcgaaatagaacaggatctcggtgaaggggttggtcagaatgacaaagaccagagcgatggtcgggatgcccatgcgcagcacggtcgagggcgcgatcacgcggcttgtacacagtgtacagacgtagtacagcagcaggagcggcaggagcgcctgaaacaggtagaacaccgtgttcgagagcatgcgtccgacgctgaagctgtacggggcgtacaggatgaaggccgtgctgaccagctccgcggcaacgtccagactgacgacgctcagcagacggcggaacatcaggctgttccggtcgtccatctgccgctggcgggaatactgccacaggacgaccagcagcaccgccattgcggcaatcagataatgtatgttggttgtcattcggcgtctcctcccagtccggcttcgtttctcttcaaatgtgcgtcggcctcggccttccatgcgctgatgctgcgcgactttccgtcctcgtcgcacaggcggctgaagccgaaggtcatgataatgcgcgcgcgcggcgcgcaggtccggttgtagcgcgcgacgaccgcgcggaactgccggtgcagctgtccggagtcggtatgcggctcggggcggatgagggcgaactcgttgccgcccgtgcggaagcacaagacgctctcgcccgcctcctcgcacgcgcggcagaagtcggcaacgcattgcgccgccgcgatgaccgattcatctcccgcctgaaggccgaagcggtcgttgcgctcgttcaggccctcgagccggatataggtcagtaccgcatcgcggcagccggccttgccggtgcggatgcgctccatgtattcctcgaacgcgcggcggttcggcaggccggtcatgcggtcctcgcgctgcatctcatggctgatgcggtgctccatgtgaaagcgcatgtcctcgaccgcctggctgatcaggccgtacagcagcaggatgatgaacagcagcacgccgaactggtacacggcgtcgtaccagtagatatgcagcagccagtacagcacgagcgcggccacgccgaacgcgcccagcgcggcgaacgcttcaatgcgcagccggagctgcggcgcgggctgctcgcggtacgagcggaaaagcacggtcagcatcgccgcgacgcctgccgtcagcagcaggtgcgtcagcggcagcatggcgatgaacggcacgccgagcagccggtacgccgcgccctgtgcgagggcgttggcgcagaacagcgcgatgcacacatcgggaacgagccgcagcctgccgctgaccgtgttgcggacgaaatgcaccatcggaacgggcatggtcatgaaggcgtagaaggaaatgacgctcccggcggcggtgtcccgtccgtagatctgatacaggccggaatcggtcaggcaccacaggctgcacagcagcagaaagaccgccacatcgagaaagcggcgctcgcggatgccgaaaaagctcatgtaaaagaagatcagcagcgcgagcacggcgagcacgagcatggcgagcatcatgccgatggagaacagcgaggactggatatgtcggccggtgacggccggcgccgtgccgagaacgggcgcgtcgagcgcgaccgcgcggccggagagcggcgtcagggtcaggctgaacgtctgtccgccgatgttgtccggaagctccgcatccgcccacaggcggcccctcatctgcgcgttcttcgggaaggcgttgtcctcgtagcggtagagcagggtttcgcccgcccggatctcgatgccgtattccacgccgcgcgcgctcagcaccttcccgccgtcgctgtcggtcagcgtgtcgttatacagggtgatcgtctgccccggctcagccgggagcttggccgggagcgtgacttcgcgccgcacgccgtccgtcagctggtaccagccggtgctgagagtggtgagcgtcccgtccggcgcgcgctgatgcagtccggcagcgagcagcagcgccatcgccgcgatcagcagcaggacgagcgtctccgcggcgcggcgcagggtccggtttttcatggctctccctccgtccggtcgttttcatgatggcgctgcttggtctcgtacatccggctgtccgccgcgatgcgcacctgagaagcgtcgccgtcctccggatagcaggcgcagccgcagctgacgccgaccgaaagctcctttccgtcgaggacgacaggggcggaaagcgtggtctggatgcgctcggccatgcgggcgcgctgaccttcgtccatgtcggcgctgacgatgagcgcgaactcatcgccgccgatgcggaaggcgtagtcccggcttcggatgcagcgcagcagccgcgccgcgatctccttgagcagccggtcgcccatcaggtggccgtaggtgtcgtttaccggcttaaagcggtcgagatcgaggtaatacagcacgaacggcagctttttcgcctcgcagatgttcaggactctgctgaaatagcgctcgttgaacaggccggtcatgctgtccgtgttcgccatgttctcgagctcgaccttctgcccgatgtcctgcacgacctgcatgacctcatagaccgtgccgtccgcgtgccacgcgaccgggaggatggtcaggaccatgtaggcgttctccgtccggctgcaatactcgatcttgagattgtcgtccggctttcgcagcacgctgcgcaggtattcgggcgtgatcaggcgcgagagcttggcgttttccgtttcggtcagcgcgacatagcgctcggagatgctctcgaccatgtccgaataccgcccggaggtcggatagagcggctcgctgaggcgcagctcgctgtagcggtagcggtcggtgtccagattgacgatggaatagcggtcgacgatgcggctcatgctttgcagcaggcggtcgctctgcatcttttcgcgctcgaggctcagccgctcctcctcctcgcgccgcaggcgcagctggctctccatgcccagcgccagcaccacgatgatgacggcgaagatgcagagcgcgccgagcgcgatgatcgtagactgctgcacgctgtgcatcgcgccgtccacctcgtcggcgcggatgatgccgacgagcgtccagtccggaaaagcggtcgggatcgcgaccagataattccgccctccctgacaggtgaactgcgcgctcccgctcctgccgagctggacgcagtccttgatgtcgtccatggtgccgtatatccaatcggcgtgcgcgtcgaggtcgtacagattggtcagaccctcgcacagctcggtctgcggctcgagcgcgagcacgatgtcgccgttcgcgcgcacgatatagcagtcgctctgaccgccgtacatgctgccgtcgaccagatcgtcgaccacgtccgtatcatagctgaccgcgaggccggtataggtcacgccgtccagcgtcatgttccggctcagcggcatggcgaacacgatcttgggcacgccgtagctcgccgtgtaggtggagacgatcggcccgccctcgctgtacatctcctgaaaaacgccgctgatgctgtcggcgctgccccggcggccgtccgccgtgaggtactgcgtgctttcgttgaacagatagaagtcgctgtaatgccacgactccttgttggcctgcatatccgccccgatgctgccagcatggtcgatgtctgcgttcttcaacagaccgtcccactgcctcagtacggtccagtttcgctgcacgaacagcgtgaaggtctcggagatctgcgaaaagctctcgagcagatgatccgagctttcctgatagattttcatgccgatgtagctgctgtaaacgccgatgcccgccgcgaacaccatagtaagaagcacggtcagcagagtgatgctcggtcgttttttcatgcacatccctccccgatgatattcttccattcccctttctgttccataattatactatttttcgagcgaaaaagaaagggaggattgcaccctatcagtatttattttccccgcgctgccatgaataaagttataaagtcacaacgtttcaaagttataacgttttaactttcccgcgcggcaggggcaaaaaatatcctctcccgtttgacacaggagaggatattacggtatatacagaaagccgatgcggtacccccgggataattcatacagaaaggaagaatatcattgaattaggctatagatatttaggggggggtatactgctttccgtgccgggtatggcaagtgagtccggcgcggggaaaggagggatgggtaataggtgggatataatatttcatgcttcgggaaggggataccgcaggctttttgtaacagattagtcctccgcgagcttcttgtagcgggcgtagcgggccttgacgtcctcgacctccttcgcgtacagggcgtcggccttgtccgggaagttgttcttga

SEQ ID NO: 12884 - DNA, 4144 bp, Unknown
  gut microbiota DNA sequence
gaaggtggcgagatacccccaatactcttcccttgtcttccaggggtgcatcatccctgcaaaagcacctttgaagtggtacttctcagcaaaaggccggaagtatttgcggtaggagtcgttgtcctcgtagtaaaaatctccgccgccggcagcggacagaccggaggctccgcccactaccacacagtcagcttcctttacctcctgtaccaaacgattgatctgttcgctgtacggcagcggctttttgtcagtcagctgataaggcgtaccgccggaagcatagatatgatagtacttggaataattcatctgggtctgcatgaccaaatcatcatagaagttcattttcaccattccttttgagtgggtgttatttttattcttacttcaaatcattttaacagtctcttgcgtcactgtcaatatgctgttataataaaaataacatcaaaacaaaaaggagatcaggcatgaaatatcccacccgccttagcgatgctgttcatattctgacttttatcgctctgaacccagactgcgacctgaccagcaacaagctggcagagagcgttcagacgaatcctgcctatgtgcgccagctcatgtccgccttgcggaagggagggctgctggtcagcgtcaaggggcacccccgccccgctctggctcgtgagccggagaagatcactctgctagatgcctatcgagcagtagagggaaataagcccctgctccatcaggacatccacaccaacccggcttgtggcgtgggcgtgaacattcaactggtcatccgggattgctacgacctggtacagcagcaagcggagaaggctatggaagctatcaccttgcaggaaattttagatcgttacttggaaaaactctcttgtttaggcaaaaatgattgctaaatggtcaggcataaagccttgcagaaaaaaacgctcctatgctgctgacctgtcatggtatccggttacggagtccatccgcagcctatatggattgacacaatgaaaatttctctttctgaataatggcagagggcggcagcattttgtgctgtcgccctgagactgtcgaaaaacttcgtttttccgacaatctgtgttttggcttcgcaaaacacggacgtccgaaagttcccatgcagaaactttctccctctcaaagtatcaaaaccgaggtacacgcccccggttttgatgcgtttgcgcagcaaacgctttttcatgcgcgctgccgcgcggctgctgttccggcacgaaaatagactttatcaacaaactgagggcggcagcattttgtgctgtcgccctcttgattgcagaacggcaaagacgcacagtctgtcaacgacggcgtagattttatccatttctgcttcaaatgtctcgtccggtatcttgcagcccaagccctttcgatcgtttacttcttcccttccccaatcgcccgctccaccatcgcgtagcaggtctgcaccggcagctcgacgatacgggcaatattctgataggaaatgccctccgcacgatacttgagaatagtcagcgtcagctgcgttctttcaatcgctttctgcaatgcctcggggtcgcgctgctttccctcgttctctttctcccagcatttccagcagagaccatcgggcgaggacgtccggttttctccgcataccttgcataatcttctgtcgttattcataaaaaaactctttccttttgtgtatttcagacacatcccgcgatatgtttgcgccgccgatgtattctctgtgccgctttcgggattttctcctctgcgtgagccggcgcaaacaagcgcgtgttctgccatgcgtgaccgattttcccgaccggctcgattgccgccatggcgcggtgcatggacgcttcgcgcggatgaacgtaataatgcgtagtagtcgtcacatcggcgtgcccgagcagacctgcgaccgtcgcaacgtccacgccttgctcgatggcgcgcgtcgcaaacgtatggcgaatgtcgtgaaaccgaacgtgcgacaggtgcaggccgtccagcacatctctccagtaggcgctcagatggtccgggtcgagcacgccgcccactgcgctgtaaatgatgaaatcctctccattcggcgccctgccaaacagcgagcgaaaccgctcccactgcacagtcagcaggccttgcagcacttccggcaggtagagagaacgttccgaagcctcagttttcgccgtgctgaacaccagttttgtgcgttttccgtattccgcgctcgggtcgatcgtgacgcgccgaaccgtctgcgtaatatgcagcgtgccgctcgccgcgtcgtaatccttccaccgcaccgcgcagacctcgccgagccgcattccggtgtagagcgcaagaataatgcccgcgttgttgagcgacaggtcggaaaacagccacttttcaagcgttgcctgcgcgtcatcgctcagcaccgtcagctttttcgagcggcagtgcgtgtaaaccgttgccggaacaggattgacaggcataatgccgtctgcgaccgcacgtttgcagcagacatcgagcaccactcgcatatttttcacacttttcgcgctcagaggtccgccggtgcgcagatttccatgcagcgcttccccgtttaggaactgctgcacgaccgccgttgtcagctcattcatcggcagattacccagtttcgggagaatatgtttatacatattgtcgcagtaatgctcgtagccgctcggtttcgccacgggcttgacatatgtttcgagccattgctccgtccattcgttcagcgtcataccgttttcaccttgaacgtctgaaaaatacggtcgcccatatgcggcgcatgctgctgatactcacactgcttgcgataacaatatcgcacaaaagctgcctgtatattgtccaaacaaacttttctgccgtccggcagagtcaactgctgacgttcaaagtcccagttttcccagcataccgtttcaatacccggatatggaaaaaaccgaaataaatatttgtttttcattgaatctcgcctttctttgtcatttcataaatgcaaataacatcaaaaataaaaaactgtgcagatctgagacctacacagcatttatcggtatgacaaagagacgaaagttctgcaccgatcgtgccgtttacccttgcgtaaacatcgaaaaaagggtatactgatactgcggtgcggagatttccgttgtgtaggtggggactcacctgcgcaggtacaagggagctgcaactctcttgtactgccgtatttgatttgcaaatgttttctattggtagaataacatatatagcgcacctattcaatggtcatttttaccaatataggtgctctatatgtactatttctactataatttttctaaaatttcttcgggagaggagatgactggatggctgtcagcgaagctcaaaagagagctactataaagtggcagaaagaaaagacagacgaggttcgtttccgcgtacccaagggcgagcgcgccgttattcaggcgcacgctaaccagcaaggcgaatccaccaccgcgtttatcaaacgtgcaatcaaggaaaccatggagcgcgataatgcggagaaaagcgagtaatcgtccgctgcactcccagtgcaattacatatcgttcaaaagactcgttgcaaaataaggcgaaaagctgccctaaaaggacagtttttcgccttattagcgttaaagcagcatacgcttttgcttatccggcagcgcggcgaaattcacgttgtcgagtcgcggcagaatatcgagcaggaacgatgtccatcggcgcgaatccgccactgcaaattttgcaagagttgtgaatccacagcagagataaagttcttcacatagatcaggtttggttttcccagaccttggcgcttgcgttcaatcaatcctgctttcttctcaagttcactgagcagcttgatagccttttgttcagcgcagttcagagccatcttcgcttcgtcgattgtaaaaatgatatacactcgaccgtttttatctatccaaccattcttggcagacaggctcatgcggtcaagcaaaatgccatacagcatctt

SEQ ID NO: 12885 - DNA, 6047 bp, Unknown
  gut microbiota DNA sequence
accgctcaccatcgtgaccatatatccgttcttgccgaagttgagcgcgaccatccggccgtctgccgtatggaagatctgaatgatcacatccgtcggcttcggctcgccggtaaaataattgctcggccgcgtgtccccggtcgtgatcttgccgctgccgaaggtataacgcggaccggcttttttatccgcgctgtccagataaaccagcacctgcccggcaatcctccggctggagctccccgcctcggtcgggtcctttgggttcttctgcaaagcgcccagcgcaccgttggagatgcgccccagcttggtcatctttacgccgccgatcgtcgatttgaacttgcacgattcggcaaagctctccggatacatggcgtagcactcggacagcgccgcctgcgaggccgtccagacgtcccgcgcctccgcgatgaccgcccgctgcttcgccttgtctatgtagccgatcagagacgggatcaaaacggccgcgagtatcgccagaatgaccagcacgacgatcagctctaccagcgtaaatccccgcttatcctttatcgaccgcatatctcaaccttcttccctctctgttatttctttatgataccgcgcgtgcggcggcaagtcaagcacgatccccctcgccttcgcacggggaagggagaacggtttaccggcccaggcagccggccgcgccccgggctttctgtgcagttacaacgttaagacgttacaactttacaactttgtaactttgtgacgtctcagtgcaggatgtcccgcagggtggcgatcagcgcgtcgatcacgagcggcttggacaggaaggcgttcatgccgcagtcgaacgcccgcttccgctcctcctcgaatacgttggccgtcatggccacgatcgggacggcggcgcgcgccgggtcgttcagcgcacggatgcgctgggtggcggtgtagccgtccatgaccggcatctgaatatccatcagcaccagatcatagcggtccgcgggcgaactgcgcaccttgtccaccgcgatcgcgccgttttcggcggtatcgaccagaaaaccgtactcatgcaggatctccaccgcgatctcgcggttgagctcgttgtcctcgaccagcagcacgtgccgtccgcggaagtccgcctgcgcttcgggcaggatgtccggctccgccgccgtcggcgcatggccggtggcggtcagcagagcgtcgcgcaggtcggacaggaacatcggcttggagcagaaggccgtcacgcccgcggcccgcgcctcggcctcgatgtccgaccagtcgtaggcggtcaggatgatgatgggcgtgtcgtcgttcaggctgcggatctggcgcgtgacctcgatgccgttcatgtccggcagccgccagtcgatgatataggcgcggcaggggtcgcccagctcgatggactgccgcgcgcgcagcacggcctcccggccggagagcgtccactcggcgcgcatccccacgcgggtcagcagcttggtcacgctgtcgcaggtattgaaatcgtcgtcgacgacgagcgccttgagtccggcgagctcctcgatcttttcctcgcctcgccgcccggtctgcacgcgcatcggcaggcagacggtgaactcggtgccgcgtccctgctcggtctgcacctcgatcgtgccgcccatcatgtcgacgatgttccgggtgatggccatgccgaggccggtgccctgaatgcggctgaccgtcgaggtgcgctcgcgctcgaacggctcgaagatgcgctcggcgaacgccgcgctcatgccgatgccggtgtcgcggatgcggaactcatactgcgcgcagccgcgcagcgtaccggggttttggcggacgcggaccgagaccgtgccgcccgccggggtgaacttgatggcgttggacagcaggttgagcaggatctgcccgaggcgcgtccggtcgcagcagacgtcctcgtccgtcacgtcgatcgcgtccatgtacagctcgagctgcttggcgtgcacctgtccgctgatgatggtcttgatgtcgtgcagcacatcggacaggctgacctcgctctcttcgagatggagcttgccgctctcgatgcggctcatgtccaggatgtcgttgatgagcgagagcagatggcggctcgaggcgagggtcttggtcagatagtcccggacccgttcggtgtcgctgatgttgctgaccgcaagggtggtgaagccgatgatggcgttcatcggggtgcggatgtcgtgcgacatattggtcaggaagtcgctctttgcgcggctggcggactgggcggccgcgaccgcgtccgaaagcgcctgattgacctctctgtcggccgtgcggtcggacagtacgaggatatacttggtccggcctgccgtctcggtgcccatggcgatgatatggaaccagcggcgctcgccggtcgcttgatggacataatccacgtcccattcgcgctgctcgccgcgctgcatcccctcgaggaagttcttgtcgcggtcgggggagtccgcgtcgtgcagcagcttcagcacatggacgtcctgccgcacctgttcgagcggcacgccgagcagacgctcgatgttcgggctgatatagtccgcgtgcgaggtctcgccgtccagcatgaggaaaacgtcgtcgacgctgtgcgagagccggttgaacagctcgtcccggtacaggatctcggtgtccttccggctgagcgcggcgcggctccaacgcacgatgagcgcgatggccagcaccgcgagcaggaccacgataacggtcacgatctcgaccgttcggaaccacagcctgtccatgctggcgttgacgatgctgaccgggacaaggctgagcatggtccagttctggatgcccgtgttttcgtagaccagatagtgccgcgttccgcgcagcgtcagcatcagactgccgctcctgccctgcgcgaggtcgtcgctcagcgcgtcgaatttttcctcggtcaagtcggaatgttcgcgcagctccgcgaggaggttatagaccgggtcgtcgctgtcgtcgctgctgtcgagcacgacgcgcccgtccggatagatgacatagctgtgagccgcgccgtcgaaggcggtattgtcgagcgcgttcagcaccgcgttgttatagtaggcgatggcgaccgcgtcgtaggcgaagccgcgataggttccctgcgtctccgggcaggcgaacacaagcatctgcggctttccgggcagcgccgcgttcagcacgacgtcctctccggcggaaaacggcccgttcaggtcgacctgtgagccgagagaacccgtttcgccgtccggcgtcatgcagctgccgtccgaggcgaggaagtagagggcggcgcagccggtctcccccttcatctcgttcaggctggagcggatctgctcctcgctcgaggcgttgtccagaaaatcgtcccacagatgcagcagcatccggttgcggctgaccagatggttcagcatattgtcggacttgtgcaggatctcggacagatgcgaggtgctttcctgatagaccgtccgcgagacgaacgagaagtaccgggtgcagatgccgctgatcagcacggtcaggaggagcagggcggcgacggcgctgcgccagctctgcgggagacggtatttggtttttcctccgcgtttttggtcagtcattcctgtttacctcagtctgatatagtgttccggctccgccagcgcggcgtccccccccggcggcatacgcgcgccaggtgtcccggaccctggtctctccgccctcgaaggggcggctctcgtccgcgagcagcagcgccatctgcttcgccgtcgcgaggcaggtcacggtcacggtctcgtcgccctggagcggtttgccgtcccgcgtgaccccggtcagcgcaaagccgccgttttcctccttgacctcgatggcgatgccgctgaccgccggcagggagccgcggttgaacggcgtaaagccgtcctcgctcccctcgacaaaggcgcggacggtctcggtcagctccgcgccggtcatcgtgcggcggtaggcgaacaggtcgttcggcatgatcatcgaggcggccatcttctcggtgtagtccgccgccagcacgctgccggtgaagctgttcgcggcggcgatgagcacatcggaatcgtacacgccgcgcagcgtgttcgccatcacggagaaggaggcgtttccgccgtccgcatggaacacgttcgaataccccttgtccgaggtcagcacggtctccgccgtctccgtatcgcccgtgagcagctgtgcgttgaacgcctgatacgcctgttctgcggtgtattcgcccgcgaccatgcgcgagaccacatccttcgagatggaaaagaagtcgttcgaggcgatgcggatgtacatatggttctgctcgaccaccgggcgcacctcctcgagataatcggtcaggcggaggctgacgttctggctgtagctcaggatatcctgtccgtcatagacgatgcggttctgcgcgccctcggagagcatgacatggagcacctgcatcgcctttgcgcggcgggcgctgtcctgctcgaggtttcggctcagcgcgacctgaaaatacggggtggtcatcagccattgctggccgtcctgcccgaagaacggcaggaaggtcgtatcgatgccctcgtcctccagaattttgacgttagcagaggtgccgaagaacatggcgagcctgccgccgcgcatccggtccatgatgtcgtcgtagttcagcgtcaggtcagcggcgttcaggccggtgtcgcggatgaagcgctcgaggttctcaaaggccgccggccagacggtgtcgtccagaccgaccttttcggtgctcgccgggtcgctgtacgcggtgcgccaccggcggccctccgccgaggaaagctcggagaccgaaaggccctgaagcgtctccatgcaggtgtagtcgtagaaatagtccgcatcaaagccgcggatgccgtgcttttcgaacgcgcggcaggcggaaacgaagctcgcgtaatcggtcggcagcggaattccgtattcctcgaacaggccgcggttgaccacgaagccgtgcgcgtccgcgcagaccggaagccagtttacgctgccgtcctcgttcttgaagctgtcgaggtaggtgttatagaccgcgcccgcctcgttggtcagggcgaggttcatcaggctgtccttcagcggcgcggcgtcgtgcagcgagaagcggcagctggtgatgatgtccggcagaccgccgttttcgttcagaaatttgtaaaaatccagatcgttgttgccgacgatgaactcaatgttcacatccggcagctgcgactggatatagggggcgtaattttcgtacagcgtggtgttccacagatagacctgaatggtctccgcgttctcctgcgccgcgcgcttcttcgcgccgcagccggacagcaggcagacgcctgcgatcagtaccgcgagcaagagggacagaccgcgccgcagctttttctttttcataaaccgttctccttcccccgtgacggccgccgctccccggaaggccgtacttcctttgttttctcttttttccctgccgctgtaaaacggcgatatataaacagcatagcacttttggggcggaaatacaagggatttcgccctttttcgtctgaaacgggcaaaaatccgcgcactacgccgcgcgcatcgtgcttttcccagcgccgcacctgtaaaccggattgaaagcgcggatggggaaacgttataaagctataactttttaactgcataactgtataacgttataactgctgtttgcaaaatcgttagaaaatcctttttgttttcgctctttcgtctcttttgccggaggttttagacgaaaggtttgatttaagaagaataaatcggtaaggattttattagacaccgccgatttgcacgctttcaaaaaccatggcttctgtttccat

SEQ ID NO: 12886 - DNA, 6401 bp, Unknown
  gut microbiota DNA sequence
cagtaaaaaagagcggcaatgcctcgcctcttgtcatggggttcgcctccttcaaaatcgtttatatcttcattacatctgacgtttcggcaaaagcccaggggaaaacgcagatcgcggcaaaaagtttgtcccaggggtcattccagctccatatccttctgccgtgccggcgcccgccggcatagtcctgctcctcccgccgcgccttctgacgctcggcggtcagcgccgccctccgttcttcataagggtctgggatggtctcgcctgtcggctcggtcagcgctgcaaagcgtttcacgctttgaggtctccaccggagacccgcgccccagcaagtaattttgactgttcgggcaaggggcctgaacagcgcaaaatccgcaagcgggtactcgcttgctgtgcttgctgactacttcgccagataccttgtgtttcttcggatattcgtacataatgtatcatgttgagtattatccatgcggaggtgcggtatgaacggaatcaagggctatatctccattcgggaggcgtcttaccgttggggcgtgtcggagcggcgggtcaaccagtattgcgccgaagggcggatccccggcgcgtcccggttcgggcgttcatgggcgatcccggaaaacgcggaaaagccgtccgacccgcgctttcagaagcagcgccgcgattccggcaggacaagcacctgacgaacacccggctgcatttgaagcagccgcaaaaaggaagtgaacgctatgacctgcgacgagagcttataccgccaatatctgagcggtgacgacgaagggcttaatgccctgatggaaaaatacggcgaccccctgaccctgtatattgacggctatctgcacgacgttcacgaggcggaggagctgatgctggatgttttcgcctatctgttcaccaaaaagccccgcatccgggacggcggcttcaaggcgtatctctataaggcggcgcggcatatggcgctgcgccacaagagcaaacgaaagccgctgttcagccttgatacgctgaccggcgagccggacgggcggctgctggtggaggaggtcatacggacggaggagcgaaaccgcatcctgcacttctgcatggatgaaatgaacccggattaccgggaggttttgtacctcacctattttgaaggcatgagctacgcgcaggcggcggaggtcacggggaaaacggtaaaacagatcaccaacatggtatatcgcggaaaagaaagcctgcgaaggctgctggaacgggagggaatcacaaatgcggagtcatgaggagcgcgttgcggaggcaaagcggcgcatcgccaaaatggaacgggaaaaacagcggcggcgcaatacggtcaccatggtttccgccgtggcggcatgccttgtgctgctcatcggcgcgtccttcgccatgcccggcattgccgcaagcatccagaccggcgattatgcgggctttgaaacggcggccagcatctttcacggcggcgccgccttgggatacatcgtcatcgggctgctggcgtttttactcggcgtgtgcgtgaccgttctgtgcttccggctgcggcagatgagccgtgaggacgggcagaacgaggaaagcgaggatgcgcatggagctgattgagaacctgctgcaactgctggtcacgttcgtgggtgcgctgctttcgggtatctcctaccggaaaagccgcaggcaggcgtattttctgctgctgtgcttctacggctgctttgcccttggttcgctctactggacgctgtatctgctgctgttcgacaccacgccgcgcgtcttttatgtgtcggagttcggctgggtggcgagcgtgatcttcctgcggatattgcaggccacgctgaccggaacaaatgagcgcagtttccgctgccgcagggcatggctcgcgcctgcgttcggcgtgccgctgctggcgttctactgcaccttcggggatattttctccaacctgatctggtgcggcatgatgatcgttctctcttactgcgccatccgggggctggtatacgccgatgggcagacgggtgcggcgcgaaatatgcggtggttccacatcggcgtgctgtgctttgcgttcgcggagtatctgctctggacggtgggctgcttctggccggatacatcaccggcaagccccaccttctggtgcgatatgctgctgacgcttgcgattctggggctgctgcccgccacgagaaaggcggtggaagcatgacctacatcgaaaacatcttcctctgcatggtgtctccgctgctggtggctgccctgtgcatgggcaggcggcagctccgctttttcctgttttgcattgccgggatgggggtgtgcctgctttcggcttatatcaacaccttcctcgcggcggtgtgtcaggcggatgcccttgccgccacggtggagatcgcgccggtggtggaggaaatcatgaagctgctgccgctggtgttctatcttctggtgttcgagccggcgggagataaaatcaaggctgccgcaataacagtcactctcgcctttgccacctttgaaaacgtgtgctatctcattcagaacggcgccgaccgcttttccttcatcttcttccggggcttcggcacgggagccatgcacgtcctctgcggtttgatcgtgggcggcgggcttgcctacacatggcggcggacgtggctgaagatcgcaggcacctgcgggctgctgggcgcggccatcaccctccatgccatctataatctgctgatcgcctatggcggcgcggcgcagtacatcgcctacgccctgccggtgctgctggtggtggcgggaagatggtctgttttccgcttatcgcggaggaaataaccgaatatttactccctgagagctgccttttggcggctctcaaatttttttgaaaaattttgcgttttgggtgagagttttttcgattttttgtacctatataagtgaaggggtttttaagccacatttcaaaaaatccagagaggaggttcaagcggaatgtacgataccgcaaggcgggtcgcactcgtcaagcagcgggtgcaggaaaacacccgccggaggcagcggcgcgaggcaatcagcctctccgcagtgtgtatgctgctgtgcgcagcgctgatgcagacagcgggcgcggtcgtcgggccgggacagaccgccgcatggggcgcgttcggcgcgatgctgctgcgggaggacgcaggcggctatgtgctggtgggcgtcgtctgctttgcagcggcggtggtcatcaccgtgctgtgcttccggctcagaaacagagaaaatcagaaaaaagacggggcggacaagcccactcgacacgaacaggaggagaaaagccaatgaagaaacgaatactcagtatcttgctctacctttgcatggcggcgtatatgctccccaccgtggcgtttgcggcggggacaggcaaggcgatacagcttggcacaagcgggatttcgggctatgacaccgcaaaagtcggcacaggctacgactacatttatatgggaagctacaatagcagccctgtaaaatggcgggttttggacgaccagaccaacacgggcgcaaccgggcttttcctcttgtccgaagatttgttgggaagcgggggtcgcggagatgtatatttcgatggcacaagcccgtatagcaacgcatggcagggcagcgacgcgcaggcgtggtgcaatacatttgaaagcagcaatctcaatagcctggaactcgctgcaatccttgcaacaacgaaaagcgacgacgcatttacgagcagcacacataacgtttcctttgctgcttctaccaatattctaaacagcgaccaagtgtttttcctgtccgcagaagaagcggtaaatagcgaatatggctttaccgatgacgcggcgcgtattgccaattatggcaatagcgccggtgtgtggtggctccgttccccttacgcggacttcactagcagcacgggcttagtcgacggctacgggcgtgtgtacgacggcggcgtgggccttggctgggcggcgcgtcccgcttttaacctaaatctaaattctgtcctcttcacatctgccgccgtggacagaaagcccgacgggggattgaccccgatttccgaatacaccggaaacgaatggaaattgacgcttttagataatagccgcagttttgccgtaacggaaaaagctgtcagcggcgaccccggcgatacccttacgctgcattacaacggggcgaccacaggggcaaatgaatatatctctgtcatcgttgcggataacaatggcgcacagtattatggcagagtagcgcagcctactgccgaaaacggaacggttgagatcaaaatcccgtccggccttgcaccgggcagctataccttgaaaattttcagcgaacagtacaacggcgattataaaaccgattacgcaagtgatttcacagacatttcgctgacggtggaaaagcaggcggacgagcagttttcccttgctcccggctacacctattactttgacctatcggcaatgggtattcccggcacggtgaacgatgctctgccggataataccctgcactatgttccctttacctacgcaggaacggtgaacgcctacaagctcacatcggagacggcaaccaccgaggagtatgcacagcagaacaaatatccccacagcctgtttatggcggactatgtcgtaacgcatacggtaagctggaatgacttagatactgcgagtctgattttcggcaaaaattatgccgccggcggtgtggactatacgctgcgtgcgccgtctgcgggaagtggtcgtacaagttcgggcgagtcccaacgcggcacgccccaaagcaacgaatgggacaggatactggacaaggagagcggatatatcaaaaactggagcgatatgtcttcgttgggacaggacaccagacccgataattcgaatccattccgtgcggttcgcgggtacccttgggctcgctactggcactacatcaatgctatgagctcctactcgtactttggtttccgccccgtccttgaggttcggaaccccaacacactgagccttaacgggctgaaggtcgttacccttgaccttggcggcggtaaattgggcggcagcacggatactattcaaatcattgtgaaaaacggcagcaagtttaccgcgcctgcgtccgacggcctgacccgcccggacggaaataacggcagctactttaagtggcttggcagcgacggaaacctgtacgcccccggtgaaagcgttccggaggtcgtaaccacgctgacggcgcagtggacagtcaaccagtacacgattacctataatctggccggcggcactgcggagggcaatcccagcacctacaccatcgagacaaaggctttcaccctcaagaatcctaccaaatccggctataccttcaccggctggagcggcacggggcttgacggcgagaacaatatgaccgtcaccatcccaacgggcagcaccggcaaccgaatctatacggcacactggcgttataatggcagcggccattcttacagctactacaccatcaagacaactgccggggctggtggctccatttctccctccggcaatgtcagcgtccgggagggccgggatcggaccttcaccatcaccccggataagggttatgccatctccaacgtcaagatcgacggcaagagcatcggcgcggtgaagtcctacacctttgagaatgtccgcagaacccacaccatcgaggtcatctttatgaaagccaacggcaacccccagaccggcgtgtttgtggatgtagccaccggcagctattatgaggatgctgtggattgggcagtggagaacggcattaccaagggaaccgatgatacccatttctccccggacggcatctgcacccgtgcgcaggccgtgaccttcctgtggcgcaccgctggcagtcccaaacccgaaatccgcaccatgccgtttaccgacgtccccgtgggcagctactactacgacgctgtgctgtgggcggtaggaaacggcatcaccaagggcaccagcgacaccacgttcagccccaacatgacctgcacccgcgcccagatcgtcgcgttcctgtggcgttccgagaagtccccggcagcgggtacagccaatccctttgccgatgtgaagtccaccgcctactatgctgatgcggtactgtgggcggtcaaggagaacatcaccaagggaaccaccagcacgacattcagccccaatgcggattgcaccagagcgcagatcgtgaccttcctctggcgctgcaagaagtgaccg

SEQ ID NO: 12887 - DNA, 15461 bp, Unknown
  gut microbiota DNA sequence
aagttaacgggctcgaaccgctgaccctctgcttgtaaggcagatgctctcccagctgagctaaacttccatttggtgacccgtgggggaatcgaacccccgttaccgccgtgaaagggcggtgtcttgaccgcttgaccaacgggccaagagaaaaaagtggtagcggtaattggacttgaaccaatgaccttccgggtatgaaccggacgctctagccaactaagctataccgccgtttgcttttctcatcgtcgccctctcgctgacgacttgtttataatacaccataattcgcgaagtgtcaacactttttcgaaaaaaactttaagaaattttcaaaaagattttccggcccgttttctgctttcggaacgcgctcctccccgaggctgtcgagcgcctgctcacagaacacgcggtcccactgatgcgtctcggcaagctgcgccgcgtccaccagaaagaactcctcggagacgtactgtccccggtcggggaccggatcgtcaaacgtgcagtcgatgaaccaggtcctgccgtccagacgcacggcattccagccgtggttcatctgctcggaggcaacgtagaccgccgggatgcctgccgcatcgcacagcatggcgtaggcgcggccgtagccggcgcacacggccctgtggtcgagcagcgcgccgtccgccgaaaacggcgccgtcgagccgtcaggctgctcctgctgctcggtatcgacatcgtattcgcacatccgcacgagggcgtcatgcagcgcgcgcagcttctgctcggccgtcatgtcctccgtgatgcagtccgcggcgagcgccgcagcataggccttcgcctgcgcctgccgtccggggcgcgacatctccacgcgcaggtcggtcgttttgttcgcgcgcacggtcgcgtgcagcgcaaaggcatacggccagcgcgcctccagcgcgcggtagaccgtgtccgggtccacctccgacgagcggaagcgcaccggctcctctcctgcctgctggagcagctccgccgcctcgaacggcgtgctcacgcgctccgccgacaggtacggataccatacaagtcctgcgctcaccgcgagcagacacagcagcagcgcccagactgtcctgcgcatccgtgttccccccttctcaaaagcaaaacggcggacgactgcgtgagccatccgccgcattctgcgaacaaatagattacatcagcttgaccgtgtagtaaaccgcggtcacgaacaggtatgccgctgccacacccatcacgacgatcatatgcgtcggagcgagcaggacgactgcggtcagcaccgccatgaggattggcgttacggtcatcatcaggaaggcgttgctgctgaagcgtgcctctgcctttttgccggtgttcttcgccttgccctgtctgccgcgaacggaatggacgacagcgatctgcgcaacggtcagaaccgccgccgcaatcagaacggcatacgccatccaggtaaagttcgaggaaacgagggcgcggtgtacgagccacatcatgccgagcgccgcaccgcagtccacggtgatcacgaaaaactcggtcgaataggaatggtagaccagatagaataccgcgagaacgggcaggatcacgtaaagcgccttgatcggagcgataccgatgtagctgatcgcgctcatgcagaccgtcatgacaacgcttgcgatcagcagattgcgtccgcagataatgcggcgggagccgtttctgcggcccgtgcgctccatgccgagcatgaccagaccgccgacgacgccgatgatgccgatggcgagcaggatcctggtaacgatgagaccgatcatgaacgtgctgccgtagttgagcaggcgctgaaggatcatcagcaccagaacgccgagcaggcacacgctgaacacggtcagcaccttgtttgttgtatattcttcctcagaaattggctttttgcccacattgctttttgccaacgaagtacactccctctttttacatatttccgcctgcgtacagcactgctgccagcgctgcgacaggcgcggtctcacaccgcaggatgcgcgtgccgagcgaaacgctcgaaagacctgcattctgtgccgcctgtacctcttcgggcgcgaagccgccctccgggccgacgacgagcgagaccgtgtccgaaacgccctgtccttcgagcgtctcgcgcagtccccttgtctcatgttcgtagaaaaacagcgccgttccgctgtctgatgccatggcgaacgccttttccgcgctctccaccgcagtgacgaccggcagacagcctcgtccgcactgctttgcggcctctgctgcgatcttccgccagcgctcgacctttttatcggtcttgtccgggcgggacacacagtttttcgacaggaacggtacgatcttccgcacgcccagctccaccgacttctgaatgacgaactccatcttgtcgcccttcggcagcgccatgaacagcgtcatgtcctgccggggttcggtctccgacgggtgcaccgcctgcacgcggcagacaacctcgtccttttccgcctgctcaacggtacagtcgaaatcagtgcctgcgccgtcgcacagcgtcagcgtctcgcccggtctgagccggagcacacggcctgcatggtgcgcattttcgcccgtgagcgtataaagctcaccctgcggtctgtcgtcgatgaaaaatcttggcatgcaaacttaacctttcctattctaacaaattatcggccttttggcaagggaacaatcaacaaatcattccaaaaatcattttttcgcggtgaacgcgctccagtcgtcgcttttcgcgtgatttacgacctcgaaacccgccttttcgagcgctgcacgaacctcgtccgctcgttcgttcaggatgcccgagcagatgagcgtgccgccctcggcggttttcgcgaaaaacatcggcgccatgccgatgatgacgtccgccacgatgttcgcaacgatgacgctgtagccgctgccgatgtccgcggcgagcttttcgtcgcgcagcgcgtcgccgcacaggccgcggccgatgctgacgtggttcttttctgcgttctcctgcgccgtgcgcaggcagttttcgtcgatgtccacgaccgtgcgcacctccgcgccgagcatggccgcagcgatggcgaggatgcccgagccggtgcccatgtcgagcacggtgtcgcccggctttacgttgtcctcgagcgcgcacatgcacagctgcgtggtgtcgtgactgccggtgccgaacgaggacgccgggtcgatctccagaatacggcggccctgcgcgtcgtccacggtctcccacgacggcttgatcataaaggaatggccgaccgggaacggcttgaaatactgcttccagccccactcccagtcctcctgacgggtgagcgcggtctcagtgaccagacggccccaggcgtgctcctcgtcgcgcgccttgaggttttcgagcgaggtgcgcagcgccgcatactgcttcgcgccggcctcatcatccgaaagataaatcttcagacaggtctcctgtgcgcgcttttcgcgcaccagctcctcgtcaacatagtcccagtagatctcggtatccttgagaaattcctcaaagtctgcggcatcctcaagcacatagccctcgatgccgttgtcctccagaaccgcctcgaccgggccgatgccctcggtggtggtgtagatggtgacttctctccagtccatccgttctctttcctccttgttatcgcctcattatagacgtatccgggtctgtttttgttccccttacaggcgaaccagaccgtattttctttcccagtaatgcacgacctcatccggctgctcccaggtgccgtcgtacagcgccagaccggggaacacgcgcaggcccttttcgagcaggtctgcgttctccgcgcacaggcagatcgggcgcgagatcatataccggcattcctcgagcgccacaaggtcatcctcggtctcgagcacgagcttgaacgcgccggagtcatcctctgcctcgagcagatcctcgcccagacgcgggccgcattcgatctcgtcggaaatgtcgatcgtcggatcgatgaagtgcgcgttggtgccgtcgggcgcgagaataaaatcgtcgtggtcgcgcacgatgctgcggcagtccgccttctcgtcgagcgcgcgcaggagcgccggaacgctgtctccctccgccggaacaacgatctccgtgttataaagcggcaggttttcgtcgatccatgcggacggaacgcacacgccgagcgacagccgcgcatagggcgcggtcctttcgagcgcttcagagagttcctccatgctgcgggcgcgcaggatgacggtcgtcacgccgatgcgctgcagaacgccgatggctgcgcgcacgtccgtgccgtccgcgaggtgtccctcatcgtcctcgagcgtcagctccgcgatgaccgtccggccgcagatgtcgccgagcgccagcaccgctgcgcgcagagccgcaaaggtctccgagccgcgcagataataaaatgcagcgtcctcgtgcagtctgtcgcgaaaagcgtccttgcacagaccgatatagtacagcgttaccgggcgttcggtgtcctcatcctcttcgtcgggtacaggcgggcagtcgagcgcaatgccgaccggaagcggatcgagcgtcctctcccattcgtcgcaggcggctccgtccggggcgaccgccccggcaaaccggtccgggtgttccctccataagggaacgtcgtccggagaagtgagcataagctgcggctttcggccgctctgacttaaaggtacgtccacgatagttgttcctcccatgcagacattttaatatatctttgtgtcgtttttatgaatttcgtttccatgttccgtccggacgcacggaatactgctgcggctttgccgccgcgagacggcagatctcgagcgccgactgcatctgcatatcgagcgtgtaggtcttgccggagagtgcggagatcgcgtccgaaagcgcggagagcatctcgggcgaagcgtaggccgccgccggcaggtcatagctgctgcagaagccgttcacggcatcgagcacatcgccgttaaaggtgttcgtcggctcgccgatgaggccgagcagctgaagacgctcggtcatcgcgtaaatattgtccgagacctcgccgaagtacatggtcccgctcgtgtcgagcgcatggagtgcgtcctcgcgcacgctgaccgtgctgttgccgacctggatgtccggggtcaggcccctgccctcccagcagccctgtccgggcagctccatttcgagcgtcgtgatgaccagcttgtcgccgttgatgagcggcaggtgcatctgcccctgtcccttgccgtaggtcttttcgccgacgacggtcacgtttttcgcggtatcctgaaggatgcccgtaagcagctcagccgccgaggccgtgccgccgttgacgagaacgacgatcttgttcagcggcagaccgccgccagtcgagacggtctcctccagaccgcccatgtcgtcgcggtagcgcacgccggcgagcgtcacgcccttgtccggcgtcatggcgttggcgattttgaaggcgacgtcgatcagaccgccgccgttcccgcgcaggtcgagcacgaccgcacgggtatttttcttcgcaaggccgttccagatctcagagaacgcctgccagtcgttttccgaggcgaacgagctgatcttgatatactcgacgccctgcgtcagcgtgctgttcgagacgtagacctgattgacctgacggcgcgtgatcgtgaccgtgatgtcgcggccctgacggcgcacggtcacgctgaccgtcgtgccctcctgcccgcgcagtctggacgccacatccgccgtctccgcgccgctgacgtcctcgccgtcgatcttcacgataaggtcgccgatctgaaggccggcctcctcggccgcggaatagcgcatgacctcgccgatctgcacgccgcctgcggtctgccgcaggccgacgccgatgccgacaaagccctcgagcgtggaaaagccctgcgaatactcctcgctcgacagatacatcgagtgggtgtcgagcaggccgaggatatcgttgatgacatcatacatctcctcgggatgcttttccagatatttgttgatataattctgaagcacatacgggtcatgctcggtcttgatgctgaacgcatcgatcaggctccacacgccgtcgaaccacgtttcgctctgtccgtccgccgtgatggcgcctgccggcgcggtcagcagcgccgccgaaagtgccagtgccgtcagttttttcgctgtttttttcatgagatcttctcctcacgcacgcggcgcggctcgattgaattacatcgactccggtgcgtcaacgccgatgagcttcagcacgttctcgatggtctgcttcgctgcaaggcacagggtcagacgcgcgtcgcgcaccgccggctctgcgtccttgatgcggcaggcgttgtagaagtggtggaactgctgtgccagagcgacggcgtacttgttgaggcgagacgggtcgcggctgaccgccgactgcacgatctcctcgggcagcagcgcgatctgcttgatgagctggcgctcgtccgcgccggtcagcacggaaagatcggtcttttctgcgtccggcagcgcgatgccgctctcctgtgcgtttctgagcacggagcagatgcgcgcgtgcgcatactgaacgtagtacagcggattgtccgagtcctgcttgatggcaaggtcgaggtcgaactccatctgggtctcagcggcgcgggagttgaagaagaagcgcgctgcgtctaccgggatctcgtcgagcagatcggtcagcgtcaggctcttgccggtgcgcttggacatacggacgacctcgccgccctgcatcatgcggacgagctgcatgagcacgatctccagacggtgcgagccgtcgagaccgagcgcatcgagcgcgcactgcaggcgctttacatggccgtgatggtccgcgccccagatgttgatgacgcgatcgaagccgcgcttctcgaatttgttgcggtgatacgcaatatctgccgcaaagtaggtgtagaagccgttcgcgcggcgcagaacatcgtccttgtcgcagccaaagtcggtcgagcgcagccacagtgcgccgtcctcggtctcgtaggtcgcgcccttcgcggtcagcatgtcgatggtctccttgacgtagccgctctcatgcagagtggactcgcggaaccatacgtcgtagttgatcttgtagcgcttgaggtcgcgctccatgcgcgcgatattggtcggcagaccgtagccctcgatgatggcgaagcgctcctccggggtcttttcaagcagactgtcgccgtactgctcgaccagatcgtgcgcgagcgccttgatgtcgtcgccctgataccaggaagcgtcgaactcgatcgcgtcctcgccctttacctcctgaatatagcggccctcgaccgaatgcgcgaacttgtcgacctgattgccggcgtcgttgatatagaactcacgggtcacgtcgttgccggaccagtcgagcacggaggacaggcagtcgcccagaacgccgccgcgtgcgttgcccatgtgcatcgggccggtggggttggcggaaacgaactcgaccatgaccttctccggctttgcagccttggtgcggccgtagttttcgcccatctcgaatacaccgcggactgccttctcgtaccagctctggttcagggtaaagttcatgaagcccgggcctgcgatggtcacggtgtcgaagatgctgccctcgagctcgaggttcgcgacgatgccctctgcgatcttgcgcggcgccatgtgcagcggctttgcgcactgcatggcaaaggtggacgcccagtcgccgttggaggaatccttcggggtctctactgcaaccggcgggatgctgccctcgggcagttcgcctgctgcaacagccttgtggtaagctgcctcgacgacacgggtcgcctcagcgcgtgcgatttcatatgcgttcattcgtacactctccgttttatttaatgatatgacttgatttataagactgtcaaaaaacttcgtttttccacagaccgaactttaggcatcaccgcgcctcgtcagtgcgcgaaatttactcgcaggtcgctcttgtccgatgatgcggtattgcctttattattttatgatacgaccatttcaaaatggtgttcgcccatcagcgagttgtccacctcgacggtgtagtcgatgacgaggcggccgccgttttcgccgaccgtgttgcttacgcgcgacgtatgcgtcgcgatcgtcatgtcctgcccgatgggggtctgatacagaccgatatggcgctcatcctcggaaaacagcatgtgcgatgggaaggttcccgtgcggatgagggtcacggtcttgccgtcgagcttgacggtggtcttggtgccttcgaggccggtcagctcgctttcctcgtaggcgatatagtattttccgccgcgctcatagagcgtcgctgcggtttcaaggttgacacgctcctcgtcgcagccttcgaactgctgccgcgaacggatggtcagccagacatcttttttcatgctgtcaaatgctcctaatcaaaacctggaaatatcgacgagtccggcgttggtctcgacgtcctcctgcaggaacagtcctgcaaggcggtcaaagccggccgggtcgtccgaaacatagtaccgcgtgccgcccgggccgtcgttcgggttgaactgggtcgaggcgaggttggcggcctccgcgcccgagtcgatgagcgtcacgtccggacccatatagtcggaaatgacctcctcgagcagcggatagtgcgtgcagccgaggatgagcgtatccacgcccgcttccttgagcggcgcgaggtattccgctgcgaccgtctcgatgacgatgtcgccccggtgcactctgccgttctcgacgagcggcacgaacagcgggcacgcctgcgtgaacaggcggagcgtgccgtcctttttatgcagatatttttcgtatgcgcccgaccgcatggtcgcggcggtgccgatgacgccgacccggccgtttttcgtcatggtcatggcgcgtcggcaggcgggttcgaccgtaccgatgatcggaatgttgttctcctccgcgagcagatcgagcgccacagacgagaccgtgttgcaggcgatgacgatggccttgaggtcgaactgccgcaggaacgcaacgtcctgccgcgcatatttcacgatggtgtcgcggccgcgcgtgccgtagggcacacggctcgtatcaccgaaatagatgatgttttccttcggcatgagcgcatgcaggcggcgcactgcggtcagaccgcccatgcccgagtcgaacacaccgatcgagcggttgtccggcgcgcgtttatccatgatgctcctccagcgccagagagatcaggcggtcgagcagctccggatagcggatgccctcgtagtcgaacagcttggggtacatgctgatcgaggtaaagcccggaatggcgttcagttcattaaatacgacctcgccgccgtcgtgcgtgacgaagaaatcgacgcgcgacaggccgcggcagccgagcgcggtgtagacgcgcagcgcgtcctgacggacggtctcgagctgctcgccggtgatgtgcgccgggatgtacaggcgggagctctcgtccttgtacttcgcatcaaaggtgtagaactcctgcgtcggcgcgatctcgccgaccgtagaggcctgcggatgctcgttgccgaggaccgcacactcgacctcatggccgtcgatgaactcctcgacgaggaccttgctgtccatcttgaacgcctcggtcaggccctcggccagctcgagtatgttgtttgccttggcaacgccgaccgacgagccctgcgagcacggcttgacgaataccgggaacgagccgagctgctcggccgccgtgcggacaacgccctcagggttgcacgcgaagtcgcacgcgagcgcgagatagtagcgcgcctgacgcacgcccgtgccctcgacgacctttttggtcagcgacttgtccatcgtgttcgcgctcgccgcaacgccgcagccgacatacgggatgcctgccagctcgagcacgccctgcatggtgccgtcctcgccgcctacgccgtgcagcacggggaacacgcagtcgaggcggacgaactcggtctcaccctcgcgcagcagcacgaggccgtggatgctgcggtcgggcggcagcagcgccggaacgaggtcgtttctgctttcccatgcgccggactcgatcgcgtccgcgtcgcactccggcagatagtaccacctgccctcgcgcgtgatgccgaccgcatgaatttcatatttcgatttatcaagattgcgcagaatggatgcggcagacaggcacgaaatgtcgtgctcactcgaaatgccgccgaatatcacagccagtttcattttttctgttacgccctcccagtgtttcttactcatacttatacggataccattatacgccatcccccgttcgattacaatgtaaaaatacatttaaacgcgcattgttcacacaaaatttatatttttgcagcgccgtttttggctatcctgcgactgtctcttgacgaaactgtaaaaacaacgtatgataaggaaaaggagttttgacttatgaacggtaaaagactgtatcgcagcgagagcaaccgcatgctgtgcggcgtctgcgcgggcatcgcagagtatttcaaccttgacccgacgctcatccgtctggcctgggcgctgttctgcgtcctcggcggcagcggcgtgctcgcctatattcttgccgccatcatcatcccgcccgaaagccgggtctgacaagcaaaggaagtgaccgccatgagcgaaaacgataagatcacagaagaaaccgcaaacgacaccctgccggccgaggtcgagaccgaccttgcagaacaggagaccgatgtcatgcctgccgagccggaggaggaggaaatcgcccccgaggacgtcaaaatcttcggcatgccgcgccatgtgttccactggaccgcgatcggcgccgccggcggctatatcctggccggcgttgtcggcatcatcggcgagcagctgcccggctcgctcttcgagaccatctcgggcaaaacgaatgcgaccgtctgggcggtcgttgtaggcgcgatcggctactttttcagctcccgtgcgtacaaaaagcgcaaggccgctgaggaagccgagaaaaatacagaacaactgtgagcaaaagcagcggaacgcaaaaatccgctgctttttccttatgaaatggaaaaggagatttatacatgccgatttttgaccgagatcatgccgactcccccgaaaaagcctatgtctatatcctgcggtgcgcggacgggacgctgtactgcggctggacgaacgaccttgccgcgcggctcgacgcgcacaacagcggaaagggcgcgaaatacacgcgcggccgcggcccggtcgagctcgcgtacagcgaaatgttcggcacgcagagcgaggccatgcaccgcgaggccgagatcaaaaagctgagccgcccgcaaaaacaggcgctgctcgaccgtcagaccggcggcgaaatgttgaccgtctacgacgcggccgaccgtccctgcggcgcgcgtccgcgctccatcgtccacgcgcagggtctgcgccaccatgtctgccatctgtgggtcgtgggcgtacgtgacggcgtgcgcggcatctggctgcaaaagcggcagaacgaccgaccgctctatcccggcttctacgacctgaccgcgaccggccacatggaccccggcgaaacgccgctcaccgccgcgctgcgcgaggcacgcgaggaggtcggactgcacgcggacgaagccgatgtcacgcccggcggcagctaccgccagcgctattaccgcgcagacggcggctttgacgatgagctttcgtttgtctttctcatgcgccgggacggcgtgcccccgttcgcgcccggccccgaggtcgccgagatggtgttcgtgccgctcgaggactttgccctcgcgcatctcgaccctcacgacctccctgcgcgcggcatggacggcgttcccctcacgctgccgcacgaaaagctcgcctgcctgcacggcgaggaatggaacggcgtgcgcgagatcgtcgagcgtctgctcgatgatgaccattcgtaatatctctattttttattacaatcaggcgataaaccaccccggcgcagctcttgtgcgccggggtggttttatacttttcgttatattatacgtttcgttatttcttgaggctgcccttggcgatgttctccttgaggatgcagtcggtcagctcgtacagcttttccgagccgaggcggctctttcgctggcggccgtagacctgctcggcgttcacatcatgctccgcccagtcgctgccgccgttcgagttgttgagcaggagcggctggagattgtccatcgtgtgcgcaaaatgcgcctccggggtctcgtcggcctcgaattcatcgaagatcgcgctgagcgtctgcttctgatcatccggcagcagcgagtacacgcgctcctttgcggcctcctcgcgcgccttctgcgtcgcaagcccctctctgtcgtaggcgtaggtatcgccggcgtcgatctccacaacgtcgtgaatcaggcacatcagcatgaccttcgccacatccacccgctcgttcgaatattcctgcaaaagatatgccataatggccatatgccaggcgtgctccgcgtcgttttcgcggcggccatgccccgagagatgggtctggcggaatacgttcttctccttgtcaagctcgagaataaaatcaagctggcgtttcagccgttcgtccatgtttaccgctcctcgctgtattgtcgttctctcacagtatagcacactgcgcccgccccggccagtcctccggcgtttgttttttcgtccgctcttcggcatatctctacattttcttgacatttcgcataattctctataaggcgtaaacaacaatattaaattaccgccccaaacagagccgttctcccgctcggtttggggctgcattctgtctggagagtgatgaaccttggctgacagcttgattgaactgcatgacctcaaaaaagaatttgacgggaccccggtgctccggggcatctcgctcgacatcaaaagccgcgagttcgtaaccctgctcggtccgtccggctgcggcaagaccacaacgctgcgcatcatcggcggcttcgagcagcccgacagcggcgacgtgttcttcgagggcaagcgcttaaacgacgttccgccctaccgccgcgagatcaacaccgttttccagcgctacgctctgttcccccatctgaacgttgcagagaacatcgccttcggcctgcacatcaagaagatgaatccgtccgagatcaagctgaaaacgcgcgaaatgctctcgctcgtcggcctttccggcttcgaggcgcgcgatgtgaccagcctgtccggcggccagcagcagcgtgtcgccatcgcgcgtgcgctcgtctgtgagccgcgcgtgctgctgctcgacgagccgctcggcggcactcgacctcggcgcaacgccccgtcaggcgctgcacagggtcatcctgcccgagatcatgcccggcatcgtcacgggcgacatcatggcgttcacgatgtcggtagacgatttcgtcgtttcctacttcaccgccggcacgaccaatcagccgctttcggtcgtcatctactcgatgacgcgccaccgcatgactccgaagatcaacgcggtctcgacgctgctgttcctgttcgtccttgtgctgctcgttatcatcaacgtgagccaatcgcgcgacgaaaagcgccgcgaggccgcacgaagggaggctgcatcatgaaactgctcaagcgaacgctcgctctgacgctctccgccgccatggtgctcggactgctgtccggctgcggcagcgacgcctccgcgaatgtcctgaacgtctataactggggcgaatatatcgacacagacctgctcgaccggttcgagcaggagaccggcatcaaggtcatctacaacaccttcgactcgaacgaaaacctgtattcgcgcatccagaccacgagctatgacgtgatcatcccgtcggactacgcgatctcgcgctttatcgacgaggatatgctccggccgctgaacttcgacaatattccgaacatgaagtacatcgacgagaagtacacccatcttgacttcgacccggagcagaaatactcggtgccgtacacttggggcgtagtcggcatcgtctacaacacgaaatatgtcgatgaggccgacaccggctcgtgggatctgctgtggaaccccaaatatgcgaaccgcaccgcgatgttcaacaactcgcgcgacgcgctcggcatcgcgctgatgtacctcggctgctcgctcaacaccaccgaccgcgacgagctgcggcaggccgccgacctcatcatcgccggaaagccggtctatcagggcatctggatggatcagatattagagaagctgccggccgaggagatcgttgctgcgccctactacaacggcgacgcggtcacgatgatcgacgagaaccccgatctcgcgttttacgtcctgaaggagggtacgaacctgttcgtggacgcgatgtgcattccgaagaacgcgaagaacgtggagggtgcggagaagttcatcaacttcatgtgctcgaccgaggcggcgatggcgaactgggaatacatcggctattccagtccgcacacgggcgtatacgaacagctcgacgaggagaccagaaacgatccgctgtacttcccggacacgagcgcctatcccaccgaggcctacacgaaccttccgaaggacatttcgcagtattataatgatctgtgggtcgatatcctgacctaaattccaggggggacgctgtcccccctggatacgttttcggttccggagaaaccgaaaacgatacccccctctcgtccgcacagcggacgaggccgcgccgccgtggcgcgggcagaggtataaaagtccggcagagctggacttttatggggaatttgatgcggcgctctgcgaagcgcctgtcctgcctgttttgccgaaggcaaaatgcggcaggagaacgcgcccgaagggcgcgaaaaaggcacgccgtcggcgtgccttttc

SEQ ID NO: 12888 - DNA, 15441 bp, Unknown
  gut microbiota DNA sequence
cagtagttaagctcatttacggtgacaatacttggctggcgacggcccgggaagataactcaacgcgcacacaattaagactcagaactttggttctgagtcttttttgctttttacacaaaatagatgaacggcatcatggagcgatgccgttcgaaaagaaatgaagaatgaagattgaaatccgcaaataaagaatttcacggacttcccctttattataccttgtaccatggacaaaatatgtctatttcgcgcaaaatatgcacagcctgtggaaaaatcaacgttcatccagatattgcgcggtacgcgccatgacgcggtggagggtctcaagatcatgcagtgtatcggcagtttcgagcgaatgatctgcgttttctacaagaaaaagcggcagtctgagccttctgcattcgttttttacgaccttggtgcgcgcccaggggtctgcggtaccgtggaaaaccagaccctcgcgtctgaaatacgcaaacgagttctcgaccggcgtgtagtagacctgctgcggagagagggaaaaccgggcggcgcagaccgccgcaactgccgttccgagacttttagagataaacaggagctgtttgtgttgatcgggcgcaattccggacagctgttcggacgcggcgcggctgcaaagctcaatggcctgctggatcctctccggcttaccacgcagaccggtcggcagcggcggatagctgaccgcgcagacttcgtatccgcgctcacgcgccagcttcgcactgtggtacagcagcggtctgtcgacatggtagccgacgcccgggaacaggacggcaagtttctctgacatgcaaattccttctttctgctgaaaagtatagcacaatgcataagattttgacaggattttttacagttacatttctgaacaccgcttgcacacagatgcagtttcgcctatgataaagaaaaggacggtggacaaggggagcgtccgccgatagctgtcgaaaggcgaaggaggagaacagcatgaaaaacatctgtaaacggacgctttgcgcagcgctcgcgctcggtatggcgctgctcccagcaggagcgaccaactggggtctttggtacggaaacggccttcatcagcccccgaacggcgaggataccgtgcagacgctcgcaaagtacggcgcctattatatggggagcgcggacgagaaaacgctgtatcttacgtttgactgcggatacgagaacggaaatactgccaaaatactggataccctcaagaaacagcacgttcccggcgcgttcttcgtcgtgggcgattacctcaagaccgctccggcacttgtcaggcgcatgggcgacgagggccatctcgtcggcaaccatacgaacaatcatcctaacatgagcaaggtggggaaggcgcgcttcacctccgagctgacggcggtcagctcgcagtacaggcagctgaccggacgcagcatcgcgccgttctatcgtccgccggagggttcgtatacctatgataatctcagctgggcgcagtcgctcggctaccacacgacgctgtggagcgtcgcgtatgcagactgggacccggcgtcgcagccgtcctatgcttccgcgaagcagaccatccgtgcgcgcgcgcacaacggagccatcatcctgctgcacgcggtctcctcgactaatgcggcgattctgaacgacctcatttccggctggaaggctgagggctacaccttcaaggcgctgagcgctctgcccggcattaaaaacccgaccgtcaacgccctgccgaacgatgcggcgttcgctgtcggaggaagcagggcggcatttactgcgtttctgatcgacgatgcaaactatatcaagctgcgcgatgccgcagcggccctctcgggcacggagaaggcgtttgcggtcacgtatgatgcggcgtcggacagcgtacagctgtcgcgcggcggcgcatacgaggcgctggggaccgagctttcgggtatgcgcgatgcggctgtcgtgcaggccggcgcaggctcgcagagcattacccttgacggggaggcgctgacgctgaaaagctatctgatcgatgacgcgaactatgtcaagctgcgtgatctggcgcaggcgctcgactgcggcgtagcctacgataacgcgacgcgcgcggtcgtgctcgacccggcggcgaaatacactgcggaataaaactaaaaaatattacaaaacgaaatacaaaaatacagcctcggcagaaatgccgaggctgtcagttttttgatcaggtctatcttcacgatatggagaccggcgcggtctcgtccgtctgcatactgtctgcggtctgctgctcttcggtcggctctgcgaccgtgatgtcgcagtactggtaggccgtcgagccgtccgtgcgcgtcacgcggcaggtcagacaggtctggccgggctggtatgtgcggaaggtgcagtagaaggtctttccgttcggggagacctgcggcacggcttccgcgatggacgggtcgtctacgatccattcgacgttctcgatctcgtcggtatagctctggtcggtcatgaccgtgctctgggtcgccttgtcgaaataaaactcgctgccggagaaaatctggcgcaggatgataacgccatcctgcgtgatgtcgatcttcgtcggtacggcggtcgtttcggtgttcgctgggagcgtgatgctggtgcgatcgagaatcgcgttttcgtgctgttccaccagatcaaacaccgcggtatcggtgtatttgccccacttgacggtcagttcgaccgtgccggtggagacctgttcgccgaggggatcgcccgggatggagacgctgccgtcatccgggttaaagcgcagcagggagcggcggctgaccgaccattcaagctcgttttccgggatggcatcgccggtcgcgcggtcgtaggcggaaacataggtaacgagcggacagctgcgcgcggcgagcacgcggtggtgcacggtcaggacaacgccctcctcggcgtcctccgtatcggtctcggtgttcgcccacggattggaaaagctgtcatccccggtctgcgcctcgatctcggcggaggctgtctcatcggggacgttttcaatctttggctgcgtgccccatgcgatgagcgccgcagagcacagcacgagcgcaaaggaggccgcgaaggtctcgtggcggtgcttcgcaaggaggagcagcagcggagacttgccggcttttttcgcggcgtcccgggcagcggagcgtgccgccgccttttcgcaggctgcggccttcttttcgacgctcgcgagcgcggtctgcacgagccttgcggcggtctgtgtgtcgagctcggtcagttccgcatcgaggcacagaaaatgccgcagaaaaggcagaagggatacgccccgcagcgacgggtcggcggtctctctcccgcgaacgccgcgctctatggcgctctgcgcgccgccgaggcgcgtttttaccgcgctttcggaaatggcaagagcggctgcgatctcgctgatgctcatttcgagataatagtacatcagcacgcattcgcgctgtacattgggcagggcggcagtgagcgcggcggcgagacggcggttctcctcgctgtcgagcgccttgtccggcagaacctgcgccgggccgtcgataaacggcgcggagtcggcctgctcgggcgcggcgttccttgccgcggcgcggcacagccttgcggcggtgctcaccgtccggagcgggaaatcctcgtcgtttttcagttcagaaagaccgttcagcacctcgcagaagattttccgttcggtatcctgtgcgcggcgttcgtccttcagcattttcaggcagtagaaatagagacgcggctgtatcgcgcggagcagttcgctctgtgcctcggcatctcccctgcgacagcgcgcgagcagcaggcgcgtgtcctcgttcagcatagtaaatctccccttgggttaagggcggcaccgcaaaatgatatggtgctgcctcagcattctttttcattttacagtatagtttacgcgcaaaccgttgtcaatttacaggatggaaagttcacaaaaaaaatataaactctcgcctgtcggtgacggtgagcgagagtttatagataacgcgcggtttttatgcgttttccgcgagggtgatgaggctcggcgtgcagaccgtgctctgctcaggcgtgcgctcgtagaccaggtgctcgaacagcagccgcatggcgagccgtccctgctcggccgcgtcgcagctgaccgcacaggcgaccgcgccgctgcggaggagtgcagcgatctccgggctgttctcgaagcacagcagcgcgggacgagcggccggatttgcatcatgaatcgcgcggcagacctcgggcacgcagccgcagaggatgacgagcgcatcgagtccgggacagcggctgagcagggcacgggtgttcatgtaggcgagcttgggggagggcttggtctcggcggccactgcgagcggcagattttcatcgagcgcgtccgcgagcgactgctcctgcggcgtgacgccgcccggggtgcgcagtacgccgaccctgccgctgccgccgagcagaagcccgagcattcgcgccgccgtgcggcctgcctgctgcacatcctgctcgatgcggcacaggcatggcatgtttttcggcgcgctgtggacgagaatgagcggaatatccgcatcatgcagggcgcagagcgcggttttcaccgcctcatcattcgccgtgcaggcgatgacgccggccgctccgctctcgcggaattcccgcagacaggcggcctgctgctctgtgtcggcggcctcggtctcgcgcaggtcgagcgcgatgttgaagctcgcgaaatcctgccgcacgcgctcgatgccgcgccgcagcgcggcggaagctgctgtgtgcgccagcagaatgccgacggtcagcttctttttctggtaattgagcgcctttgcgagcgggttggactcgtagccgtattgttcgagcagggcgcggatctgctcgcgcttcgcctcgctcacgcccggacggtcgtgaatgaccttgtcgaccgtggatttatgtacgcccgccatatcggcgatctgtttgagtgtcactgacataatcgttcctccgttgctgagagaccggttttctttctctattatcgcgctttttcgcggtctgcgcaagagaaaattcgaaaaacaccagaaaagcaccgcccacaggcgagctgtctgcgggcggtgcggaaattatgagcggagatagcggagtgtttccgcaatgttttcctgatgcacctccgccgggcggaaatgcagcaggctgaagttcagattgataagcgagccgaggccgagcgcggcgatgaccgtgccgatgccgaactggccgccgagcagaaagccggagaccgtgaccaggatatccgcacagatgcggcagacaccggcggagcgcccggtctttctcgcgagcgcgaccatcagcgcgtcacgcggccctgcgccgagcgcactgcgcatatacatccatgtgccgagtgcgagcagttcgagtcctgcgagcagcatcgcgatgccgccggggagcgaatgcagctgcggcacccagtcgagcgcgagcatcgcgtcgatgcacacgccgcagccgatgatgttgacgatcgtgccgacgccgaagctctcgccgaacaggacagccagaccgatcgcggcggcgcccgcgatgaccgtggcgaggccgtaggagatcggcaggacgagcgtcaagccctgctggagcacgctccacggctccagaccgacgtttgcctgaagcatgagcacgatgccgagcgagctgacgacgatcccggctgcgagccggagcaggcggcgcacgtaatcacgcagcatggcgtcgcctcctcattcttccgggacctcgctcttgagctgtgcgagatggcggtaaatgctcgcctgtgagcaggaaagcgccgcggcgacgtcctttaccgcgcccttgagcaggaagatgccgccctccttgagagaggcgacgatcttaaggcgctcctcgggcgtcagacggtcggcgctcacgccgagacgggacagctcgtttgcgacggcgtcctccgccacatcgccgatggagttatgaaagctctcgggcgagactgcggggggacacgccggcttgtccgggagctgcgactcgtcgatctgcacatgcgcctcgacgaagcggtcggggtggcacagcttgaggatggcgtcgctcgcctcgcggtatttggaatcgtcgaaattgatgcacagcatgccgatgagcttgccgttctgcttgataaacatggtagaggagcggaggacctttccctttgcggacataccgcagtagtgcagacggtaatcctgtacctcatagctcttatccattaaaattttgagcgcgacattggtcagcggcgcaccgacatcgcgcccgctgatgtggttgttggcgatggcgatgatggaacggtttttgtcggtcatgtcgtgcagcgcgacctcatagtccggtccgagggtcaggccgagaaactcggttaccttgatatactgctgcagcagtggatttgccatgtgatctcacctcatttttgaaatggaaaacggcgtgtgtgtgtttttcttccggtagaagtgttacttatattatataataccgctcagagcttgtcaaaagaaggtgaaaaggaatttatcacaattaaaaaaatactcagttgtgaggatgcacaaaacctatggaaatagaacacaaaaacgggggggtcgtttgtagtcattcatacaaagtgcacaataaggcgttgacaaaaagttttaagtgtgataaagtttatgacatgaaaaggaggctgatggaaatgaagcagatcatcagtacggaaaaggcaccggcagcgatcggcccctatgcacagggtgttgcagcaggtaagctgatcatcacgtccggccagcttccgcttgatcccgccacgggcgctttcccggaaggtattaaagagcagacccgccagtcgctgaccaacgtcaaggccatcctcgaagagggcggcgcagacatgaaggacgtcatcaagacgaccgtgttcctcagcgacatgaacaacttcggcgcgatgaacgaggtatatgctgagttcttcggcgagggcggctatccgtcccgttcggctgttgaagttgcgcgcctgcccaaggatgctctggtagagatcgaggtcattgcggtagcaccgtaatgacgcagcgcgaaaccccgttataacccttttttacagacaaggtgctgtccgccaggcggagaggaaacaataaacagcctcttcgacgaccggggtgcctccaaacacgaactgcgcaaagcgcacgattttatggaggtaatgaaaaatgaacaagaacgagaagcactatccgctggatgtagcaatgccgcagcactgtgcatacgctgtacgcgatcttccgcaggcaaccgttgagcagcgcgagcgcgctctgaatgcaacgcactggaacgagttcgcattcccgtccggcatgctgaccgttgatatgctgtccgactccggcaccaccgcaatgaccaaccagcagctggctaccctgttcctcggcgacgaggcttacggccgcaacaccggttattacgttctgctcgacaccttccgcgacatcttcgagcgcggcggcgagaagaactggaagaagattctggacctcgttcgcaccgactgccgtgacatcgagaagatgatggacgaagtttatctgtgcgagtacgaaggcggcctgttcaacggcggcgcagctcagatggagcgtccgaactccttcatcatccagcagggccgtgcagctgagtccgttctgatggaaatcgttaagaagatcctggctgctcgtcatccgggcaaggtattcaccattccgtctaacggtcactttgataccaccgagggcaacatcaagcagatgggctctgttccgcgtaacctgtacaacaaggaactgctgtacgaaattccggaaggcggctcttacgagaagaatccgttcaagggcaacatggacatcgagaagctcgagcagctgatcacctctgttggtccggagaacgtaccgctggtattcacctgcatcaccaacaacccgatctgcggccagccggtatccatgggcaacctgcgcgagatcaaccgcgtagctcataagtacgacatcccgctggtattcgataccgctcgttgggctgagaacgcttacttcatcaagatgaacgaggaaggctacgctgacaagtccatcgctgagatcgctaccgagatgttctcctactgcgacgcattcaccatgtccgctaagaaggacggccacgctaacatgggcggcatgctcgcgttccgcgacaagggcctgttctggcagaagttctccgacttcaacgaggacggcaccgtcaagaccgacgtcggcgttctgatcaaggttaagcagatctcctgctacggcaacgactcctacggcggcatgtccggccgtgacatcatggctctggcagctggtctgtacgagtcctgcgacttcggctatatgcatgaccgtgtatcccagtgcgagtatctggcacagggcttctacaaggcaggcgtcaagggcgttgttctgccggcaggcggccacgctgtatacatcaacatggacgagttcttcgacggcaagcgcgatcacaccaccttcgcaggcaccggcttctcgctcgagctgatccgccgctacggcatccgcgtttccgagctgggcgacttctccatggagtatgacctgaagactccggagcagcaggctgagctggctaacgtagttcgcttcgcgatcgaccgcagccgtctgaccaaggagcacctcgactacgttatcgcagccgtcaaggctctgtacgaggaccgcgagtccatcccgaacatgcgcattgtttggggccacaagctgccgatgcgtcacttccacgcattcctggagccgtacccgaacgaggagaagtaatttcatccgttctcacggcatagcataaaaagagagaggcaccgtgaccttcgcggcgcggtgccttttctgtaacaatacggacgtaacctgcgccgcgcggaaagagcgcaggactcatgcacaaatagatactgactcgcagagggctctgcgagaaagacaagaccggcagcggccgcggaaaactaaacagtttctgcggacgctgctttttctttcagcatcagcaaaatactttacgcaatgacccggtatgttcgagatttagagaacagttacacaaaagaggggtgtaaaatatgagtaaagatacgaacacggtagaaaaacgagatggcttccaaagtaaatggggatttattttagcctgtatcggttctgccgtcggcatgggcaatatctggcgtttcccgatcatggttcagcaatacggaggcatgaccttcctgctgccgtatttcctttttgttatcctgatcggcgcttccggtgttattgaagagtttgcgctcggccgccgcgcaaaggcaggcccggtaggcgcgttcggcatgtgcaccaaggagcggaccggcagcgacaaggctggcaaggccttcggcgctatcccgatcatcggcgcgctgatgctcgcgatcggctacacggtcgttctcggctggatcttcaagtacgcattcctgtcgatcaccggcggcctgtacagcctcggcaccgacatgggcgcgatcggcggtacgttcggcgtgaccgcaccggaggctgagaccctcggcgaagccctcaaggcaatggcgtcggccggcttcttcggcatcggcaacggcgtatggcagatcatcgctctggtcgtttctctcgcaatcatggtaatgggcatcgcaggcggcattgagaaggcaaacaagatcatgatgccggttctgttcggcctgttcctcgtactggcagtctacatcgcgaccctcccgggcgcacaggaaggctacaagtacatcctgaagatcaatccggccggtcttgcagacccgaaggtatgggtatttgcattcggccaggcgttcttctccctgtctgttgcaggcaacggctcggttatttacggttcctatctgccggaaggcgaggatatcccgggctccgctcgcaacgtagcaatcttcgacaccatcgcagcgctgctcgcagcactcgttatcgttccgtcgatggcagcggttctcggcgctggcatcagcgacgttcgtggcggccctggcctgatgttcgtttatctcgtacacgtattcaacgcaatgcccggcggccgtatcatcggcgtggtattcttcatctgcgttctgttcgcaggcgtttcctcgatcgtcaacctgtatgaggctccgatcgccttcctgcaggagcagttcaagtttaagcgcgcagtagccgttggcgtcatcggcgtcatcggcctgatcgtttcgatctccattcagccgtggacctctcagtggatggacgttgtatccatttacatctgcccgctgggcgcagctctcgcaggcgtcatgttcttctgggtactcagcaagaagtccgctctcgaggaagtcaacaacggcgcaaagaagccgatcggcccgtggttctacatccttggcaagtacatctacattccgttcgcaatcgcggcgctggtacttggcatcaagtatggcggtatcggctgatacacaacaatacgacacctcctacctgcccctttcagtaagcggaatatcctgcccggatccttccgcaagtctccggcaaggccccctttctatcgtggaaggggggttttgctttatctgtcgaaaagctggcgcttttccgacaagatgtgttctgacggcggcgcaccgccgcagaacacggacgtccgaaagttcccgttcggaaactttctccctctcggagtataaaaagtcaggtacatgccccgactttttatgaacctgctgcgcaggttctattttatgcgcgctgccgcgcgggggacaaagacgaaaaacggctgggtttttgaggaattgttggaaaacgggggagagacggcgaaatgtattgacgaaaaaggataaaaacggtatcatatattgtgtgccgcagggaaaaactgcgagtaaaaaagaggagtagtaaacattatggggaaaatttttaaaagtctgccgttcaagctgctgcttggcgtggtggtcggcattctgctcggccttgtggcgaacgaggcggtcatgaatgtcgtcgttaccatcaagcaggtactcggccagatcatcaccttctgcgtgccgctgatcgtcatcggcttcatcgcgccgtccatcaccaagcttggccataacgcttcgcgtatgctgatggtcgcgctcgttctggcgtactgctcgtcggtcggcgcggcgctcgcgtccgcgtccgccggctacgccatcattccgcacctgtccatcgtatcgcaggttgacggtctgaaggagctgccggaggtgctgttccagctcgaaatcccgccgcttatgaacgtcatgagcgcattggcgctgtcgctgatggtcggtctcgcaatcacctggaccaaatccaagcgcctggaggcgctgctcgacgagatccagaacgtcgtgctcgctatcgtttccaagatcatcatcccgctgctgccgttcttcatcgcctccaccttctgcggtctggcgtatgagggcaccattaccaagcagttcccggtattcatcaaggtcatcatcatcgtcatggtcggccactacctgtggatgctgctgctgtacgcgattgcgggcgcgtactcgggcaagaaccccatcgaggtcgtcaagcactacggaccggcatacatcaccgcggtcggcacgatgtcctctgcggcgacgcttgccgtcgcgctgcgctgcgcgaagaagtcgagcgttctgcgcaaggacatggtcgatttcggcatcccgctgttcgcgaatatccatctgtgcggctcggtcctgaccgaggtgttcttcgtcatgaccgtttcgcagattctttatggcaagatcccgtcggtcggcacgatggtcctgttctgcatgctgctcggcattttcgccatcggcgcgcccggcgttccgggcggcacggtcatggcgtcgcttggcctgatcaccggcattctgctgtttgacggcacgggcaccgcgctcatgctgaccatcttcgcacttcaggacagcttcggtacggcctgcaacgtgaccggtgacggcgcactgacgctcatcctcaccggctacgcggatcgtcacaagatcgccgtggccgaaagcacggccgaggaataaggctgtttcaaatttcaagtgtccgcctgctgtgcaggcggacattttttgttatattcctgttaaggtttcttgtgggaagtcaaaaaattgaaactattttattataaatgacgcttgtaatttgcttcatatgaatctattttatagttaagcaaagggtggaaaaaccaagcgctttttattttcagtattcgtgcacgtgcacgaattgtaaaaagcggaacggatctgcattttgcatatttttaacgttatttcgtgcacgtgcacgggacgaaaaatgttaaagttgaggcgactttgcgaaatgaattttgtttgcctcgggaacgtgtatgggtttataataaaattatgtcaaaccctatactaaaaatgctcgaaaggctgaaaagacgacaaaaatgacaaacttggaattgattgcaaagctcgcaggcgtgtcacgcggtacagtagaccgcgtgctccacaatcgtggtcaggtcagaccggagaccgaagaaaaggttcaggcggtcatgcaggagctggatttccagccgaatgcgctcggacgggccttctacctgtcacgaaagaaaaacaagatcggcattctggtcgcgttccgcgaaccggatttccagaagcaggtcatgcagggcgtgaacgaaggcgtcgtttacgcacggcagcatggcgtggaggtgctggtcgaatacgcgcatcccgatgatacggagggctacctcgcctcgctccggcggctgctggacggaggcgttcgcggactcgccattcgaggcgtcctctccgacgagatcgaccggtgtctccgggagatttcgcgggagcagatgcagatcgttgtctacaacgaggacatccgcgacaagagtctgcgcgactgcttcgtcgggcaggactcctgccgggcaggcgcctgcgccgcttgtctgatggaacagatcgcgggaccgggcggcgagatgctgctcgtgggcgtcgacgctcggcacgtttcgagcgaggaacgcctgaatggatttgcggagtacttccgtaagcgaggtaccgacgtatctcatgtgatctacggcaagggcagccacgagctgacttaccggcagacgcgcgacatgatcgccgtgagagagcacatctcgggcatcttcgtcagcggcgccggtctcagcggcgcggcgcacgccgtcgatgacgccggactgaccggcaggatcaaagtagtaggttttgacataaccgagtccaatatgagttttctgaaaaagggcaccgtgcagttcctcatcgatcagggaccgtacatgcagggctaccgctctgtgcagctgctcacggaagcaatcttccgcgacgcgcccgtagagacctcgttcgtggacaccggcattcaaatcaaaaatccgtacaactgctgagcgatcgcccggcagaagtcaaaaccgcaccgctctataaggcgaaggaaccggaaaacggttcgcgccgcgcaccgagatgatatccctcggccgcgcggccggctctccggcccttcgcagcatggaacggtgcggttttttcatacggattattgagataacgtccgttccgtatctgcggtgaacggtgcgggcaaaaaattctcacttcacctgaggggtgtggttgaaaggagaaagtctatgaaaaaaattatccgcagcacgaatgacctcctgctggcagtgctgatgagcggcctgtccatcttcctgctgctgagcaagaagatcatcaccggcgtggagaacggtctgggcggtatgtgggcgcaggcaagcacctacatccatctgctcgcaggcgcactcaccggctgcggcagcaccggctcctcctccgcacaggaggtcatcgactatgtaaacgcaaacccgggcaaggttaccgtcggctgcaccggctccaacaacgtaaactacggcaccaccatggagctgctcaaggacatgggcatctacgacaaggttacgatcgttccgtatgacggcggcgctgcgagcgagaccgcgcttcagggcggcatcatggttgcctacttcatggcaaacgttgtcatgtatatcatggagctcggcctgatgaaggcgttcgtccgcatggtaaacgtcaagctgtccttcctgttcccggcgatcgtcgcctgctgtgtgctcggcgtttacacgctgaacaaccgcatgttcgacgtctgggtcatgattatcttcggctttgtcggctatctgctgatctgtctgggcatcgacatggcgccggtcatcaaaaagactgtgacacacggaaaggaaaaggcataaccctgcaccgcatccggcggtggacgggtaaagccgaacaccgctgcctgtttttttatggaggttcttctgatggatatgacctatcgcgtaagcaaaaacgcttatatcgagctgctggccgacatggtccgccgcaacgacagccgtccgatcaagctgctcacgacgttcctgctgaccctcggccagatggcggcggtcgccgtgctctacgcgacccggcttgaggggcgcgagcgggtgtttgcgatcgtctggtcgctgctgcttgccggcattacgctgctgcgccgcagagaggtttccgacaagctgattgcagctctcgaagcagcagagcagaccgacgaggtcaagtacatcctcgacaaccgcgaattcctcgcaaagaagtccgtctgggcgatcggcggcgacggctgggcttacgacatcggcttcggcggcatcgaccacgttatggcgcagaatcaggacgtcaacctgctcgtcctcgacaccgaggtctactcgaacaccggcggccagtcctccaaggcaaccccgacttctgcaactgcaaagttcgcagcaagcggc

SEQ ID NO: 12889 - DNA, 14722 bp, Unknown
  gut microbiota DNA sequence
gtctggccgcgcactgttatgcgcggcgaactacgcaagggaaattcagggcataacagcgtcccaaaatctacccgacgcccggaatcgtgctcccgtaacccccgtttcgctgcgcgaccgaagggagtcgcagcgcaaaggaaggtaaggggagtcaagaggggacaggaaaccatacttggtgtcctgtccccttttgccctccgccgtgggtacggcgtctccgccgggagaccccggcaatccccccgccgtgggcacggcgttttctccgccgccagacggcggctctccctgccgccgaaggcggcaattcctcgccggtgaacaccggcaattttcccccgccgccgggcggcggcaatcatagtttacacctgcttggaaatccgttataatgaaacaaacagccccgctgacggaggtgtacgccatgccaaaagcaaaatggaacctgaacacgatctacatatccgagcgtttgcaggaaagcctgcgcccgatctcgcgctgcgcgctgacgaccgtcgtcgccccgatgggctacggcaagaccaccgcagtcgagtggttcctcgccgaacgcgcccgcgccgagcagatttccgttatccgcatcagcgtctattccgccaacctcgccatcttctggcggagcgtgcaggacgccttcgcccgcgccggcttcgacctgctgcgcgactacgactgcccgtccgacgccgcgggcggcggcctgctcatcgaggacctgtgccacgcgctggcaggcgaacgcgcctgctatatcttcctcgacgatttccacctgctgaccagcaggcgcgcagcctggttcctctgtgcgctcgccgcgcgcctccccgccaatgtccacctcatcctcgccagccgcgacgttttcctgtccgccgccgccatcgtccggctgggcgcgaaggtctaccagatcggcgtcgagcagctccgcctcaaccataccgagctcgccgtctacatcagccgctgcggcaccgagctttccgacgagcagatcgagtccctgctgtattacagcgagggctggttctccgccgtctatctgaacctgcggatgttttccgagcacggcgtgctcgcggaccgcagctccgacatctcctccatctttaccgccgccatgatcgacccgctccccgaaaagcagcgcgagtttctcgcggtgatggggctcgccgacgagtttaccgtcgaaatggcgcaggatatcatgcagaccggggacgccgcagagcttctcgccgcgctgaccggacagaacgccttcgtccggcgcctgccggacggcgtgacctaccgctttcatcatatgatgaaggagtgcgcgctccgcgtgttcctcaccctgccgcaggagcgccggaacgactgccgccgccgcttcggcgcgtggtatgagcagcaccggcagtacctgcacgccatgcaggcctattatcagagcggcgattatcacgccctgctgcgcgtcgtgcagcaggacgccggcatcctgctcagctcgctcgacccgaaaaacgtgctggattttctggacaaatgcccggaggacacgctgaaggcgcatccggcggcgctgctcgtgctgatgcgcagcatgttcaactggcggaacatcccgcggatgctcacgctgcggcagctcctgctgaccgcgatcgacgaggacccgcagcgctccgccgaggaacggggcaatctgctcggcgaatgcgacctcatcatgagctttctctgctacaacgacatcagcgccatgagccgcctgcaccgcagcgcgagcgctcagatgtcccgtcccgccgtcagcatccggtcgagcggcggctggacgttcggctcgccctcggtgctcatgatgttctaccgcgcgccgggcgagctggagagcgagcttgccgagatggacgagtgcatgccgcactattacaagatcacgggcagccacggacagggcgcggagaccatcatgcacgcggaggcggcgttcatgcagggacgcttcaccgacgcgcacatcgcgctcgaacgcgcctatgcgcagatcgagggcaacggacaggagaacatggcgctctgctgcgactttctggcgcggcggctcagcctgttcacggacatcggtcagcgcgcaaggttcgaaaagcggcgcgaacagctgctcgcgcatcacaatgtctcgtggctcaacctctggaacgcggccgcagcctatcatcatgccctgctcggcagcctcgaccgcatccccgaggcctaccgccgccaccggctgttcactgtccgcacgctcgccccgggaaagcccatgatcgagatgatcgagaaccaggtctatctcgcgcagggcgaatacgcccacgtgatcggccgcagcgagggcctgctggcgcagtgcgaggcgatgcactatgcgctggtcgcgctgcacatccgcatccagaccgcggcggcctacgaaatgctcggcaagcacggcgaggcgcgcgcgctgctcgagagggcgctcgcggacgcagagccggacggcttcgcgctcccgttcgcggagaatttccgctatcttgagccgctgctgaccgaacggcttcagggcggcctgaccgggcgcatcgtccgtctgggcggcctggccggacagcggcgtgcggcggcggaacggcccgcggtgctcgccgcgctgaccgagcgcgaatgcgcgatcgtcggactgatgacgcagcgcctgagcaaccgcgagatcgcggaaaagctgtttctctccgagggcagcgtccggcagtatatcaaccagatctacgccaagctgcgcatcgagggcgagccgcgcgccaagcgaaagcgcctgctcgcgctgctcgagggcacagactgacagcggaaacgagggcacgatccactatctgtatgcggtatccattctgtggccgctcgaaatgctcatcatgtacctgatgcaccgccgcaacaagaacaagggtgctgaggtttgggtacagaaggacgtcggcgcggtagatctgaccccctggaagtacagcaagatcgtcagcgttatcgttatcgtgtgcgtgctgctggtctatctggcattctctccgcccggcattggcgtataaccactttatgcagataaaccgcccagtcaagaggacaatgaaataaaataagatttttgctgccaggagcgttcagctcctggcagattttttacgcagaaaatgccccctatacagctttcagtgtttttatttcactgttcgctatatagggggcatatcatttcatgatgtcgacgcgcgctcttccgtcagtcggtcagctggcggtacagctcctgataagcgttgatcagcaggaaaatatccgcgccgacagccacagagtcgactccctgcccgatgaatttccgggcagccgctgcatctccggcgaagatcatgctcattttgccgttgtcccggcaggccttcaggatgcgctcgatggcatgagccatgacgggggcgtccagctgaagcggacagcccaaggcgatggacagatcaagaggaccgataaaaatgccgtctacgccgtcgatcgaagcgatctcctcgatatgctccagacattccctggtttcacattgcgggatcaataacgttttccggttggcctcttccatgtaggataccggggtaaaggagggcgaagaaccccaccggcagtcccgggtaggctgatagcctcggttgccgaggggggcgaacttggcgtaggtgaccagctgacggacctcctccgcggttttgatggcggggacgatcagtccggcggcgcctgcgtccagcggatgcaggacggcgcgtctggatatctcgcagatgcggaccagaggcgtcagaccggcaccctgcgcggacgcgacggcggaggccataagatcggttccgaacgcctgatgttcggtatcgatgacaacaaaatcaaatggcgcacaggcgatgttttctatggcagcagcgcttttgagctgggtaaaggtgccataggaggggataccctgcgctttcttgtcggctaatcgattttccatatcaaaatctccttgtctgttccggactgccgcccccggtatggtgcggcggcgccggaaagcaagactgccggaagcagaaagcattccggcggtcctgaacggtttttttattccagacctgcgcccttcattgcggaaagcgcgtggtcggtgtacagcttgtagaagcccttgcggggttcgcgcggcaggatgcccgccttggcgcgctctgcaagcaccttgtccgcctcctcgagcgtgcagggcacgccgtggatgccggtcaggttgatggtgcggtccttgacgctgtaggagatcaggtcgccatcctcgatgaaggcgatggggccgccggcagcagcctccgggctgacatggccgatcgccgcgccgcgggtcgcgccggagaagcggccgtccgtgatcagagcgaccgagccgttgatgcgctcgtcgcagacaatagcctcggtggtcatcagcatttccggcatgccgcagccgcgcgggccttcgtagcggatgatgatgacttcgcccgggttgatctcgttgttgacgacagcattgtgtgcgtcctcctcgtgattgaatacacgagccttggcgttgacgacctcgcgctgattgtttgcgcaggcggagtatttgagcacgctgccctcgggagcgatattgcccttcaggatagcgaccgagcccttttccggcgccttgtccaccgggaagatgacctgatcgcgctcgagaccgtagttatgcagataaccgaggttgcgctcgaaccagttgtccttgtgcagatcctcgaggttctcgcccagcgtcttgccggtgacggtcatgacatccagatcgagcatatcgcgcagcagccactgtaccatcggtacgccgccggcgaaccagaacgcttcggtcagatgggtgccggacgggttgatgttgcccagatgcgggacctgatggttgatctcgtcgaacagctcgatcggcagatcatagccgagctctcttgcgatagacgggagatggatggtgccgttggtcgagccgccgatggcagaatgcacgatgatagcgtttttgaacgctgcgggggtcaggatcttggacggcgtgatctgcttttcgaccagctccatgatcttgcggccggcatagcgcgaatactggagcaggtcgcgcatggtagccggaacgagcgccgcgccggggagagtcagaccgagcgcctcagccatgcactgcatggtggaagccgttccgaggaaggtgcacgcaccgacggacggacagccggtcagcttgtagtcgcggacctcctgcggggtgatggcgtccttgcgcttctggcgcagggaaatgtcgcccgcgaccagagaggtcgtcatattcggaccggggcgcatggagccgcccggcatgaagatggccggaatgtccatgcgggctgcggccttgaggtgcgccgggatggacttgtcgcagctcgacgagaggatcatgccgtcccacggaaccgcggaggcgtgaacctctaccatgttggcgatggcttcgcgggacgccagaacgacattcatgccgtcgtgaccctgcgcgcagccgtcgcagatgtcggtagcgtagtacttggccggcttgccgccgcactggtatacgccgtaaaccgcctgctctaccatctggttcaggtggtagctgcccgggtgggaatcgccgtatacgctctcgatcataatctgcggcttgaggatgtcggtatcctcccagccggtgcccatttcgagggcgtcgaactgcgcccagagcatgcgatcgtcatggcttttttgaatcataatcttatcctttcctccggattcggaataaagtgaggtggaatgcagaatctgctgcctgctggatcagcaggcagcagaccgtgtttgactgaaaatgtttttcggctttgcctttagaacagacctacagcagccgcgccgcagatcatgacgaagcagaacatgccggctacgaagtcgggcagggtaatgtacttcaggccctgcttgaggtcgaggttgaagaaacggctgataacccagaagccggagttgttgacgtggttgaagatcatggtgcctgcgccgattgccagaacggtggagatcgggctcagacccagggtgaccatcatcgggccgacaacgcctgctgcggtcatgccgccggtggtcatggagccgactgcggtgaacatgatagcgccgatgaggaacgggatcagcagacccggaacgccggactgctcgatgagacctgccagatcgttgatggccggagctgccttgataacggctgcgaacgcgccgcccatgccggtgatcagcagtgcggggagagcgatctccaggccgcgtgcgatccagctgttcagaacgacttcacggaagctcttcgggttcttgccggtagcgtctgcgttgctcttgcggacggaagccttgtggaatactgcgagcagcatggtgtagataacgccgaggccgagcgcgacgatcttgtcgccgaaaatgttggcccagccgtacagagcggaatcctcggcaacgaccatcttgaggaaggagctgcctgcgatcagaacgaccggaatgaggatggtcaggaaggatgcgaaggtcgccgggatgtcgctgccggtgatcaggatgtccttgacgtcgttggaggaggtctcctcgatctcagcgactacctccggaaccggctcgacaaattccttgtcggtccacttgcgcaggaccagccaggtcagcgcgaacgcgatcagagagatcaggatgccccagccgatgaccagaccgaggtcggcgccgagcaggatggatacagccaggataccgggcgtaggcggaaccattgcatgggtcaggttcagaccggtctgggtgaacgccgccatcttgcccatcgagatatgcttgcgcttggacaggacgtttgcgatgttggaggtcagaatggtggtgatatcgccgaataccgggatggatacgatgtaggcggtcagcgccggagcaagctcaaggtttttgccgcggaacagcttgatgaagaagttcgcgatggcctttgcagcgccggtgtcctgaacgcccattgcgaggatcgcgccgagcatgatcgggatacccatactgccgagcgtgccgccgaagccgccggtgatcgtcgtcagaatatccgtaaatccgaagccctccgcttcgaagcgtcccagaacaagacccatgaacagcgcagagatgaacagcgcaaaggtcggatgcagtttgactttcatgatcagtaccatcagtatcgcgatggaaacgatcagcagaaccagaaatccagttgcagacatagtttttactccctttcttaatcagatggcaaagaactgaacattcctgccgcgtggagccggttccctccccggctcaggaaaattccccctcctttattatttatcaagacagcgccgtttccccttgcggagagccgtcttaatttcaatactgtgtatcatagtcccacggcctgccgccgcacaggcagccgccgtcaacatgatacgcctgtcccgtcatgtacgaggaggcatccgaggccagaagaatggccattcctgtcagctcgtccggctctcccggacggcccatggcgatccgctcgcgcagatattcgctccgcgtaggatgctgccaggtcacctgcgtcagatcggtcaggatatgaccggggctgatcgcgttgcagcggatgccgtactgtgcaaactcgactgccatggaacgggtcagcgcgaccacgccgctcttcgatgcgccgtagactgagcagccgcccagcattccggtgtcgttgtgagagccgatattgatgatattgccggatctgcgccggtacatctcgcgcgcgactgcctggctgaggaagaacacgcccttgaggttggtatccatgatacggtcataggtctccggctcgacgtcgagcagtccttcccggcggttgatgcccgccacgttgaacagaacgtcgatcttgccgtaacgctgcatgacctcgtctacgcagcggtgaatgctgtccagatcagatatatcgagagcgtgcgccgtcgccgcgccgccatgcgcggagatctcgtctgccagctcccggcatttctgctggtttcttgcacagagcgccgcctcagcgcccgccgccgcgagtccgcggctgatcgcgctcccgatgccgccggtcgcgcccgagatcaggatggtctttccttccagactgaacacggatttgagatattcgccgatgctcatgatgctgcctcgctttctgctgaaaaaattatacttgcctttttttcgtttttcccatattatcttgattgaaacatctgctgggaaaaggagaaaagagtcgatgatgattgacaagatggattatatttttgcgatcgccaaggaacagaatctgacccgcgccgcaaagcggctgttcgtcgcgcagtccacgctgacgatgtatctcaaccgcgtggaaagggaactgggcataaagctgtttgatcgctcgaagacgccgatccagctgactcctgcaggcgcgctgtgcattgaagagctgaagaagatccggcagatcgagaccagactgaccgcccgccttcagcagatggcgcacccggaggaaacgctgaacgtcggcatcggtctgatgcacggcgcggcctggatgccgtcgctgctgccgctttttcatgagatctaccccagcgtcagcatcaacctgatcgagcagggagatgagctgctgatgcagagcctgcgctcgaatgacgctgaccttgtcgtcggcggcatgacgccgggctcgcaggaaacaagcgtcgatcttgcgctcgaacagcttctgctgatcgttccgcgctcgttcaatctggttccgccctgggcgtacagcggcaattcctcggaaaatccctatgagatcacgccgaagcagattcagaacctgcctctgatcctgccctcggccgccaatgacatcggcggcatcacccagcaggcactcgagcatttcgacatcagtccgcagtcggtcacgactgtcagctccatgcagacggcggccatgctcgtttcgcagaacatgggctatctgttcaccagcccggtctttctcgggatgcagatggagtatcttgcatcgaagatcgtctactgcacgatgaagggcattccggataccagaaagatcgtcgcggtctatcagccggatacctgcaaaaaggagatggtcgaacggtttatcgagcttctgcacacagtcgtccttccggagaagccgggactgtttctgctttcggaatgagcttccgtcaaaagaatgattttgtaatgtcagtatatcaatttcggacgcaaaattaaaatcaaaataattgatagatgcatcgctgttgttgataaatgctgatttattaaaattcctcgaccgagttctgtggaatgtgctgcaattcatcaggattacaatcaataaaaatgatgatattatcaaaaaaagtgaatacagcattgaaaaacccggcagcgagcgtctgatatgctcgctgccgggctgtttttatgatggtttttgataatcctaccggaaaaagccgtgcgtataggaaattcgttctgcggcctgcctgatttcatggatcatcatttccatatcctgctccattcgataatccggtccggcaatgctcacggccgcaatgacacggccgcttgcatcacgcacgggcgccgccacacagatcagtccctgctctacctcgccgtcgtccatggcgtagccgttgatgcgcgccgattccagctccttcagcagccggtcgggctgtgtgatggtcttgggcgtgagcggcggaacgcttttcatccattcgcagtactgtgcgagaaaatctgcgtccctgtccgcaagcaggatcttgccgcagctggtcgcgtgcgcggccacacggccgccgactctcgtgctgcaggtaatagagcgctgcgtttccaccttgtccagatagaagatctcgttatcgacgagaatgctcagattgatcgtctccttgacgcggtcggacaggcgctcaagctccggccgggcgatcttgcacagatcggagccgccgatgatcgctcctgccagcgcaagcagattcggccctacgtggtagaccttccgtaccggatcctgcgtcaggtacttccgttccatcagcgtggaaacatgacgaaaaaccgtcgtagtgggcagtccgagctggtttaccagctccttgagcgtccattccttttcctgatccataaagcattccagaatctgcaaagcgcgcagaatgctcgaggtatgctccctagccataacaaactccttcaaaaattttttcaaatgccctcttgacaaaccttcgatagtggtctaataatataattatacggcaagggtgagcccttgtaaatatttttaccaactattcggaatgcgtttccgcatagtggaaagggatggtcatatgaacaaaaagtccgttatgccgacgatggaaagcgtggatcgtttcaaggcggcaatggattctgaccggggcgcgcttggcccgttcatgatctgcacggaccctgcgatggtggaagccgcaggtcatgccggatatgatttcgtgctgctcgatatggagcacggcaccaccaccttccaggaactccccaatctgatccgtgcagcaaacgtcaccggcgtgtgcccggtcgtccgcgtacctcgcggcagcgatatctggatcgatcaggctctggatgtcggcgcaggcgcggtcatgattccgcagatcgacaccgcagagcaggcgcgtgccgctgtttccgccgcgaagttttcgcccgtcggaacgcgaggcacctgccgttttgtccgttcggccggcttcggcgcggttcccggcagcgagtatttctcgcgtgcacaggacaccgtggtcatccttcaggccgagggtcagaaggcgatcgacaatctcgatgaaattctggacgtacccggcatcgacgttgtttttgtcggcccctatgacctgtccagctcgctcggtcatgtcggtgaaatcgaccatccggaggtcatcgccgcgatcaagcagatcatcgcaaaggcagctgcaaagggcgtaaagatcggctgctttgccgatacggtcgagggcggcaagaagtggcgcgacatgggcgtaaagttcatcggctacggctgcgacacgtatatcttcatgcaggctgcaaaggccgatgttgctgaatttgatgtataaatcgaagaaataacggggtttataccgttttattcttccgataaggcaagaatgcaggttcggcttcattcaatgtctgttacacaaaaaccagggactgcgtttcgcaggcggggtccggctccgctgatgcagacgcaaaagaaaggatcgttatggataacaaaaagaactatgctgttatggacggcaacacggcggcggcgtacagcgcctatgcgttcaccgaggtagcggcaatttacccgatcaccccgtcctctccgatggcggaaaaggttgacgaatggtccgcaaagggcaagaaaaacctgtttggtaccaccgttgatgtcattcagatgcagtctgaggccggtgcggccggcacctgccacggctcgctgcaggcgggcgcgctgaccaccaccttcacctcctcgcagggcctgatgctgatgatcccggcaatgtacgccatgggcggccagttcctgccgagcgtcatgcacatcgcgtcccgcgtcgtcacgagcaaccatcactcgatcttcggcgaccacactgacttcatgacctgccgcaccaccggctacggcatgctgatgtcctcctcgcctcaggaggcgatggacctcgcggccgttgcgcatctgtccgccatcaaggcgcgctatgcgttcatgcactgcttcgacggcttccgcacctcgcacgagatgcagcgcatcgagaccctcgattatgaggatctgcgcggcctggtcgaccagaaggcactccaggagttccgccgtcagtcgctcaacccggagcacccgaccaaccgcggcaacaacgtaaacccggacatctacttccagtgcaaggagggcgcgaacgtcaaggcagagatcgtgcccgacaccatccagcactacatggacgagatcaacaagctgaccggccgcgactacaagctgttcaactactacggtgcgccggacgcagaagaagtcatcgttgtcatgtgctcggcttccgaggcggtcaaggagaccgttgactacctgaacgcacagggccgcaaggtcggcatggtgcagatccacctgtaccgcccgttctccgtcaagcacttcgccgctgccatcccggcgagcgtcaagaagatcgctgttctcgaccgcagcaaggagaccggttcggtcggcgagccggtatacctcgacgttgtgaccgccctcaatcaggcaggccggaacgacatcacggtcgtcggcggccgctacggcctgtcctccaaggacaccaccccgggccagttcatcgcggtctacgacaacctcgcgaaggacgcgccgaagaacaacttcaccattggcatcaacgatgacgtcacccacacctcgctcgactacaccgagatcgagcttccgcatccgggtcagatcagctgcaagctgtggggtctcggcggcgacggcacggtcggcgcgaacaagaacgcgatttctaccatcggctttatcggcggcaagtatgcgcaggcgtatttctcctacgacacgatgaagtccggcggtctgacgcagagccatctgcgctttggcgacaagccgatcctcagcacttatctggtcaattccgcagattttgtcgcggttcacgctccgacctacgtcaaaaagtacgacgttaccgctgacctcaaggacggcggcaccttcctgctcaactgcccgtggtcggtcgaggagctcgaggagcacctcccggcgaagatgaagcgcgacctcgcacgcaagcacgcaaacttctacatcatcgacgcggcaaagctggcggcggccatcggcctcggcaagcgcaccaacaacatccttcagggcgcgttcttcgcgctgaccaaggtcatcccgatggacctcgcgatcgaggatatgaagaagaacaactataactcctacttcaagaaggccggtcagaagatcgtcgacatgaacaaccaggcggtcgatctcggcgttcaggcgaccgtcaaggtcgagatcccggctgcatgggcggacgcgaccgacgagccggttgcagagccgaagaacatgaccccgttcgtccgcgacatcgtcatgccgctcgacaagcagcagggcgacaagctcccggtttccgtattccagaagtacggcgtgctcgacggcacgtgggagaacggcacctcggtttactccaagcgcggcgttgcgaccaaggttccgaagtggaatcccgaggcctgcatccagtgcaaccgctgctcgatgtgctgcccgcacgcggcaatccgtccggttctgctgaccgacgaggagaaggccggtgttccggattccttcgttaccgctccggcaaagggtctcggcaaggacgcgccgaagtacaatttccgtatgcagctctcgccgtatgactgcctcggctgcggcgtgtgcctgaccgcgtgcccggcaaaggacgcgctgacctgggcgccgttcgaggagatgaagtccgagcagccgctgttcgacgacgttgccatgaacgaaacctacctcaagaaggacgtaatcaacgacaagagcgtcaagaatgttcagttcgcaaagccctacttccagttctccgctgcatgcgcaggctgcgcggaaaccacctatatcaagctgctcagccagctgttcggcgaccgcatgtacgtcggcaacgcagcaggctgctcgtccgcgatcagcggcggcgcaccgatcctgccgtactgccgcgactgcaagggtcacggcccggcgtgggagcactccctgttcgaggacaacgccgagttcgcgttcggcttctatcatgcacaggacgctatccgcaaggagctgctcatccgcatcgaggcgctgaagaacgcaggcgttgcggctgaggaagcagcggcgtacctcgcagactggaacgaccgcgagaagtcccgcgaagtttccgacgcgctcatcgcagcgctcgagaaggctgagcagaccgacgaggtcaagtacatcctcgacaaccgcgaattcctcgcgaagaagtcggtctgggcgatcggcggcgacggctgggcctacgacatcggcttcggcggcatcgaccacgtcatggcgcagaatcaggacgtcaacctgctcgtcctcgacaccgaggtttactcgaacaccggcggccagtcctccaaggcaaccccgacttctgcaactgcaaagttcgcagcaagcggc

SEQ ID NO: 12890 - DNA, 50954 bp, Unknown
  gut microbiota DNA sequence
ttttcggtttcaggcggaactcagccctcgtaatcggcctcgttctcccagttgtgccaaacggcctgcacatcgtcgttatcctcgagaccatcgagcagcttgcgcatctgggccatatcctcttccttctcgagcgtgatgtagttctgcggaaccatctcgacctgcgcctcaacgaactcgtagccgagcttctcgagcgcctcgcggacagcagagaagtcgtccggcgcggtgtagatctcgaaggtctcctcgtcagcgaggaagtcctctgcgcctgcgtcgagcgcctgcatcatgacggtgtcctcgtcgaggtcgcccttctccatgatgataacgcccttcttgtcgaactgccaggatacgcagccggaagcgcccagacctgcgccgtacttgtcgaacaggtggcgaacgtctgcaaccgtgcggttcttgttgtcggtcagcgtctcgacaacgactgcaacgccgcctacgccgtagccctcgtagttgtttgcctcgtaatcgacctggccgttcgcgccggaatacttatcgagcgtgcgcttgatgttgtcgttcggcatgttgtttgcctttgcctttgcgatacagtcgcgcagacgggagttgaagtccgggttggccgagccgccctccttgatcgcgatcgccatctcacggccgatcttggtgaagattttagccttctttgcatcgtttgcgcccttgcgcttggcgatgttgttccatttcgaatgtcccgacatgttaaatgtccctctttctatcagcaaataatattaaacaatagcgctgcgtcataacacgcacaacaattttatcagcttttgcgcattttcgcaaccccttgccgtatatttttcggctcttccgtgcagactatgagcgaaacttcaaaatcaggaggcgaaaaccgttatgaaacgcaatcagtatcaggaaaagcagaaccagtcccagcagaatcagcaggaccagtctcagcagaattcccagaacaaaaagaacggccagcagcagggctgaccgctccggcgggtgaacgcagcaggctgcgttcacccgcctacttattttttatcgttttaccgcatgatgaggtaggccgtgtacgcgacatacatcgcagccatcaccgcgcccggcaggcggccgagcttgcccttgcgcgccgggaggtagaacacgacgctgatggcgatgaggaacagacagtcgatgatcgacgtcgcctgcaccgggataggcgtaatgaccgaagaaacgccgagaataaggagaatattaaacaaattggagccaataacgttgcccatggcgatctcgttctgacccttgcgcgccgcaacgatcgaggtaacaagctcgggcaggctcgtgccgagggcgacgatggtcaggccgatgagcgtttcgctcagaccgaacatgcgcgcgatgccggtcgcgccgttcaccgcgagctgaccgccgagcacgatacaggcgaggccgagcacgatattgacccagatcaggacgggcgatttggtcatttccgctgcctcttccgccgcttccgcctccgccgctgcgagctgagcacggtcgttcagcgccgccttgatctgacggctgaggatgacggcaaagatgatcagcagcaccgcgccttcccagcgcgcgatgacatgatccggcgcgatggcggcgagcagcagcaccgccgcaaaaatggacagcggccagtcgcggcgcagcagcatcttatccatcacgagcggacagatgacggcagaaaggccggcaacaacgagcagattgaatacgttcgagccgacgacgttgccgaccgcgatctcgttcgcgccccggagcgccgccgtgacgctgaccgcaagctccggcatggacgtaccgaaggcaacgatggtcagaccgacgagcaggggcgagacgcccattttacgcgcgagtgcgctcgcaccctcgacgaatttgtccgcgccccacacaagaagcacgaaaccgatgacaagcataacaaatgacagcataaacagttcctcctgctgttagaatactgcggacaggccgcagttcgggtagaaatcgcgcaccgcataaaaaaaagaccttcattgcacccatgcgtgcaataaaagtctcgctgcttgcggtccggcaccgggcggtttcccgccggggatggcgttgccgaccacgccgtgcggcgtgagctactccctcttacacaactatcatatgtgaaaagggcagattagtcaagccgaactttatgtttttgacgctttctttacgaaaaggttcgccgcttcccctgtatttctcgaaaaaatctttacaagaacgcccgtaaacggtatactataagatagctgaaaatacagaagaaggagcatttatatgctgcagtttgaagaatacaaggtgaaactgaacaacctcaagccggagatcgagggcctcgacaaggcgctcggcatcgagcaggcgaagcgtgaggtagaggagctcgagatcaagtcctcccagcccggcttctgggacaacccggaggagagccagaagatcgtctcccgcatgggctcgctcaagggcaaggtcgaggcgtatggcaggatgtgcacgctgtgcgacgacctgctgaccatctgcgagatggcgatcgaggaggatgacgagtccatgctcgaggagcttgagaccggcttcaaggagcttgaggagaccgtagcggagcagaagctcggcacgctgctcaccggtgaatacgacagccacaacgccctcgtgtccttccatgccggcgcaggcggcaccgaggcgcaggactggtgcgcgatgctgtaccgcatgtacacgcgctgggcagagcgccacggctttacctacaagatcatggactatcaggacggcgacaccgccggcatcaagtccgccgatatcctcatcgagggcgagaacgcctacggcttcctcaagggcgagaatggcgtgcatcgtctggtccgtatctccccgttcgacgcatccggccgccgtcagacctcgttctcggctgtcgaggtcgtaccggacattccggatacctccgcggacttcgagatcaagccggacgactacgagatgcaggtttaccgctcgtccggtgcaggcggtcagcacatcaacaagacctcctctgcggtccgactcatccataaggcgaccggcatcgtcgttgcctgccagaccgagcgaagccagctccagaacaaggaaaactgtctgcgtatgctgcgctccaagctggtcgagatcaaggagcgcgagcacctcgagaagatctccgacatcaagggcgttcagcagaagatcgaatggggcagccagatccgctcctacgttttcatgccgtacaccctcgcgaaggatacccgtaccggcttcgaaaacgcgaacatcaacgcagtcatggacggcgatctcgacggcttcatcaacgcttatctgtctgctctcgccaccggcgtctgggaaggcagcaagggcggcaatatgtaaaaaatctaccgaaaaacgaggttttcgacagtctaaaaaccccaccgcacagcggtggggttttgttttgctttttagaagattacaacggtcgagccgatcggaacgttatcgtagatccagttgatgtcgctcttctgcatacggacgcagccgtgcgatacagggtagccgctgctgaagtcgtattccttgtccgtcttcggcgtgcacagacgggaatggaacgcatagccggtgtcggggtagaagcccacgaccggacgaacggtatacgtgctcgtggtccagcctgccttgagcttgtaggtgactttggtgacgccgaccggggtctcggtacccggtgcacccgtgccgacgacaaagctctttgtcagcttccaactgcccttggagccggtaaagacgttaacgtgctgatacgcgcggttgatccagaccagatagttcgaattgctcgaatagcccttggcgttgacccaggtctccttctcgtaggccttgtagtcgtttttgaccgcatacgaggtcgtgtagttgccgcgataggtcgaggagaccagattgagcacgcggtttacgtcgcgctgctgataccactcgtccgaatagttctcgatcggaacggttttttccgcatagatctcctccgtctcgcccgtggacgggttgacgtaagtcagcttgagaccggtggtgaccgaggtcttcatgttcttcgtgaaggtgaagtaggtggtatgcctggagaccttgccgttcgacagctcgaacttgtcgtttgcgaggtcggagcgcggcttgccgtcctgataccactgtgccttgcagatcttcgtgccgtcaacgcccgagaaggtcgcctgagaaacgagcgagccgcctgccgtgaccttggtcggcacgccgatattgatttttacgttcttgatgcctgcgtcgatattctcgaccttgttatcgcacgcaagcgttacattgcagcctgccgcgcgcagctcgagcgaatttgccttgcccgcgccgccgatggtcgagccgtagcctgccgcgagcaggaaatctaccgtgccgctgaccgaaaggcgggtattcttcgcgctgccagagatgctgactgcaccgaccgagccgccaaggttgatcgtattgccgcggcccgtcacggtcagcgaggtcgcgtccatgccggacaggtcgatgacgcggttgctcgcggtgatctcgatgttgtccgccttgccgttgaaggagacatagccgccgtcgcctgcgatgacgaggttgctcgtgcttaccgtgtctccgaaggtgatggccgcgctgtcagccgggtctgcggcgagcgtggacatgcccgcctggccgtctgcggtcagggtcacgttgtcgcagcccttgagcacgatgcggttcggcgtggaaacatcggacagcttgacgctatgtaccggagcggagaagatgacgtcgcccgtcagattggagaccgaaaggtcggtatcgcccgaaacgatgctgccgccggccgcgccggtgtattccgaggagatattgcctgcgatacgggtgatcatggtgacaaattccgcacgggtcagctttttattcggtgcgagcgtggtcgcggtgtcgcccttgacgatgccgctcgcgacgagagccgccgccgcctgacgctggtcatcggtcatggagccggtatcggtgaaaatgctcagctcgtctgcgcccgactccgcgcggtcatagacgaaggcgcgcgtgatgtacacgaacgcctcggcacgggtagcggcattgccgaaattgcggctgtcgttcgcgtcgatgaggttgagatggatggccttgccgagctcagcggtataccactggtcctgctgcgaagcggcgagagaggccgtgctgtcctgctgggacgcgccgagcgcacggttgaggatggtcagcgcctccgagccgcgcaccgggtcgttcggcagcattttgccgttcgaacccttgagcaggccaagctcgatgcccttgcggagcgcagactccgcccagtggcccttcatgtccgcaaattcggtgtcggacggagcggacggggtctcggcgctgccgtgaccggtgtcgccggtgttgtccgtgtcgccgtcgccgtcaagcggcgtgtcgccggccgccggagcgctcgaaacggtgagcgtgaccggaagtgcgcccgcgttcagcaggagcgcgtagttttccgcgacctgttcggtgaaattgttctcgatattgacgctgctgctgtcgattttgcttgaaatagtcggagaggcgatggtctgtccgtccattttgatgtacagctttttgtcgctgtcgcggtccgcgatcgcggcggtcgcctccttgaggctctggcggcccctagtcgtcagcgtcagcacgacgcagccggtgccgtccttgctgcccttggtgctcgtgacctgcttgatatcctcattcgtcagccataccttgccgtccgcgtcggatgcggaaaaggccgccggctgcacgagatactctgcgagatgggagacctgcgcggaggccgggaactcgacggtgatggtcgagccgtcatccgccacggtcaacgtgtaatccttgcagccgagcgcgtccaagcggctcctgaagatctccttgaccgtatcgccgttcgcgccggtgagcgtcttgtcggaggcgaacacgagcttgacgctccgcgcctcggcagccgtcgtgacggcggcattcgccgaactgtccgatgtgccgctttccgccgcataagcaggcgaaagcaacattacagcggctaaaacaccgcttagaatttgctttttcaatggaactatccccttttaatctcctgccgccgctctgactcttccctgacttcgcgccgacattcatactgttttctattttacgtttccgcctttgcattgtcaagccatagcaggtttcaatatcgatacaaaagcacgataaaagagcaccgttctttcaaacgatgctctcagtcgcgggaaaccggatttcccgataaaatttattcttcgccggtggttgccggggtatcggtcacggtttccgccgtttctatgctctctgcggcttcctccgccgtttcgtcctcttcctccttgtccgtgcgggcaatcgagatgaccttgacgtccgtgccggtacgcatgacgataacgccctgcgagccgcgtccgcattcgcggatctcctcgacgccggtgcggatgatgacgccgtcgtcggtgatgatcatgacatcgttttcgctgtcaacgaccgcaataccggcgaccagaccggtcttttcggtcaggttatgcagcatgatgccgccgccgccgcgatgatgcacggtgaattcctcgaccggggtgcgcttgccgtagccgttttcggtgacggagagcacatacgcgtccttgcgtgcacgcgccgcgccgatgacataatcgccgtccgcgagcttaatgccgcgcacgccggttgcagtacggcccatcgcgcggacctcgttttcgtcaaagcagatcgccttgccgttgtgagtcgcgatgaggatgttctgttcgccgtcggtcagtcggacgtcgaccagcgcgtcgtcctcgttgaggctcagcgcgcgcagacctgcgcggcggatattctgaagatcggagagcacaatgcgcttcgcaatgccctgacgggtgacgaagaacaggaacttatcgtccgcaaactcctgaatcgggaacatagcggtgatcttttcgccgttttccagctccagaaggttgacgatgttcatgccctttgcggaacggccggtctccgggatctgatagcccttgagcttgtagaccttgccgcggtcggagaagaacaggatggtgtcatgcgtggacgcggtgaagatgtccttcgcgaagtcctcctcgcgggtgctcatcgcggagataccgcggccgccgcggcgctgcgcacggtagaccgaggtcggctggcgcttgatgtagccgaagtgggtgagagtgtacgcgcagtcctgctgctcgatgagatcctcgatatcgatctcgtcggccacattttcgatctgcgtatgacgctcgtcgccgtatttctgcttgatctcctggagctcctgcttgacaacggcaagaatattcgcatcacacgaaaggatttcctcaaagcctgcgatgcggctctcgaggtccttgtactcgtcgttgatcttctcctgctccagaccggacaggcggcccagacgcatatctacgatcgcctgcgcctgcggctcgtcgaggtggaactcgaagtgctccgagccgtccacgatgccgagcagcgcgatctggtcgatccagaacggctccgccatcaggttttccttggcttccgcctcgttcttagacgcgcggatgatggcgatgatgcggtcgatattgtcggtcgcgaccttgagaccttccagaatgtgcgcacggtcgcgcgctttcttgaggtcgaagcgcgtgcggcgctcgacaacgtccttctggaagccgatatactgatcgaggatctggcgcagcgtcagtacgcgcggctgcaatttgccgcccgcgcccggaacgagcgcgatgtggatcatcgaaatggtgtcttccagctgagaataggtgaaaagctggttgaggatgacctgcgcgttcgcatcgcggcggatatcgaccacgatctgcatgccctcgcgggaggaatggtcctggatgttggtgatgccttccacgcgcttgtccttgaccagatttgccattgcctcgaccagacgggccttgttgaccatgtacgggatctcggtaatgacgatctggctcttgccgttcggcagatctacgatctcggtctttgcgcggaccttgatcttaccgcggccggtcgcataggcggcgcggatgccgctgcggcccatgatgacgccgccggtcgggaagtccgggcccttgatgaactggcagatctcgtccagctcagcctcggggtggtcgatgacatagcaggtgccgtcgatgacctcggaaagattatgcggcggaatgttggtcgccatgccgaccgcgatgccggacgagccgttgacgagcaggttggggaagcgggacgggagcacgaccggctcctgacgctcctcgtcaaagttcggctggaaatcgactgtgttcttcttgatgtccgccagcataaagttcgccagacgggccatgcgggcctcggtgtaacggtatgctgccggagggtcgccgtccacggaaccgaagttgccgtgaccgtcgatcagcggatagtgcagcgagaacggctgcgccatacgcaccattgcgtcatagaccgatgcgtcgccgtgcggatgatagcggccgagcacgttaccgacggtcgttgccgacttgcggtagggcttgtccgaggtcagaccatcctcgtacatggcgtacaggatgcggcggtgtaccggcttgagaccgtcgcgcacatcgggcagcgcgcggccgacaataacgctcattgcatagtcgatgtagcttttcttcatctcgcgttcgagatcgacctgcatgattttctgctgttcgtattcttgactcattctttgcctccagaattgttggcttattcagctgttttggttattctcagctgagtttaacgcttagagtatattcagaagctcgtctacctgctcctcggtcgtcgcccagctcgtcgccagacggatgaccgtatgctccgcgtcatatttctctataaagctgtacgcgaccttgctgccgagttcgagcagcctgctgttttcgacgatgataaactgctgattggtgggggagtcgatcgcaaagcggtatccctttgccgcgagaccgtcgcgcagtttgagcgcgaggcgcaccgccggtgcgcagatcttttcatacaggccgtcggtgaacagggcgtcgaactgaaccgcgttcaggcggccctttgcgaccatcgcgccgtggcgcttgaccatggtctcgaactgacgcggcatattgccgtgtgtgaacacgaccgcctcgccgcacagcgcgccgcacttggtgccgccgatgtagaacacatcggtgagccgtgcgatatctgccagtgtgacatcggtatccgccgtcaggccgtagccgaggcgcgcgccgtcgaggaagagcggcagatcgaactctttgcacacggtggaaatgcgctccagctcgtttttcgtgtaaagcgtgccgtattcggacggatgggagatgtacaccatgccggggaataccatgtggttatggctctcgtccgcgtagaacgtctcgatgtactcgcgcagatcgtccgcgtccaacttgccgttcttatgcggcacggtcagcaccttgtgtccggtggactcgatggcgccggcctcatgggtgttcacatggccgcaggaggacgcgacaacgccctcatacggacgcagcagcgcgtcgatgacgaccatgttggtctgcgtgccgccggtgaggaagtaaacctgtccctccgggcaggcgcaggccgccttgatcttctccgcagcggacgcggtgatctcgtcatttccgtagccgatgagcggctgcatattggtctccgtcagatgttccagaactttggggtgtgcgccgaaaccgtaatcgtttacaaaaaacagcatgacttttctcccttaaacgtcaagattcatgacatatttcgcatttctttcaataaattcgcgacgcggctctaccttttctcccatcaggagcgcaaaggtctcatcggccgccgccgcatcctccatcgtgacctgaagcagcgtgcggtgctcagggtccatggtggtctcccacagctgctgcgggtccatctcgccgaggcccttgtagcgctgtacgcgcacattatcgcccatttcagcgatgcagtcgcgctgctgctcctcggtataggtatagcggacgtccttgcccttttcgttcttgaacagcggcggctgcgcgatgaacacatggccgtgctcgatgagcggacgcatgaagcggaagaagaacgtcagaagcagggtgcggatatgcgagccgtcgacatcggcatcggccatgaggatgatcttgccgtagcgcagctttgcgagatcaaagtcgtcgccgaagcccgcgccgaaggcggtgatcatcggggtgagcttgtcgttgccgtaaacgcggtcgagacgcgccttttcgacgttcagcatcttgccccagagcggcaggatcgcctgatgacggcggtcgcggccctccttggcggagccgcctgcggaatcaccctcgacgatgtagatttcggtgtaggtcgggtccttttcgatgcagtctgcgagcttgcccggcagggaagcggaatcgagcgcagacttgcggcgcgtcatttcgcgcgccttcttcgccgcctcacgggcgcgggccgcggtctgcgccttctcgataatagtgcgggccacctgcggattttcttcgaagaaggtcatcagcttttcggagaccatcgcgtcgaccagcgcacgcatatcgctgttgccaagcttggtcttggtctgaccctcgaactgcgcttcctgcagcttgaccgagatgatagcggtcaggccctcgcgcgcgtcctcgcccttgaaggactcgtcgtccttgagcagcttgtatttcttgccgtaatcgttcagaacgcgggtcagcgcggccttgaagccggtctcgtgcgtgccgccctcggtggtattgatgttgttggcgaaggacagcatcagctcgctgtagctgtcggtgtactgcatggcgacctcggccatcgaggtgtcgcggctgccctccatgtagatgacctgctcgtgcagaggggtcttggtgcggttgagatgctcgacgaactgacggatgccgccctcgtagtgcatgacctcctcgaccggctcatcgtcgcgctcgtcgcgcagggtgatcttgagacctgcgttcagaaacgcctgctcgcgcagacgcttttcgagcacatcgtactcgtagaccgtggtttcgaagatctccgggtcagcatggaagcggatggtcgtgccggtctcgctctcgcacggtgtatcgcgcatttttacggtcgtcacgccgcgctcaaagcgcatatagtgcttggtgtgaccgtcgcggacctcggcctcgagccagtcggacagcgcgtttacgaccgacgagccgacgccgtgcagaccgccggagaccttgtagcccgagccgtcgaacttgccgcctgcgtgcagcacagtcagaacgacctcaagcgtcggaatgcccatctgcggatggatgccgcagggaatgcctcggccgttatccgtgacacggatgatgtcgcccttttcgatcgtgacctcgatgtgcgtgcagtagcccgcgagcgcttcgtcgatcgagttgtcgacgatctcgtacaccagatgatgcagaccgcgcgccgaggtagaaccgatgtacatacccgggcgcttgcggacggcttccagaccctcgaggacctggatctggttctcgtcgtaggtctctgtgaccttcagatcgagcacttcgtccttgatttcaatctcttcactcatataaaaaaatttcctttcgaaaattgcgataacagaaaaatcgcgcatcagcgcgccatctcatcgaaaaacgaggtttttcaatatttttatatcgcgtatgccttttccgctctgcgctggagcgcctgcggcgacagctgcgtcagatacagcgtctcgccgagcgcactttcacacagcacagccgcgcgcggcagatcgtcgtacagctcaatgatgcgcccctcgtcctgaagccgcgagagcagacgctgcgtgcggccggacatggttgccgtatccatatcaaaaaccgctacgacattctgcagcggcacaatgtaatcctgtccgaggtgtaaatacatgatattcctccggaatgattatttattttattataccacattttcgcgcgtttgtgtatcggagacttatacaattttgccgtttttgatatgaaatgccgcaccggcgcgtaatttttccgaaatgccgtcctcgcagcaggtgatcatgacctgaccggcagagatccggttgagaacgaagtcctgcctgcggcggtcgagctcgctcagaacatcgtcgagcagcagcacgggatactctccgtcctcctcgaaaaagagctcgcgctcggccagcttgagcgacagcgtgcaggtgcgtacctgtccctgcgaggcgaacgccgacgcgctccgcccgtcgagcagcagctcgagatcgtccttgtgcggtccggaaaggcagcttttcgccgcgatctcggcgtttttgtgccggaatacatggtcgatcagctcgcgctcgagctgctgcgcggacgcgaacggatcgctgacgctgctgaccgtgcggtagacgccggacagcgcctcatgcggcgcgatatcggaatagaccgctgccgccgccgcgagcagcctgcggcagtaatacgcgcggtagcggatgatctgcgcgccgatgcgcgccatgcgcagcgaaaagtcctcccacatcgacagcagagacggtttttcctcgctgtcgcgcaggatgcgcgtcttgtgctcgtgcagacggttgtattcctccagataacgcgcgtagttcggccgcagctgacacagcgcggtgtcgagaaagcgccgccgcgccgccgcgcccgcccggacgagcatcagatcctccggacagaacagcacggtcttgagcaggccctgcacgtcgctctgccgcttctggcgcacgccgtttttgtagatctccatcgccctgaggcgcgacaggcgcagctcgagtgtgttctcacgcccctgcgcctcgaattccgagcagatgaatgccgcatcctcgccgaaccgcagtccttccttcttctgcgccgtgcggaacagccgcatggtcgagcaggccgccgccgcctcgagcaggttggtcttgccctgcccgttctcgccgcagatcagattgaccgccgggtcgaggacaaagcgtacattctcgtaattgcggaaattctgtaatttcaatgtcttgatgtgcattctgcccggtcactccacgttatccgtatatctgtacgttttcgtacacgcaaaatctcgttcgttattgtacattgtgtgcgtttatgcgatcacaacggcctcgccgcctagctcgatcctatctcccgggcgcagcttcttgccgcgcatggtgcatttttcgccgttgaccagcacctcgccctccgcgatgcggagcttggcctcgccgcccgaggataccagatttgcgaacttcagcagggcgtcaagcttgataaattcggtttcgatcttgatttcagtcatttgcacgcaacctcacaggcaggaccagataggtgaacttgtcgccctcggtcggggaaataacgatcgggttgagcgagcccttgagctggagccgcaccttttccgtgccggatgcacgcagcgcgtcaagcatatagcggttgttgaagccgatctccaggtcctcgatgcagccgtcgatcgggcattcatcgtagctcttgccgatcgcggtcacgcacgaaagctgcacataattgccgtcaaaatgaaaacggaccgggtttttcagcttttccgagacgatgagcgacacgcgctcgatcgagctgatgagctcgtgcgagtcgatgtcgacagcgtgctcgaagtcgttcgggatagcggcgcggtagttgaggaactcgccttcgatcaggcgggtgatcagcgtcgtgccgccgatgcggaacaagatgtttttctggtcggggaaaatctcgaccggctcgtcatcctctccgaggatgcgctcgatctcgcgcagggaagcacccgggaccacgaatttcatttccccggacatcccttcgatggtctcgcggcgtacggaaagacggtagccatcgaccgctgccacattgaggcgcgagccatccagctcgaacagacagccggtatggatcggcttggattcgttgtcagaaaccgagaaaatcgtctgagaaatcatgcttttcaggatattctggggtagagagaacccggtagcgctggaaacctcagcaagcgccgggaattcgtccgcctcggtcgcggccagattaaacaccgcgcggccgcatttgacggtcgtcatcagcttgtcgtccgtctcgatataaacgacgtcgttcggcagcttgcggacaatgtcgagcagcagctttgcattgataacgatgctgcccggctcgactacgtcggtctcggtcgtggtgcggatgcccatcgacatgtcataaccggtgacggtcagcgtcgaagcatcagcgcagatgagcagaccctcgagcagcggcatcgagcttttgccggtaacggcgcgcgaagctgtgccgagaatacccagaaggatctctttttcgcaggaaaacttcatattgattcctttctctaaaaacaatgacatctataagggctgctgccgggtttattcgcgtcagcagagcccggatcaaggatttcctttttattactggaaattcacatgcataatgtgtccgcgggagacggacagagaaaacctctcagataaaaggaaaggttttcgcagtagtaatagaggctgtggagcctgtggataactccgaaatcgtcagcagcggcgcgggaaatgtcgtccacagacgattgtggatggaaaatggactgtccacacacgaaaacacacccctgattatccacaggcttatccctgtggattccacagaaaactggggataaataaatgcataaatatacatcctgtgtacagcgaatatgtatatatgcagcgctgtagaattcagtcgccgcgtatattattgtgcagctttttgatgacgtcctcggtctggcgcgatttcttgcgctcctcctcgatcttgttgcaggcgtgcatgacggtggtatggtcgcgcttgaagatctttgcgatgtcggggaaggagtattcgagctcctggcggatcatgtacatcgccatctggcgcggatatgcgacgtccttggagcggtccttggagatcatctgctcgaccgggatatagaagtagttcgcgaccgcctccatgatgcgctcgggcgtcgggttgagccccggattttccgtgcgcagcgcgtcgatcgcgttttcggcgagcgagaccgtgatgcgttcgcccatcagctcgtgcatcgccttgatctttttgaccgcgccttcgagctgacggatgttggactggatgttctccgcgatgtagttggatacctcgtcgggcagctcgatgctcatctttaccgccttgtcgcggatgatggcgattcgtgtttcaaagtccggcggctggatgtccgcgagcaggccccactcgaaacgggtcttcatgcgctcctcgagcgtgttgatctcctttggcggacggtcggaggtgagaacgatctgctttttcgcctcgtacagcgcattaaaggtatggaagaattcttcctgcgtgcgctccttgccggcgatgaactgtacgtcgtcgagcagcagcagatcgaccacgcggtatttgttgcggaaggactgtacatccgctttctggatcgcggtgatcagctcgttggtgaaatcctcgccctttacataaataatgcggaattccgggtgcgtgcggcgcaggacgttcgcgatcgcgtacatcagatgggtcttgcccagaccggagttgccgtagataaacagcgggttgttttccgcagccgggcgctgcgcgaccgcataggccgccgcgtgagcgaatttgttggacgagccgacgatgaaccgttcaaaggtatagtcatcgtacggagacgccgactgggcgggggtgctgtattccccggtcaccaccacaacggtcgctgcctcgccggtcagctgatacagcgcgttctgaagcggttcgatgaatttgtcggtaatgtacttttgcttgaagtctgacggggagtgcagaacaaggcggttgtcggtaaacgaaaccaccgtcgcatccccgaaccaggctgacagggtagacggcagaaacttctgctcgtgttcaagcagttcgagcgccatctccagtatgttgttggccatgaggagagcctccttatagagtgtcgccgggacagggcgaaaaagctgtggacaaaggcgccgtccacagacgcggtggaaacgcgaaaaagagggggcgaacccgttttttcgcaaagcaaacaaaccatacgaaaacgcacggtttttcagaaaaatatgggctgcggcgcgaaaaaatccgaagaaaagtccggacttccggcacagcagaacagcggagaacagcaggagccgactcctattctattttataatagcacacagtatccacaatatcaaatggaaactgtggataacttttatcgtgtcggccggccggaggcgcgaaaagcggccgcggcatacaaagcgtggtggagcgggaaaatgcagacacaagatgttgaaaagatacgaaaaaaacgaattttttgcaaaaaaagcttgacatttcgcgtccgctatacgataatatatatcgtatcatattatgcggacaggcagcggcatatgcccgcgtctcgcgccggacctatgccggtgcccatccgtaaaattcagaacagggaggtgcacgaagttatgaagagaacgttccagccgaagaagcgtcagcgctccaaggagcacggcttccgcaagcgcatgtccaccgcgaacggccgcaaggtactggctcgccgtcgcgcaaagggtcgcgctaagctgtctgcctgatcggcagcaggacccttcgcaaggggtcatatatattcgcgccgcggcgcggagaaaactgttgcgggccgcagaaatgcggctcgtttttttcggtctgatgggcaggcctttttcgtcgtgcgcagaaaacggcgaaaacagtcccaaaacggccggaaaacctgcaaaaagggcgatcgccgcgctttgaccgcgcggtgcggcccgcagtccactgggcggcgcaggcagggcagagaaaagagcgccgtcagctttgcagtcatgaaaacaaccgtgcaaagaagaatttgtcgataattccgtttttttccgggcatcgaaaggaacgaggagacacagacatgaagaaaaccatagccttaaaggaaaaccacgaattccggcggctgtatcatcgaggcacctcatcggcgggcaggcatcttgtgctttactgccggaagaaccgtctcggacacaaccgtctcggactgacggtcagcgcaaaactggcatgtgcggtcaagagaaaccgcatcaagcgtctgtttcgtgaggcataccgcctgcacgaggacgaatttgccaccggcgttgaccttgtgctcgtcgcgcgtgcgcgtgcggtgggcgcgacctatcaggacatcgaaaaatcgctgctgcgtgcgctccgcgagaacaaagccgcagcagctcagccgtgaagcggttgcttctggcgctcgtgcggttttaccggagaaatatctctccgctcaagccgccctgctgccgctatacgccgacctgctcgcagtacgccctcgaggcgatcgagaagtacggcgctctgaagggaggctggcttgcgctgaagcgcatctgccgctgccatcccttctccaaacgggggccctatgacccggtgccgtgaggcagggaagggctctcattgccggggaaatattttccggccataaacgcgcccagagcgcgcatttctggaggttcttatgaccatcgatcaactttctaacctgatcaaagaccccaatatctttggttatctcatcgtcagaccgttcggtctgatcctgctcagcctgtacaatttcgtgcataactacggctttgccgttatcctgttcgcgctgatcgtcaagctgtgctgcgtaccgctcgccatcaagggcaagaagagcatgctcgccatgaccgcgctcaacgcggagatgcagcagcttcagaagaagtacgcgaacaaccgcgccaagctcaacgaggaaatccaggcgctctatgaacgccgcggcgtcagcccgatgagcggctgcctgccccagttcattccgctccccatcatgatgggtctgtactatgcggtacagcagccgctgcagtatatcgtcggcctgagcagcgagacggtcatcaagctcgcgcagctggtcggtctggacaatctggcaggcgcaaactacaccgtacagatcgtgatcgcggaaaagctgaacgcattcaaggatgcagtcggcaatttcacgcccgacgttttcaagtgcctcgcagacggcgagagcatcttcccgatggacttcaacttcttcggccttaatctggcggataccccgtccatcaagcacccgggcctgatctggatcatcccgatcctgtcgtgcctgaccgcatatctctccagctacatcatgcagaagatgcagaacatgcccaagggcaacgatgcggctgcgaaccagatgaagatgatgaccatgctgatgccgctgatgtcgctgtactttgcgttcatccttccgggcgcgatcggcatttactggatcttcaacaacgtattcacctgcgtacaggaggtcattctgaccaagcacatccgcggcaagcaggaggccgagcaggccgccgaagccgaacgggtcgaggcagagaaaaaggccaagcgcgaggcaaaccgcgcggcacagaagtcccatagtgagaaaaagaagggggacaagtaatcatgcagaagtttttagaagcaaccggcgagagccgtgatgcagctattgcaaacgcgctgcgtcagctgggcctcgaccgcgatgatgtatccgtagaggtactcgacaacggcaaaaagggcattttcggcattggtgcgaccccggcgcgcgtccgcgtgacctatgaggcgcccgagatcatcgaggagaagaaaccggcgccgaaggcggaaaagccggctccgaagccggtaaagaccgagccgaaggcagaaaagccggctgtcaagccgcagaagctgtccatcaccgacgaggacgacacgccgcgtctggtcaaggctgctccggcggattttgttccggaaaagctcgaggtcgagcgtccgcgccgcgagcgcagcgaccgagcgcgccgtgaacgcagcgaccgcccgcgccgtgagcgccgtccgcgcgaggagcgcccgatcactccgtccgttccgaaggagcgcgagctcatcccggtctccgaggactgcatgaagaaggcggaggagctcgcgacctcgttcatctccggtctgatggagaagatgggcatcgagggtcaggtcacggttcttccgcagaccgagtgcgaccagctgcgccttgagctgtctggtccggacatgggtccgatcatcggccgccgcggtgatacgctcgacgcgatccagtatctcggctcgctcgtgctgaacaacgcgctcgatgagcacgttcgtctgtctgttgataccgaaaactaccgcgagaagcgtgcggagagcctggagcgtctggcgcgcaagatggcgatgaaggtcgtcaagagccatcgctcgatgactctcgagccgatgaacccgtatgagcgccgcatcatccatgccgctctccaggatttcaacggcgttacgacctactccaccggcactgagccgagccgccgcgtcgttatcgcaccggacagcggccgccagcgtcattaacgcagaggtatcatctatgaatgatacgattgccgctgttgccgcatcgggcggaccgatcggcatcatccgtgtatcgggtgcgcaggcgatcggtgcggtcagcgcggtcttttctccgaaaaacggcagtccgctggcggaagcagcctcgcagaagctggtttacggtacgctttccgacaagaacgggcatttgctcgacgcctgctatgcggtcgtgttccgcgcgccgcatacctacacgggcgaggacatggcggaaattcagtgccatggctcgactgcggtcctgaccgcggcgctcgctgcgcttttcgcgcacggcgtgcggcaggccgaggccggagagttcacgcgccgcgcgtttctgaacgataaaatgggactttccgaggcggaagccgtacatgacctgatcacggcgcgcacggtcgaagccgcgcagaacgccgcggcgcagatgatgggtgcggtcggctcgagcgtgcagcagatgcgcgacaagctgctcggcatggtcgcgcatttccacgcgatcgtcgattttccggacgaggacatcgacccgatcctgttcgatgatgcggcggcgctgctgcaccagacaacaagtcagctctaccgcatggcggagagctatgaacggggacgtatcctgcgcgagggcgtgccgtgcgtcattctcggccggccgaacgccggcaagtcgacgctgctgaacacgctgcttggacgcgaacgcgccatcgtcacggacattcccggcacgacgcgcgacctcatcgaggagaacgtcaaggtcggccagatcctgctgcgcgtgactgatacggccggactgcgcgacacgaccgacccggtcgaacaggcaggtatcgaccgcgcaatggcggaagcgtctgcgtccgcgctcattctcgccgtgttcgacggctccaagccgatcggggaagaggatatgctcgtgctcgcccgttcggccggacaccgtgcgatcgccgtgctgaacaaggcagacctgccgcagcagctcgacgaggagctgctcaaaaagcagttcgcgcacatcgttcatctgtcggcaaagacaggggagggaatggatcgtctgctgtcgctcattccgcgcaccatcggcttcggagagactgcgtttgacggcgcactgatcacaaacgcccgtcaggccgccgcgctcgcgcgcgccgcagaacgctgcgaagcggcgctgtacgctgctcagtgcggcatgacgccggacgctgtcgtgatggatgcagagggcgcgattgccgcactcggcgagatcaccggcgagaccgtgaccgagtcggtcgttacccgaattttcagcgatttctgcgtcggcaagtgacgcggagaacgaatgtggaaacaatgtggataggggggccgcctgccgcgcgcagcggcccctttttcaggcaataatacaacaaagcgtaatcgaaagataaaaatattacgtttagtaaaacaaaaatgaccactcaaagtagagttatccagagtttccacatagttatcaacagttttacacagagagggaccgatgaacattttgctatttcgatatacaaaaggaggcgccgcgcgatgacagcatttgacgcggaagcgttcgacgttgcggtgatcggcgccggtcatgcaggcattgaggccgcgctcgcaagtgcacgtttaggtgcgaaaaccgcgtgtttttcgatcaatctggacgctgtaggcaatatgccgtgcaatcctgccatcggcggcacggccaagggacacctcgttcgagagatcgatgcactgggcggagagatggcccgggcggcggatgcggcctgcattcagtaccgtatgctcaaccgcggcaagggccctgcggtgcattctctgcgtgcgcaggccgaccgaattaaatacagagcgtatatgaagcacgttctggagcagcaggaaaacctgtttctcatgcaggatgaggtggtcgccatcgagcagaaggacggcgcggtttcggctatcgtgaccgctgtcggcgtgcgccatgccgtcaaggcggtcgttgtcgcctcgggcaccttcctcggcggccgcgtcatcatcggagaatatacccgtgaatccggcccggacggtatggcggcggcaaagccgctcaccgagtcgctgcgcggtctgggactgcgtttgcagcgcttcaagaccggcacgccgccgcgcatcaaccgccgctcgattgacttcgagggtcttgcggtgcaggagggagagaatgaaattatcccgttttccttcgagaccgaccatccgcccgataaccgtgcggtatgtcatctgacctatacgaccgcggaaacgcatgagatcatccgcgcaaacctcgaccgttcgccgctctacggcggcaaaatcgagggcgtcggcccgcgctactgcccgtccatcgaggataaggtcgtgcgcttcgcggacaagccgcgccatcagctgtttcttgagccgatgggactggataccgaggaaatctatgtacagggcttttcgtcctccatgccgttcgatgtacagcgcaaaatgctgcattcggtcaagggactggagcacgccgagatcatgcgtccggcctacgccatcgagtacgactgcatcgatccgctcgagctacgtccgacgctcgagaccaaaaaggtctccggtctgtacggcgcaggtcagttctgcggctcgtccggctacgaggaggcggccgcgcagggccttgtggcaggcatcaacgccgccctcagactcaagggcgaggaaccactcgtgctcgaccgtgcagacggatacatcggtacgctgatcgacgatctggtgacgcgcggcacgaacgaaccgtaccgcatgatgacctcgcgctcggagtaccgcctgctgctgcggcaggacaacgcagatgaacgtctcgtcccgattggtgtccgcgtcggactgaattcgcccgaacgcggcgacaaagtgcggaaaaagtacgaaaccgtgcagcgagagatcgaccgcatcgcatcggtcggcatcgcgccgggcgagcagctgaatgcctttctggagcagcatcactcgacgcctctcaaggccggctgcaagctgatcgacctgctgcgccgtcccgagctgagctacgcagatcttgcgccgttcgatgcagagcgcccggagctgcctgcggtcatccgcgagcaggtcgagatccgcatcaaatatgccggttatatcgagcgccaggagcgcgatgtcgagcagtaccgcaggcttcagagccgtccgctgccgcttgatctggactataacgaggtggactcgctgcgtctggaggcgcggcagaagctgaacgcagtcaagccgctgaatttcggtcaggcggcccgtatttcgggtgtctcgccggcggatattactgcgctgatgatctatatcgaaacacatcgaaagggggaaagggcttgaccgaccgcgagctgctgtacaccggactgaaggaatttctgcccgaagtcagcgaaaaaatgattgatgatttgttgaaattctccgcgttgctgctggagaagaacaaggtgatgaacctcaccgcagtcaccgaaccgaccgaggtcgtgacgcgccatttcctcgactgcgccgctctcgcgccgcatatgccgcaggggggaagggtgctcgacgtgggcacgggcgccggttttccgggtatgcccctggcaatactgtgcccggagaccgaattcgtcctgctcgacgcgctgcgcaagcgcatcgactttctgaatgaggttatcgagacactgggtctgaccaacgtcaccgccgtccatgcacgggcggaggatttcgcgaaggacagccgtgcgtcgttcgatatggcggtttcacgtgcagtggcagacctgcgcacgctcagcgagctggcggtgccgatggtcaaggtcggcggctgcttcctcgccatgaaggcggcggactgcgcggaggaagtgcagagcgcggcgcatgccttcgaggtgctgggcgtcggcgagccggaaatgctgagctatactgtgccgcatgacggcatcgagcgggcgctcgttcgtctgccgaagatcagcgatacccccgacaaatacccgcgccgctttaagaaaattcagaccgctccgctctgaaattatacggaaagtttaccctctgtacggaaattacagagggtattttttgtccgaaaataagtatatcagccgctttttcgttggaaatgacaggaatttgtcgtacaaggcagattacgcggtcgattttgcttgcctgtctgcaaaattgtggtaatctattaccaaaggacgaccgtgccacagaaaacagaggtgcagtacccctgttcatcgggcacagcaggaaaaggaggttacttatgatgaaatcggtcctgacgcttgtgtccgggagggaggatcgggtgctgcggcgtatccgtatttcagagatcgtgcgcaatcccaatcagccgcggcgatatttcgacccggaggcgatcgccacgctcgcagagagtatccgtcagtacggcgtgctcaatccgctgaccgtgcggcggacagggaacggtggctatgaactggtcgcaggggagaggcggctgagggcggcgcgcgtcgccggactgaccgatgtgccctgcctgctcatcaacgcggacggggaggactcgtcggtgatcgccctcgttgagaatttgcagcggcgcgatctggatttctttgaggaggcgaacggcttcaagcggctcatcgaacagttcggtctgacgcaggaggaggctgcgcgcaaggtagggaagacccagtcagccgttgcgaacaagctgaggctgctgcggctgtcgcagcagaatatggagctgatccgctgcaacaatctgaccgagcggcatgcccgggcgctgctgcgcctgaacgatgaggccgaccgcatcaacgtcaccaattatatcatcgagcatgagctgaatgtcagccgtaccgaggaatatatcgacgaatttctcaaggcgaaggaaaatccgcagccggtcgttgaggcggagagcggaaagcgcgttgtgcgcctgttcaaggatgtgcgtttttttctgaacacactcaaccgcgcggtcggagtgatggtcgatgcagggatcggcgcgaccgtcaagcagcaggagagcgacgacggcctgacgctcactatctgcattccgcacgcgaaagggtaaatcgcagcaattactatattataggtgccatccgaagggatggcacttttgtttcatgtgaaacaaaggcatggaacaaatgacagaattgttccacgtgaaacattctgcatgaaacagaaagcaaaattgttccacgtgaaacatcggcgcggaacagggagggactgtttcacgtgaaaccttttccggacagtttgtgttccacgtgaaacaacgtccacgcaggcaaactcatgtttcacatgaaacattttccgcagaaggaaaagcgcaggcaaaaattttgggatagtgcctttgttttcttttaagcatgtgctataataaagagcataggaaaaaacacgaataaagaggaaagcactatgggtaaaattatcgcgttcgccaaccagaagggcggcgtgggaaaaacaacgactgcgatcaacctcgcagcggcactgtccgagcgcggaaagcgcgttctgctgtgcgactttgacccgcagggcaatgcgacctcaggcttcggtgtcgatccgcgttccctcgaaacatcggtctatgatctgatcgtatccgagggcccggatacgaaatcaggtatcgtccagacgaaatgggtcgatatcatcggcgcgaacgtcaatcttgcgggcgcggagctcgatctgatcgcaatggatcaccgcgaggcgcggctcaagctcgtgctcgacaaggtgaaggacgaatacgattatgtgttcatcgactgcccgccgtcgctcggcctgctgacgctcaactgcctgtgcgcggctgacagcttcctcgtgccgctccagtgcgagtattacgcactcgagggcctgagccagctgatgacgaccgtgcgcatggtcaagaaaaacatgaacccgaagctgtcgctcgagggtgtgctgctgaccatgttcgacggccgaaccaacctgtccattcaggtggtcgaggaggtcaaaaagcacttcccgggcgaggtgttctcgtcggtcgttccgcgcaacgttcgtctgagcgaggcgccgagccacggcaagccgatcaccgagtacgaccgcatgtgccgcggcgcagaagcgtatctgtcgctcgcggatgaaatccttgcgaaaaacggaaaggggaagggctgatggcatccggtaaaaagggactgggcggcggcctgtccaacctgttcggagatacgacggttgttgatctgaaaacggagacctcggcggacagcgtcagcaagatcgcggtcagccgcatcgaaccgaaccccggccagccgaggaaggtattcacgcaggaggcgctcgacgagctcgcggaaagcatccgtctgcacggcgtcattacgccgatcacggtgcgcgcgggtaaaaaggaaggctattatcagatcatcgcaggcgagaggagatggcgtgccgcgcggcaggccggtctggatgaaatccctgcgatggtcatcgaggcgagcgagagcgaggttatggagcttgcgctcatcgagaatttgcagcggcaggacctcaacccgatcgaggaagcggagggctatgagcagctgatgcgcgactatggcctgacgcaggagcaggtcgcgcagcgcgtcgtcaagtcgcgcccggcggtcgccaatgcgctgcgtctgcttcagctgcccggcgaggtccggaccatggtcagcaggggagagctctccggcggccatgcgcgcgcggtgctcgccgtcgcggaggaggataagcgcgtcgaagccgcaaagcagatggccggcatgaccgtccgtcaggcggaggcgctcgccaagcgcatgaataaaaagcctgcggagccaaagccgcaggaaagcgacttttccgtggattatatcgcggcgttggagaaggagctggaaagcgttctcggccgtaagatctgcattcagcagggcaaaaacagcggtcagctgacccttgaatattacggcgcggacgatctggaacgcctgactgaagcgctgcgcgccctgcgcgtataaggaggcagcacatgaacgaacagaaaaacaacgcccctgaacaggcaaagccggagaaaaaactcagccgcacgacgctgacgttttatatcgtcggtctgttctcggtagcgatcgcactcatcctcatcagctatgttgcgcaggcgcgtgcggaccggcaggtcgaaaacctcagctcacagctgaacgagcagcagacggttgcgcagggcgcgacccagaaggtcgcagatctgcagcagcagtttgatttgcagagcagcgcgctggagagcgtgcgcagcacgcttggtaccgagcaggcaaagaccgatgtggtcggcgcgacgcagaatctgcgcgagcgcgagcagatgctcgaaatgctggtagcggcggagcaggccgtcattgacgatgacatggagcagctgaattacctgctcgagggcatcaaagacgccttttccgagaaccagctcaagctccgcgaggacggcggcgtgcttgaggcgaatgactacgcagtctatcagaagctgctcgcgctcgcagacagcaacgcgcagagcgaagataaaaatgtcaataatcaataaggagaaataaaaatgctggatatcaaatttgtccgagcaaacccggacgcagtcaaggaaaacatcaagaagaagttccaggacgagaaaatcccgatggtcgatgaggtcatcgagttcgacgcgaagtaccgcgctgcaaagacccgctgcgacgagctgcgcgctcagcgcaacaagaagtccaaggagatcggcggtctgatggccaagggtcagaaggacgaggccgagaaggtcaaggcagaggtcaaggcgatggccgacgagatgaccaagctcgaagaggacgaaaaggtttttgctgaggaagtcaagaaccgcatgatggtcattccgaacatcatcgatccgtctgtcccgatcggcaaggacgattccgagaacgttgagaacgagcgcttcggcgagccggtcgttccggattttgaggttccgtaccatgttgacatcatggagtccttcgacggcatcgatctcgacgctgctcgccgcacctccggcaacggcttctactacctcaagggcgacatcgcgcgtctgcattcttctatcctgtcctacgcgcgcgacttcatgatcgaccgcggcttcacctactacattccgccgttcatgatccacggtgatgtagtaaagggcgttatgtccttcaaggaaatggagaacatgatgtacaagatcgagggcgaggatctgtacctgatcggcacctccgagcactccatgatcggcaagttcatcgacaccatcaacgacgaggagaccctcccgcagaccctcaccagctactctccgtgcttccgcaaggaagtcggtgcgcacggcatcgaggagcgcggcgtttaccgcatccaccagttcgagaagcaggaaatggtcgtcgtctgcaagccggaggacagcaaggcatggtacgagaagctgtggcagaacacggttgacttcttccgttcgctcgatattccggtacgcaccctcgagtgctgctcgggcgacctggctgacctgaaggtcaagtcctgcgacgtagaggcatggtctccgcgccagaagaagtacttcgaggtcggctcctgctccaacctcggcgacgcacaggcgcgccgtctgggcatccgtatccgcagcaaggagaacccgaaggagctgtacttcgcgcacactctgaacaacacggtcgttgcacctccgcgtatgctgatcgcgttcctcgagaacaatctgcgtgaggacggctcggttgctatcccgaagccgcttcagccgtacatgggcggcatgaccgagctgcgcaagaagtaagttccattccgcgaaacagacaggagtaattgatatgaacaccggtatcaagggcgagaagaagttcaccgtaaccaaggagcagctggcgtgcaacgtcggcagcggtctggtatccgtatttgccaccccgatgatgatcgcagccatcgagaacaccgcagccgcaagtgtcgcgggtgagcttgaagagggcaagaccacggtcggcacgctggtaaacgtaagccatgttgccgctacgccggagggcatggaggtccgcatcgagaccgagctgaccgagatcgcgccgaacggcaagatcctgaccttcaaggttgcagcctacgacgaggcaggcctgatcggcgagggcacgcatcagcgcgccattgttgccaaggagcgcttcgagcagaaggcacagagcaagctcgcaaagtaaaaaccagagatgataaaagcaccgcagtcatagactgcggtgctttgactatcgaaaagcttcgtttttccgacaacctgtgttttggctttgcaaaacacgaacgtccgaaagttcccatgcggaaaccttctccttctgaaagtatgaaaaccggggtgcacgcctcggctgctctcattgcatattttggaggatagaggtctgcgggcttgtgcatttgctgcgcaaacgctttttcatgcgcgttgccgcgcggcagcgtccgcatcgtgaaaacggattttattgacagactgagacgcacatcttgcgatgtgcgtctttttgcgtctttgcacggttatagctccggcacatcggttttgtatacctcatcaatcgctttggacatatgctggatacggtactgccgcggtgacgtaccgactttcttcacgaacaggttgatcaggctgccgctggtcgagtagccgacctcctcggcgatttctgcaatcggcttctgcgtgcgcacgagcaggaccttcgcgcgctcaatgcgcgagttgattacataatcggcaggggaaaagccggtgcggcgcttgaacatatgcgcgaaataggacgcgctcaggcacacggtggacgccagatcctccacggaaatcggctgaccgatatgcgagcggatgtactgaatggcctgctcgaccggcgtatccgctgactgctcggcggcactcggtgagagcagcaggtcaaacatgcggtagatgcgtgccgagcgctgcatatcggtctctacaccgttctcattgtaaaagcgcaccatgtcgtacagcagattgccgatcagcgtgttgttgtcgcggcggatgagccagccgtgccgctcggtgatgcggcggcacagctcacgcgcgttcgagccctcaaagtgcatgtacacgaactccagtccgtcctcggcgtggtagtagtgcggctcgatgcagtcgagcagcagcacgtcaccggcctcggcgacatggaactcaccgcggtactccacgcggaagcgtcccttgcggatgtaggcgatgagcagcggcggataactgtcgcgcttcataaaatagttggcggtgcagtagtagtgaccgcaccatgtcgggtaaaacagcagctctcttgcggtctgcgacggcgtaaacggaaaacaaaccgactcacttcggatgccgggatcaacactttgcataaactcttctccttccttattttgccctcatagaatccatgaacgaaatagcaggattgatgaactggttttctgtgttttttcacagaaagcaggatcgatgaactttatgacagaaacgcttattgaatacatccataaaacattttatacttaggtcagaagttaggaaatagatacaataaacaaagataaatcgtatttgttgtatgtatttcacaaaacatcgaaacaagcagtataaaacagaatcaaacacctttttacaaatcgaagaaagaaggaaaacattatgttcatcggtgaaaagaaaatcgctcgtccgttccgttggggtatcgtaggcggcggccgcacttccggcgttggctacaagcatcgtctgggcgctatgcgcgacaacacttcgttcgttctcaaggctgcagcgttcgacctcgatttcgcccgctgcgtagacttcggcaagaacctgaacatggatgaggagcgcctctatccggattacaagaccatgtttgctgaggaagcaaagcgcgaggacggcatcgaggctgttgacatcgcaaccccgaacttccagcactttgaggtctgcaaggccgctctggaagccggcctgcatgtaatctgtgagaagccgctgttcttcaaggttgaggaaggcgaagagatcaagaagctggctgaggaaaagggcaagatcgtttgcgtaacctacggcttctccggtttcgacctgctgagccagatgcgttccatggtcctgaacggcgacattggtgaggttaccatggtagacctccgctacgcacatggtttcgcttgcgacccgaccggcgacaagcaggctgagggtcagaagtggcgtgttgatccggcaaagtccggcccgtcctttgtacttggcgacctgtccacccacaccttctatatgtccgagctgatctgcccgcagctgaagctgaagcagctgctgtgcgaccgccagagcttcatcaagtcccgtgcaccgctggaggacaatgcttacgtcctgatgcgttatgagaacggcgcagttggccgtatgtgggcatccgcagttaacgcaggcgacatgagcagccagcacatccgcattgtcggcaccaaggcttccctcgagtggaacgatatgcatccggatgagctgtactacgaagtacagggtcagccgcgtcagacgctggttcgcgcaatggattacctgaatccggaagctcttgagtacgagcgcctgggtgctctgcattacaccggcctgatcgagtcctggagcaacctgtacacccgtttcgctatcgcaatggatgcgaagaaccgcggcgacgaggagaccctcaagaatctggtttacccggatctggagcacggcatcgacggcatccgctgggtcaccaagtgcgtagagtccgctgataagggcggcgtatgggtagatttcaagtaatccgcctgtttaccgaataactcgcttatttcttctctctcagctgctgccttccgtttcaggcgggcagcagcagtccctcaaagaatttctctcaaaaatgttccgaaagaaaagaggttttttatatgaaactcgcaatctgcactgacgtattcgctgatctgtcctacacggatatgctcgacaaggtaaagtccctcggcatcgacgcggtcgagatgaccgcaggcggctggggcgcacgcaagcactgcaacaccgccgagctgctcgcggacgcaggcaagcgtgaagcgttcatgatggagcttgaaaagcgcggcatgcgcatttctgcactgaacacgtcctgcaacccgctttggccctccaaaaccggcgaggagtacaagaagtccatgtacgactgcgcaacgcttgcaggtctgctcggcgttaagaagatcgtagccatggccggtctgccggcaggcagcgagaccgacaccaccccgaactggatcacctccaccgtttcgtggccggatttcatggctccggcttatgagtaccagtggaaagtgaccatcgagttctggaacgaatttatcgcacactgcaagaagtgcggcatcgagcatattgcaatcgaggaatttccgggtacaatggtatggtcggcatctactctgctcaagctgcgtgaggctaccgacccgatgctcggcatcaacctcgacccgtcccacatgatggttctgggcgcagacccgatcgcagcggcgcgtgcactgaagggctgcatcttccatgtgcacggcaaggacgcccgcatcgagcgcggtctggctgacaccgacggtctgctcgagcctcgccctgttaccgagtccgctgaccgcgtatggaactacgttgcggtcggctgcggcaaggacctgcagtggtggaaggaattcttctctgtctgccacatgatgggctacgacggcgacgtttccctcgaaatggaggacctgaccatgacggttgatgccggcgttcatacctccatcgacgcgctccgccagacgatcagccagtaagacacacacaatcacacaagcagctccgcataccccaaggaaggaagaaccaaagaaaaagaaagggtagtgtttgcaccatgaaaaagagagtattagcgatgacgctggtcggcacgctgtgtaccgccatgctggcgggatgcggcggtcagacctccgcgaacgacaaggcaggcggtgacgccgccaccggcgacgcctacaacgttaccgtgatcgtaaagcataccgacggacacttcaacaaggttattgccggtgcgcgcgcttacggcaacgagcatgacaacgtaaacgttgagatccagtctccgacctcggctacctcgtatgatgagcaggtaaacatgatcgaaaccgcgctcggcaacccgggcattgatgccgtcgtggtcgcaccgcagcagtctacttcaaccgctacccttgtcgcttccgcgaacaagccggtgcttgcactggatactgacttcacttcggacaaaaaggcttgctttgtcggcaccggcaacgaggacgcggcgctgaacggcggcaaggcggttgctgaggcctgcaaggcactcggcaaggacaagccgacggctgtcatcatcgcaggcgtacagggcgacgagacccatgaagcgcgtctgcgcggctaccgcgatgcgatcgaagccgcaggcggtcaggtgctcgaagtgcagtacaccgacaccatgccggacaaggcagcagccgctatggaagcggttatccagaagtacccgaacggtgtagacgcagttctgtccatcgcggatgacatggcgcttgcagctgcaaaggttatcaaggattccggcaacgccaattacgcagataccgttctgtgcggctttgacggaaaccagtccgctgtcgaggcagtcaaagcaggctctctgaccatcgacatcgcacagatgggctatgacatgggctataaggctgtggaagcggcggtaaaggtgctcgacggcgataaagtcgattccttcatcgactccggctccaaggtcattgattccgacaatatcgaagactatattgcggatatgaagtccaagggcctgtgggagtaaaacactgacccgcagacaggattatactgcttgtaacagggcggacgcaggttctgcacttgcgcccgcccttgctttacctgcaaaaagataaaattgacatatttgggaaattgtatctgcccaaagaagtgcacacacaaagagggggattccaatggtttggactatggcgacgtttatcggtttcacgatacttgttgcagtcatttcgtatgtaaaaacaaaggacgatgaccagagcaccgcagacggctattttctggccggacgcggcctgccgggcttcgttatcgcgggttcgctgctgctgaccaacctgtcggcagagcagctggtcggcacgaacggacagacttggagcgtgggcatgagcccgatggcgttcgagatcgtagcggctccgtgctgtatcgtgctggcgctgtttgcggcgccgcgttatctaaaaagcggcattaccaccatcccggagctgattggtctgcgctatgaccgcagcacgaagctgtggttctccatcgcgtacatcctgctgtacattgtcgtacagattccggttatcctgtactccggttcgctggtattcgagaacatttttaatgtttccggtattctgggcgtgaccaagttccaggcggtcatcatcctctgcatcatcatcagtatcatcggctcgatttacgctatcttcggcggactgaaagccgttgccgtatcggatacggtaaacggcatcggcctgctgatcggcggcttcatgatcccgttcttcgcgctgagtgtactcggcaagacggcaggcggtgacggtctgtcggttatcgacggtatgcgtttcctgatcgaaaaccattcggatatgctcaactctatcgctccggcggattctctgccgcctgcggttccgtggccgaccgtatttaccggtctgttcttcctcggcctgcagtcttggtgtacgcaccagtcgttcattcagcgtgtacttgctgcaaagaacctcaaggaagcacagaagggcgcgctctactgcgcgtttctgaaaattatcggctttatgtaccttgctctgccgggcgttatcgcgtatgcgctgtttgagctgcagggcaatcaggtatccatgatggatgaagcatacccgcagctggtttcgcaggttgttccggctccgctgatgggcttcttcgcagccgtcatgctcggcgcgatcctgtcctcgttcaactcggtgctgaactcggtagataccatgtttaccatggacatctacaaggaattcatcgacaaggacgcttccgaggacaagctcgtcaaggtcggcaagaatgtcggcatcatcttcgcggtgctgaccaccatcgttggtccgctgatctacttcttcccggcgggtctcaagacattcctggattccctcgtaatgctgattgcattgccggttctgacggccgtattcggcggcttcttcttcaagcacctgccgaaatacagcgcaaaggccattctggtactgcatgtggtctgctacggctcgttcctgctgttcctcaacagcaagctccattacctgtacgctgtctttgttctgctgccggttgagctgttggttatgtttattttcaatcagcgaaacaagacaaagcacccggaggcatgggagcagaaggacgtcggcgcggtcgaccttaccccgtggaaatatcgctgggttgccaccgcactgattctcatttgtgttgcagcggtttacattgcgttctctccgctcggcatcggtacctggggttacagccagccgttctaaaattaaaaataaaacggagtgcgtttacgcttcggtctcagtctgtcgaaaaagtccagcaaagctgggctttttcttgtatatgaggtaaaaagaaaagggcaagggaaattatggaaattccgcatgattggacaagagtgatttgcgggtcaagttcacaggaacgtctgcgcgaaaaccggctcgagctgctcggcaaagcggcgatggccctgttcggaaaagtggacgccgtcgaacacgaccggaatatcccagccggaggcgtcgcagaatgacacgccgcagagcgcggcgagatcgcggtagagcggggcgagctgtccggaactgcggatgagcgcgtcgctctcaacccatgttccgctctgcatgagcggcggcgcgacgagcagcagcggcagaccgcagaccagaagatcgctgatgaagatgcgcatccgttcggcagcctcggcaggggaggcgccgcaaagcaggtcgttcgtgccgagcatcagacagagcccgtctgccggcagccgggagcggatctggctgagcaggacgcgcacggcgaagctgctcgacgggatttcccggccgttctcgccgagattctggatgtcccacgcgctgccgagccgtgaggtccaccgcacgccgtcgggatagcgcgcgccgccgaaggcggcagggtcatagccatatgtgttggagtcgccgatgcagatgatgcgctttgccatttaaccacctcatttgcgctcattatatcgtgttcccggaatatttgcaagctgtgcgcaaaaaaaagaaaaacacgcctttggcgtgtttttcagacgggaatcatatcagtttgcagcgcttgccgcggcggtcagcaggcggtgcagctcggtgcagtcgctcagcagggaagcgcctgtgcggacgtcaacatcgtcggtcagcgtcagcagccgcagccagtattcggtctgcgccgtttcgcgcagcgcctcgttcaggctctcggcaaggtctcgtcggctgagggcgcaatccgcgcacgatactgcggagccgatcgccgctgcgtgcttcagcagctcggcggacaggtcgtcctcgtgccggtgcagcaggcggtgcagctttacgatgcggacagaaaaatgcagcgacttttccagaagaatgctgttctgagacataagtaaaacctcgtgtgtgtgatgatggtgcgggtaacaggacttgaacctgcacgtctgagacaccagaacctaaatctggcgcgtctgccattccgccatacccgcagaaaaaatcaaaggccgcgcaaagcgcgctccggcgcccggcggcatggtctcagtataaccgctccgtcctcttttgtcaatttgcagagcgctttttctgtactgtaatcaaaaaatcgggaaaaaggaataccggatatgtggaatttgtgctatacttaatctgtataggcatccgcaaggaaagtgcctgtgcaatcgacagaacgcgcgtgtttccgcgcgcgaatttggacttccgaacaaggactgggagcaagcaatgaaatctgttcgtatactgcccgtgctgatgagccttctgctgcttgcaggctgcacgatgccgtccggcgacgagctgctggcggcgcccaagccgcccggcaattatcagacgctgcagaccaagctcgaagagcttctggcatcgggcgtttcctataccaccccgaccgcaggggagaaccgttcgtccgtacagctcgtcgatctggacggtgacggcgcggaggaggccatcgtgttcttccgcggcgcgacctcggcgacgagcaacgacttcaaggtatatatctacaagaaaaacggggatgactatcggtgcaccggctcgatcgaggccaagggagccgcgatccagtcggtcgaatatccgaccatcaccccggacggcggccgcggcatcgtggtcacatggcagctggccggcaacggaacgggcgcgctgacgatgtgcgactttgacgacagctgcgcgccgcgcgtgctgctcgagaccgattacagtgcgcttgagctgaccgacatggacggcgacggcgcgaaggatctgctgctgctgaccggcgcctccggaaagcgcgccgcgcagctgtaccgctataagaacggccgcatgaacctggccggtgaggcggcgatgagcgccggcatcgcatcggtcgagcgcatggaggccggacatatcattgacggcctgccggcagtgttcgcggaggaaaaaatggcctccggcatcggcctgacgaccgatatctttgtctacagcgacggaatgctggtcaatctggcgctcgacggcgaggatatcgcgagccgcagcaccttccgtcccgtgcaggtctatgcggccgacatcaacagcgacggcgtgatcgagctgccgcgtgcggtgcttatggcgggctacaaggacgcggcggcgcacgacgcgctgtatatgctcgactggtacgcctacggtctgggctcaacgcccgtacaggtcagcacgacctatcagtgcatctcggatgcgtggagtctgcgcatcgaccagagctggcacgaccgcatcacggcggtcaagtccacggacggcggcctgagtctggtttcgttctacgaataccgcggagcgggacaaagctcgattccgctgttcaatatctactgcgtcacgggttcctcgcgcgagtattacgcgggccggaccgacctcatccagctcggccagacgtcgcaggcggtctatttcgcgaagatcccggagggcgcgcagagcggcacgctgaagatcggcgcggaggagatcagctcgcgcttctcgatcgtcaagcaggcatggaacaactgaagataaaaggaggatggcatctatgaaacgtaaggtactggttctggaggatgaagaaagcatccgctcctttctggtgctgaatatgaaacggggcggctacgaggtcatcgaggctgaaaccggcgagcaggcgctcgaaaaatatcgtgaaaatcaggatctcgcggtcgcgatactcgacgtcatgctgccgggcatcgacggctacgaggtctgccgcacgatgcgtgcagagggctatcaggccggcgtgatcatgctgaccgcgcgcacgcaggaggcggacaaggtaaacggtctgatgaacggcgcggacgactatgtgaccaagccgttttcgagcatcgagctggtcgcgcgcgtggacgcgctgtaccgccgcgtatccggctcgccgttctcggaggaggacgtcatcaagtccggcccgttcaagctcaatctgcgcgcacgcgaggtgctcaagaacggacgcaagatcgagctgacgcagatcgagtacggtctgctcaaggcgttcatgcagaacatcggcaaggcgctttcgcgcgacgagctgctggagatggtgtggggccatcactatgtgggcgagctgaagatcgtagacgtcaacatccgccgtctgcgcatcaagatcgaggatgacccggccgagccgagccatatcgttacggtgcgcggatacgggtatatgtgggaaggataaagcactggcgctttctaagggggacgctgtcccccttagatacgttcccggttccgcagaaaccgggaacgataaccccctcgcccctgcacggcagggacggccgcgccgccgcggcgcgggcagcgggaaagaagtccggcagagccggacttctttggggatttgcatcggcgcactgcggtgcgccgcgaaaaggcgctgacgctgccttttcgattattccgcagttgttttcggagaaaacaggaaaggtcattttctttatgacagatcgcaaaaaacgtaaacaatccgcaccgcggccgcagccggaaacaccaaaggtgctgcactcgccgggcggtatccgcggacgctggatgatgaactcgctctcattcgtgcttgtcattctggcggccgtgatgattttgatctcggtcggcgtgtcgggctattactacgccaccgtgcgcgacaatctggtctcgcgcgcggtcacggcctcggacaccttccgcaaatacttcaccgatacctatgaccagttctacacgcaggcggagtccactgtgacgacgttcagcgagcaggacaagctcgagcagcagtttctcgacgcgaacgggcgtattctgctctcgacatccggtctgtccggcggcggtctggcgtccacagaggacgccacgcaggcgctcgccacgcagaagacctcggtgttcaccggacgcgatccgctctctgacgagcgtgtgatgagcgtcaccgcgccgctgctgtcctcgcgcggcgatctggtcggcggcgtgcgcttcatcagctcgctgcgtgtggtcgagcgccagatctggatcatcatcggcgtgtcgctgctcgcgtgtctggtgttcctgatcttcgtcgtcgcgtccaatagctactttatccggtcgatcgtagacccggtgctcaagatcaacaacatcgccaaggagatcgcggcaggccgctacggcgtgcgcctgcaaaagacctatgacgacgagatcggcgagctgtgcgacacgatcaactatatgtccgacgagatcaaccgcgccgagcgcatgaagaacgacttcatttcctcggtctcgcacgagctgcgcacgccgctgaccgccatcggcggctggagcgaaacactgctcgcgggcggcggcgaggaccccgaggaggtcatgcagggcctgaccatcatccagaaggaggcgggccgtctgacgcgcatggtcgaggagctcttggacttcgcgcgcatcgaatcgggccgcatgaagctcgaggtcgagaacttcgacctgtcgatcgagctgtatgaggcggtatacatgtatgaaaacctgctccggaagagcggcatccggctgaactacgatgaggacgtcgaggcgaactacttcgtcaacggcgaccgccaccgcatgaagcaggtattcctcaacattctggacaatgccgcgaagtacggcggcgacggcaagcgcatcgacatccgtctggtgcgcgacgggggaaaactcgtcgcgaccgtgcgcgactacggtcagggcattcccgaagccgagctgccgttcgtcaaggagaaattctataaaggctcgtccaaacagcgcggcagcggcatcggccttgccgtgaccgaggagatcgtcgcgctgcacggcggcacgctcgacatcgcgtccgctgtcggcgagggaacgaccgtgacggtcacgctgccgtcggcgaaggcagaggaggcgctcggcatcaccggcgcaccgtccaggaccgaggaagagccgtaaccgcacctataaaaggagaaccatatgtcaaccaagaaaacaaccatcggcggtcaggccatcattgagggcatcgtcatgaaggggccgaaaaagacctgcaccgtcgtgcgcaagccgggcggcgagctggtcaccaagaccgagcccgcgcatcatcagtcggcgttctggcgtctgcccatcctgcgcggcgcgtacacgctgttcaccgccatgaaggacggcatcgtggccatcaactattcggcggagtttttcgacgatgagagcatcgatgaggagccgtctaaattcgaaaggtggctcgaggcgaagttcggctcggaaaagctgaacaggatgatcctcggcctgtccacggtcatcggcatcgcgctgccggtcggcctgttcctgctgctgccgagctttctcggcggcttcgttccgaaggattggggcgtgctggcgcgaaacgtgctcgagggcatcgtgcgcatcgcgatctttctgatgttcatgtggtcggtgtcgcatatgaaggacatccgccgcacgttcgaataccacggcgcggagcacaagaccatcttctgctatgaggcaggggaggagctgaccgtggagaacgttcggaaacagggcaggttccatccgcgctgcggtacgagcttcatgttcgtactcatcatcatcgcgacgatcgtttcgtccatcgtcttttcgatcatcgacatcaccaatccgttcctgcgcatgctcgcgcatcttatcctgctgccgctcgtcgtcggcatcagctacgagttcaaccgctatgccggccgctcggagagcgtcatttcgcgtgcgctgcgctggccgggcctcatgatccagcatctgaccgtattcgagccggatgactcgatgatcgaggtcgcgatcacggccatgaaggaagtcattccggacgacggttcggacgaatggtaaggaggaaaaccatgcacccgtctatgcaccgcaacgagcgcggctcgttcgtttactatacctgtgaccggctgccggtccgccatgcctttaccaccaagttcggcggcgtgagccgcggcgactgcgagagcctcaacctcggcttcaaccggggcgacgagcgggagaacgtgctggaaaactaccgcattctggcggagcagctcggcatggacgagggccgcatcaccatgacaaagcagatccatgacacgcagatctcggtcgtgaccgaggacgaggccggcatgggtctgcatcagccgatggcgtgggagtcggacgcgatcgtgaccgccctgcccgaaacgccgctgtgcggcttttatgcggactgcgtggtgacgctgttctacgatccggcgacccggaccgcaggcgtggcgcacgccggctggcgcggcatggcggcaggcatcctgccgaagaccgtggaggtcatggcagaaaagctcggcgcgaagcgcgaaagcctgatcgccgtgctcggcccgtccatccgtcaggagtgcttcgagaccgacgcggacgttcccgaggcgatggagcgcctgatgggcgagcgcgtgcatccgtttatcgcggaaaagggcgttaagttccatgtagacctgcagggcatcggcgtcagactgctgaccgacgccggactttcgccggaaaacgtcatcgacagcggcatctgcaccaagtgctgtgcggatgaattctggtcgcaccgcgcgacccacggccaccgcggcgtgcagggcggcatcatatgcctgtgagggaacgcggtatgagctggaaaaaacgtgcgctcgcggcggcgctcgccgggctgtgcctgctgtcgggctgttcgctgcccggcagacagcaggacgaggggccgaaggatacggtcgatgtatcggacgcctatttcggccttgcgtggtacaaaaacggcacgctcaacccggtcacggatacggacagcatcaatgccatgctgcgcgaggcgctgtacgaggggctgttcgagctgacggacgactttacgccgcagaatgtgctgtgcgagggctacagcggcgacggcacgaccttcaccttcaccatcaggcagggcgtgaagttctggtcggggcagacgctgaccgcagacgatgtggtcgcgagctaccgcgcggcgatggacagcgcctcctcgccctatcacagccgccttgctgacgtgacgacgctggaatcggcgggcacctataaggtgcgcatcgtgctctcctcgcccaatgcggactttccgcgcctgctgaacatcccggtttaccgcagggggagcgcggacagcggcagcttcgccgacggcaccggcccatatgtgccggtcgagaacggcagtgcgtacacgctcgaaaagaatgaaaactggcacggcggctttctcggcaccatccgccatatcgagctggtcggcatcacccgggcggacgcggcggagtccagcttccggacgggcgatgtgtcggtcatgcgcagctcgcgcatcgcagccgacgacgaaacgacggtcatcggcggtgcggtcgacacgctgcaaacaccgagcacggcgctgcactatatcggcatcaactacgcaaacgaacagctgaaggacgcgaaggtgcgacgggcgctctctgccgccatcggccgccgggcgctgtgcgaaacgcagcttcaaacgtttgcggacccggccgttctgccggtcaatccgcagcagcaggtctcgggcgtgacgctttcgaccgaggcggacaccgcaggcgcatatgagctgctgcacagcgaaacggacgacaaaaaagcggacgatacggccgctcgggacagtgccgtgcagaccgcggcagacggggacgtcaccatctattacgcggaggacggcacgccgctgaccgacgatgagggctattacatcgacgaggacggcgaccgcgtgctgaacgccgagggcgagccggtgaaagacccgtctgcgccggcgcagagcggcgaggacacgcccgcgaccgacgcggccggggagcagatcgtgctgtcgctgcatctgctcgtcaacgcggacaacgccttcaaggtcgccgccgccgcgcagctcgccgcctcgtggaacgccgtcgagggcgtgagcgtcacggtggacgcggtagactacgaaaccttcaccgcgcgcatcagagaaggctcgtttgacctgtattacggcgaaacgcgccttacgccggattttgatctgcggccgctgctgacgcagggaggcagcctgaatttcggcggctaccatgacccggacatggagagaacgctcgccgcggcgcggaaaagcggcgaccggagcgcgctctgcaagcagttcgcggagcagatgccctttatcccgatcgcattcgagcgggagcaggtcatcatccgcaaaaatctcatcaacggcttctcgcctgcgccgtacagcgtatttttcggccaggaaaactggacgcgcgtttatgctgccgagagcagcagtgatgcgcagacggacgaggccgcgcagtaacccgaaagaaaaaggaaattcgaaatgcaggatacacagaacaatcatcgcctgcagggacacctgctcggcgcattcagcgtgctcgtctggggcacgacgttcgtctcgaccaaggtgctgctgcgcactttttcgcccatcgagatcatgatcgcgcgatttgcgctcggctttctcgcgctgctcatcgtcggacacggcctgatgcgtccgcagaaaaaatggcatgaagcgctgttcgcggcggccggactgaccggcgtaacgctgtattttctcatggaaaatatcgcgctgacctatatctccgcctcgctcgttggcgtgatcgtggcggcggcgccgctgttcacggcgctcatcgcagccgcctttctcaaggaaaagctgtcgatctggtttttctgcggctttgtctgcgcgatgaccggcatcacgctcgtgtcgctcgccggtgtgagcgagctgcacttcagtccggtcggcgcgctgctgaccgtgggcgcagcccttgtctggggtgtttactcggtgctcatccgtgtgctcggtcacatgggctaccagaccgttccgctgacctgccgcattttcggctacggcttcctgtttctgctcatcccgacggcgatcgagggtctcccggccggcatcgcggcatggggcacgccggtgcatctggcgaacctgctgtttctcggcctgctcgcgtccgcgacctgctttgtgacatggaaccgcgcggtctttctgctcggtccggtgcgaacgagcgtgtacatctacgcttcgcccgtcatcaccatcatcgcctccgcgctcatcctgcacgagactatgacgccggtgatgtgggtcggcacggcgctcgccctcggcggactgatgctgagcgagaaaaaaacaaagaaatcatgatttcttactccggttgcgcgatagttggttgtgcaaccggagtttttctattatactgagcgcagaaaaggaggaagtgccatggtaatgacactgtatacgatcgttccaacgcttgccgtcatgggcgtatccgtttatgtgctcgtgctgctgatccgggcgctgcggaaatatctgcgcaccgcgcccgtccgggcggaaaaggccgagaccgcgaaaacgctcggcgctgtgctgaagcagcaccgaggggcgtgcaaaatgacgcaggagtttgtcgcggagtcgattggcgtgagccggcaggcggtatccaagtgggagagcggcacgtccgacccgagcacatccaatttgctcgcgctggcgaagctgttcggcatcgacgcgaaggagctgctcgatgagacgaaaaacgcagaatagtaaaacgaaggcaccggtttttgatcggtgccttcgttcttttctgttatttcttctcttctttttcgggcggaacgaggggctgtgcggcctgtgccgcccactcggcctcgcgctttttccggcgctttttcgtgatcacaacggctgtgccgccgcctgccgcgagcagcagaacgaccggccagaacatgacgatgccgagaatgagcgcgcggaccgaatcgaccagaccgcgcgtgccggtctttgccgcctgcgtcagctgcgcgccgaagccgctgccctcgggggtggcggtcagagtctgcacctcatcgagcgtgacggaaaaggtcgagaagccgaccagatcgtcataatgacgcttggagccggtcagcgagtcgatctcatattcgcagtccgcgagcgcgttttcgagcgaaatgatgtcctccattttgcccgcctgatcgagcagggcgagcagacgctcgtgcttggtctggagcgtggcgagccgggtctcgatgtcggtatactgctcggtgatgtcctcgctcgaacgggaggagtagaccacatgtgcgcggtcgccgagctgcgcgtaaaacgtctcgaatttttcctgcggaatgcgcagggtgtagtaggccgagcggctgcccttgtcgccggaaaggctgctcgactcgatgtagccgccggtctcggcggtcagtttttccagatcagcggaggccgcgtcgaaattctgcgtctcaagcgttagatcggcgcgcaggatgagcttggcgttctgccgcacggcggaaaaatccgcagagccgccgtcggcggtatcggcgctctccgcccagccgttcgtatccatggacatatctccggccgccgccgaggcagacgaagcatcgccggagcctgcgccgccgcaggcggaaagcgtgaacagcagagcgagaagcaggggaagcagtcgttttttcataacagacacctcgtttcacgggttgcgcggcggagagccgccatggttttctcttgttacccggttagacgaggaaggcttcgggtcggttcccggatttttccgttttgtaaacaattcttttgcgccgatatagagcagcagcacgccgaacagccgccggagcagggaggtgtccgtcccggcggcggcaaacgaggcgaggagcgaggtcatcgcgccgaacggcacgcagaatttgaccgcgccgcggtcgatgagatggtttttcaggtgggagacgagcgcggccggggcgcaggcgaggaaatacagcagattgatgcctccggcggtaaactgcggcatatcctgcacgagcgtcagccagagcagcagcagcgagccgccgccgatgccgcagccgctcagcacgccggtcagcagaccgaccacgaacgcgctcacagcagcagcaccgcccggatgccgccgtacaggatgagcagggcgaaggcacggcgcagccacagcgtgcgcagccgcccgaagatgcgtccggcgagcacgccgcctgccgcgccgcccagaagatagccgagcgaggacgaaaccggcaggccgccccggacataatacaccgccgccgacagggcgcacagcggaaagatcaccgcgaccgaggtcgcgaaggcctgcttttcctccatgccgcaccatttcgtgaagagcggcacgaggaacaggccgccgcctgccccgaaaaagccgttcgccgctccggcgagcgctcctgtcacagcaagtcttgcatttctgcgcaaaaaatcaccccttccgcacaaaagtgtgcgcggagggggtgaagattattcgtcgatgtcgagagatgcgccgtattcctcgagagcgtttttgatgtcgccccacgaaaaaccgcgtcgctgcagggcggcgaccgccttgtcgacttccttccggtcggaaaggtcgccgtgcagccgcttttcgagcaaggaaagcatctgcggcagggcaggggagaaaagctccatcgcggcgtccgcgtcctcgcgcgaaatgccgcgccgggaaagctcctgacggatgcgcgccgcgccgtagccgcgccgggcatagctgcgcacgacactctccgcgaactgcccgtcggagagcaggctgcgctcggtcagccacgcgagcgcgtaatccgcggcctcctcgtcgtgccccttggcgagcaacttgccgcgcagcattttcgcgctcagcgcacggcaggagagctgctttgcggcggcgtccagcgctgcgcggtacttatcctcgttcattcttcgtcgtcgaggtcgtcaaaatcgtccgcgtcgatcgaaaccgccttggcagacgacggcttgggtgcggcaggcttctctgccggtgcggtcgcgacgctctcggacagcttgacagccgcgcctgcggaatttttggagcgttcctcctcgaccttgatcatgatctcgcgctgtaccgcatcggcgatgtccggatgctccttgaagtactgcttggcggcgtcgcggccctgacccagacgggtatcgcccatcgagaaccaggcgcccgacttgttgaccagaccgtatttgacgccgagatcgaccagctcgctcgtgcgcgagatgccctcgccgtacataatgtcgaactcggcctccttgaaggggggcgcgaccttgttcttgacgaccttgacacgggtatggctgccgatcagctcggtgccgtttttgaggtgctccatgcggcggacctccatgcggaccgaggcgtagaacttgagggcgcggccgccggtcgtgacctccgggttgccgtagatgacgccgaccttttcgcgcagctggttgatgaagatcgcgacgcactggctctttgcgatcgaaccggcgagcttgcgcatcgcctggctcatcatgcgggcgtgcaggccgacgaaggagtcgcccatttcgccctcgatctcggcacggggggtcagcgccgcgaccgagtcgataacgacgatgtcgaccgcgcccgagcgcacgagcgcctccgcgatgtcgaggccctgctcaccggtgtccggctgcgaaaccagcaggctgtcgatgtcaacgccgagcgccttggcgtagaccgggtcgagcgcgtgctccgcgtcgatgaatgccgccgtgccgccgagcttctgcgcctctgctacgctgtgcagagcgaccgtggtcttaccggaggactcaggtccgtaaatctcgatgatacggccgcgcggcaggccgccgatgccgagcgcgaggtcgaggccgatcgagccggtcgggatgtgctcgaccgtcatgccggtgttttcgccgaggcgcatgaccgagcccttgccgaactgcttttcgatctggctgagcgcgttggcgagcgctttctttttgtccgttgccggtgcaaccggctcaagctgctttttcgtagccataaattagcctcctctatggaaaataggggcgcgcgcccctctcggttttcgataagaccattatagcaggatgccgaacggaacgcaagaaaaaatcgaacatttgtccgataaaataaaatggtaaaaattacactccctctggtgagggagtgttcagtctgtcgataaagtttattttcatgcaggaacggcagccgcgcggtagcgcgcatgaaaaagcgtttgcgtagcaaatgcacgagcccgtaggcctctatcctcaaaaatatttaatgagagcaaccgggggcgtgtacctcggttttcgtactctaagagggagaaagtttccgtatgggaactttcggacgtccgtgttttgcgaagtcaaaacacagattgtcg

SEQ ID NO: 12891 - DNA, 15746 bp, Unknown
  gut microbiota DNA sequence
aggtcaccagttcgaatctggttatcagctccatcaaagcatcatcttcggatgatgcttttttgtttgccgggaaacgggaaggggcagccggaaggctgcccctgagcgctgtttaccctcaagtccgctccagataccgcagcgcggtcagtgtatgcagtgcagcgccgcgcggaaggatatcctcattgaatataacctgcggattgtgcatcggtttgccatagtgcgaatcctcctgtgcagtcccggcgccgagaagcagataggcgcagggaagctcgtaggtataggatgcaaaatcctccgaccccatgccgccgtcgcggagtcgatagaccgacgcatcaccgaacagctcttttgcacaggctgtggacaaatcgagtgcaccgtcatcatttttgagtgggggcgcggaagcgagctcacatacttcagctgttccgcgatatgccgcagcaatgccctgcgcaagctcaccgatgcgacggagcaggcaggcgctcagctcgcggtcaaacgtgcggatcgtgccttcaaggaccgcagatgacgggatgatattcggcgcatcaccgccggtgaatctgccgactgtgatgaccgcaggctgtttcgctgcaacctcgcgcgcgacaagctcttcgagtgcaagatagatgttcgcggcgatgtggattgggtcgataccggtttccggcatagcgccatggcagccggtgccgtgaaccgtaacgcggaacagggtgcagcctgccatgaacgtgccttcaccgcacagcacgagcccggacggcgtgccagaatggacatgcagagcgaaaccggcctgaggcgcgggctcgcgcagcacaccggctgcaagcattgccttcgcaccggtaaagccctcctcatcgggctgaaatacgagcttgacggtaccattcagcttgctctgatgcccgcgcagcagcttcgccgcaccgagcagcatcgccgtgtgcatatcgtggccacaggcgtgcatacagccgttctgtgagcgaaagggcaggtcggtctgctcggtgacgcacagcgcatccatatccgcacgcagcagaacgcagttcccggtatccgaaccggtgatttccgcagtgatgcctcctgcgagctccttcggctcgtatcccatttcacgcagccgaccggcaacgtattcccgagtgcgcggtaggtcggcgccggcctcaggggcggcatggagggcgcgtctgtcgctgataatcgtctcgcggagtgcttcggcctccgcaagaatttcctttgctgaaacagtcatggtgatctcctttccggaaccggggaggggaaccgcccccctcgatcctgcaatttcagattttgttttcgtagaaggcggcgtttttgcgttcctcgggcataagctcgatatacagataatgtttgtatttttccttgatgtattcgactgtgtactgaatgtccatgggaactccctttaattgttgttacctcgcgtttctgctttcagtataacggtaaagctgcggaaaagcaagctgctgtgaaggggaaaaccgcactatttgtcaaaaagggtatggtaaacagactggttttatggtatacttattatatccatatagatgaaaagtaaagtgaggacggcaaaacgtcctttttcttttcgtctgcgacagaaaaagaaaaccggcggtgcgtttgccatcgcagggaaagggagaacgcaatgttagatactctttacaacggctttgccggtctggtcggcacgctcaacgatctgatgtacagctatgtgctcatcatcctgctgctcgcggcgggcctttacttcaccatccgcagcaagggagttcagctccgcctgctcggggagtcggtgcgcgtggtcagcgaaaaatcgggcgacaccaaggcggtcagtgcgtttgaagcactgatggtctcgacggcgagccgcgtcggcacgggaaatatcgtcggcgtcgcgaacgcgattgccatcggcggctacggctcggtgttctggatgtggctcatcgctctggtcggcggcgcgaccgcctttgtcgagagcacgctcgcgcagatctataaaaagcgcagcgtcaagggcggcagctacggcggcccgtcctactatatccaggcggctctcggaagccggagtctcggcattatttttgcgatcgcgctgatcgcgacctatgcagtcggctttaacatgctcgcctccttcaacctcatcgatagcatgtcgagctatcacttctatgatacgctcgtcactgcctcgggcgcgcatctcctgccgatcatcggcggcgcgctgctcgcactcctcgtaggcatctgtatcttcggcaacggcaaccgcatcgtcaaggtcacgggcgtgctcgtgccggtcatgggcgtgctgtacatcatcatggcgctcatcgtcatggtgctcaacgccggcatgctgcccgaggtgctgcgccgcattttcgtgggcgcgttcgacttcaaggcgatcttcggcggcgcggcaggcttcggctcgtccgccctcatgcagggcatcaagcgcggtctgtactcgaatgaggcaggcgtcggctctgcgccgaacgcggcggcggcagcagacgtctcccacccggtcaagcagggtcttgtgcagatgctgtccgtattcatcgacaccatcctggtgtgcaccgcgactgccatgatgtgcctgtgcaccggcattgagccgagcgagtcgctcaagggcgctcccttcgtacagacctcgctcgagcagaccttcggcgcggcagggccgtatttcatcaccatcgctctgctgctgtttgcgttcacgacactgctcggcaacctgttctactgcgagggctgcctgaactatatcgcgggccgcacgatctcccaccgacagctgaacgtattccatgcgttcgcctgcatcgttgtctttatcggcgcgcagatgaaattcggtctggtctgggacatcgcagacgtcctgatgggcattatggcgctcatcaacctgccggtcatcctccgtctcggcggcacggcgatgcgcgcgctgtcggactatatgaagcagcgccgcgagggcagggacccggtattcaaggcgaaaaatattgcgctgaaggaaaagacggattactggaactgagaaggagcaaccatgcagaactatgactattcgcgcctgcacagcagccttgtgggtgtaattcaggaagcacagaccaagatcggctacgaccgccacgccatcacgttctattatccggcggcctctctcgcgcatatgctcggaacgaaagaggacgcggacacggtcgagcaggcgcttgccggcttttccgctttcgcgcagccgacgctcggcgcggtcgaggtcgtgcgcgatgatgagcgcttctgcatctatgttccggcggagggcgcggagtacgtccacgaaaaggtgccggacagcggctttctcaaggcgttcctcgcggtcgtgagcggccttgaggtcagcctcgacgatattctcgcggtgttccatcgcttctcggatgaggtcgtctgcgagaaaatcgagggcagcgacgagttcgactacctcgtttacttcaaaaacggcgagccggacggctaccgctactgcatcaagctcgaagaggacggctgtgcgacctaccaccgcttcattcgcgaggattacgaagcgttcggcttctgatacggagaaaagatggagcaaaagacgatcgttctctgtatcgcggcggcggctgtgctgcttgtcctgctcagccttgcctggagcagactcagcgcatggctcgcggtacgcgagctgcgccatgcctatcaggcgcgtccgctgttttccgcgcacgagcgggcggcgtacaggacgctgaaggccatgacggacgagctcggccttgtcctgttcgtcaaggtgcggctgctcgatctggcggagccgcgtccgcatcacagaaagtaccagctctacctcaacaaggtcagcgcgaagcatgtggatttcgtggtgtgcagcgccaaaagcgagcccaggctgatcattgagctggatgacttcacgcatgatacgccctcgcggcaggcgcgcgacgagttcgtggatacggtgctggaaagctgcggctacggggtcgtgcatacgcggaatgttgaccgggacgagctgtatccggtgctcaggcgtctgcggcgcacacgggcagcaggaaaatagaaaagaaaaaccgcggcgagacgaagaaaaaagtctcaccgcggttttttgtgcgcaaaagaagaaaatccccctgtccgcgcggtgctcctgcggacaggggaagggtcatacggcaatgcggcgcgagagaaactgtgcggcggactggcacagcccgagcagcacctcgctggacgccgtatcctccttttcgctgatgaatgcgacgcagccgctgacatcgccgtctgtgatgacgggcacggccgtgacgaggcggtagccgtcgcgcccggagagcggaatatcgggcagactgctttcgccgcgcgcatagatgatacgctgctccatcagctgttccagctccgccgagacgcttttttcgagaacatcctttttcgcgccgcctgccgccgcgatcacggcatcgcggtcgctgatggcgcagctcatgcccgctgtccgggcgagcgcgtccgcaagctccgccgccatcgcgctcatttcgcccatcggggaatattttttgaaaatcacctcgccgtcccggtcggtgtaaatctccagcgggtcgccgctgctgataacactgacatcgaaagttttgtccttctggttgcgggaacactggacaattcggcatttttcggcactttcgatgcctgaattaaaatttacgacgttctcctctgcggtgcagtgcagcagctcgtcgatgtccgcctgcaagtgtacctcgagatggtcctcgaaaacgtcgattttctgaatcatcagctcaagatcgttccgttccatcttcggcttgtgcagcagatcatcgaacacctcaagcgcggtctttgcggtgcggttcgcttcgatgatggtgttgcgccggtcagacagcaggtcgatctggtgcttgaggccgtcgattttgccttgcagctcggtctccatctcctcgtacagttcttcgatcgaggcttcgttctccgggtgcttcatgatctcgcggatacgctgccgcttggtgaccttgagctcctcggtcagctcgtccaaaagttccgccagattgtcggcggactgctcggtttccacgacctgattgtcctcctgcgccagatcggcgttcagctgctcaatcatcgcggcagagccgttcatcacgcggcggatatataggcgcatcagctcgtccagcttgtccacacggatgtggtggctcgtgcagcccgctcgtccgcgtctgtgataggtgccgcaggtgtatgctggcgcgaggtcgggacggctcatcgagaacatcggtgcgccgcagtcgccgcagaccagaaagccggagtaggcgttgtcgtactttttgatgccgcggtagttcgagcgggtgcgcttttcacgcagagcgcgggtggtggcgaacgtgcgatagtcgataatcgcctgatggtggttttcaatcacgatctgttcgccctcatcgcggcgaacatccttgccgttgattttcgcacgggtatatttgccctgccgcagcgtaccgatgtaaaaatcgttatccagaatgccctgtacggtgacgatcgcccatgcagccttggcttttcgcgtcacctgcttgccctccgcttctttgcgcatgcactcggacatgcgcggcgtcggaatgccctgctcggttaggtggtttgcaattttcttgtagccccagccctcattgttgtacaggtggaaaatctggcggatagtttctgcctcggtcggcacgacctcaaactgcttgcggctgttgatgatgtagccgtagggcgcggcgcacagccactcaccgtctgcctgacggcgcttgatgacgtttcgcaccttgcgcgaagtatcggtgaccggcatttcgttgatgagaaactgaaactggatcttcagccagtcgtcatcgttcggaaagtcgatgccgtcaccgatggaaataatgcgcacgcctgcgtcgcgcagatcttccagctcgaccagaccgcgcgagttgcggcgggagaatcgggagaaatcctttatgatgagaatgtcatacctgtggctcatcagtccgcggcgcatctcctgatagctctcgcgctgctcgaacgtgtagccggagcggtcgcgatcctcgaaaaacgtcagcgtactgccggagaagtgcgtctttacgtagtcgtcgataatggccttctggttctcgatggagatattcttctggtcctgctcatcgtcaacggaaatacggcagtagcctgcaatgttaaatgtatcggtcatgctcattctcccttgagatatttctcaatctggcggtcgaactcagaactgttttcgttttggaaatagttgcactgcgtcccatcatctcattttccatttacgttctcctctatctgctccggaagctatgccgcgtcggtcatgatgacctgaacgagctgacggaacttatcaatgttctgcgaagtcatcaccagttgtctagttttgactttcagcgtcttctcgacgacaccagccacgttaccaccccgacgggcgactttctgatttttgtcaaagccttgcatctgctcggtgtctgagacatcggtgaaacgattttggtcatctgctgcccgcattttctcccaaccaccctgcttcttcaattatattcgctattaaatatcctgtatgaataacattgtataccgagccgttcaacattgcaagtggcaaaaaagttaccggagcggaattttgttccactccggtatgcttttcctactgccccaccgttttctgtgcctgcacggctttttcagcggcgcggcggcgattgaagagcagcaggctgcgggtctcctcgtgcaggtcacgcttgccggaaaagaacacagcaacggtatacttagtgcccttgtactgggcatataactcgttgagctgcttcttgaccgcctcatcggtctgctcggcattggtcagtgcgacctcgacgattttgctgggttcgtgaatggtgatcgtcatagcgatttctcctccctttcttatataatatagacgtgatcacggctgcttaatcggattaccgcctgcagcggcagcatttcccgcatttatgctgctttttttcactgaaatagtgttcaatcacgcgtcacaggcatttgtccgaggagataagcgcctgcaaggcgttcaacctcttgagcttgcgacgtaccgccttcttgccgcccgactgggacaaaatgcgcctgttgcgctcaaaatccgccttggcatacagcagcacgcagtgggacttgttgccgtcacggccggcgcggccgacctcctgaacgtagccgtccatcgaaagcggcaggccggcgtgaatgatcaggcggacatccggcttgtcaatccccaacccaaatgcattcgttgacaccatcacaggctttttcctggacatgaatgccgcctgctccgccgagcgcttggcacgtttcattttgccgtggtacttgccgaccggatagtcgcgcgccttcagccatttatacaggtgttttacccgctttacggtcgggcaatatatgatgactgcacccttattgttccattttttcagcgcccgctcgactgcatggaacagcgcagtctcggcggatagcttccgtttccgcttgccggatttaccgcttgcaaggcacttgatagcaatgtgcagattgtcgcggcgcatgggcgtgcggaacaggtctgcgtccggaatgccgagtgacttgcgaattcgggcaacatccttgcgggtggcggtcgcggtcaacgcaagcacctgcggacgctgtgggagcgcccggataaagcctccgattgcgccataggccttgcgaaagtcgtccttgctctgcggaagaatatgggcctcgtctacggcaatccggcggagatccgcagagtgcagtgctttgacaaccgctggattttgcagctgctccggcgcgaggtaaagcagaccaccatgcgccgtcatgtcagccaagaccgcatggtgctcggacggcgacagatcgctgttcagcacagccgcgcgaatccccttgctgcaaagtgccttgacctgatcgagctgcagcgccttcagcggcgagaggacaagcgtcagcttaccctcatcatccatcaccgccggcagctggtacagcaaagatttgccgcccgaagtgggcataaggacaataacgtcgcggttgctgaagattgcttccatcggcgccttctgctggggacgcaggtttgcaatccccaatttcgccagcgcctcgccggcaatcttattctcaatatgattcatactttttcctcctttaaatctcaaaaaaccaagaaacctacaaaccttacaacttttcgtccagaacccagaatccgttaaactgcgcctgtccgaacttgaccggcttggattgccgagccagcaagccggcagcagcggcgcgctttttacacgcgtcatacagcgtatcgtccaagccgactcgggttagcaagcgaagcagagaagcgttggaaaagattagaaaacgctttcccgtttccagaccccttgacggcgtgtatcggaaagccaccgccgtctgctcgtcatcaagcaggtgcgtcgcttcctcagcggtcgccggcttcttgatgatttcgtccttaaagcgactctgatcaccgagcagctcgagcgccttccgcagcgtcttctcgcgctcctcctccgcacgcagctgagattcctgcgactgctcccagccgtcgcaagcagcgctttgtgctgtgccgccggaaggaaagtttatctccagaaaaatctggatcacagctttccgccacacagcaaaagcattcaggcgatagcccgcgcggctgttcatcgtgctgctccagcgccgacgtacttcgcaggcattgcttttttcagcgtgcgagccactgcaatgcgaagcagatcaagatcttcctcggtcaggcactcgattgcaggcggcagttcgatatcgaccgtatcggcacggtcgaaaattgttctgctgcgaacaatcggcacggtactcagacgctgcggcagcacgccgccaaagcagttctggcgatggtagtcatccagcttatccagtagcggcctaagtacggtaccggtcgctgtccgtaggatcacaattcgatcccggcagcctgcccagtcattaagatccgcaccgtcctgcacgatgatctcagcgggaatcgaactgcaggcaggttcttcaaccgttaggtttagtgcacctaatgctgcggaaaattcttgttcgacttgcattgcggcctttttcatcgtaaaattgtatataaaaataggaacatcgtcaccgggccgaaaactccggaactgcacatcgagagccgctgtaatgacggggaacagccacccggcatgctgtttcaacaatgcgcccagcttctcctgatccagcgcctcgttccgccactctgcccggttgctctttaccgcgtccttagccgggtgcaaaagccgaaccgtatactccgcggacgtgggcgtaatgtggtctgcaatcaggcggtacgtttccatctcaccgtctgccagtgcaatattcggcagcgtgaatttgcgctccagcagcggaaccggaatcgcatatacgcggcagccgtccggacggcacaatgccagcaggcggtggcggtacagatagccgttgagctccgttgcctgcacacctgcccagaacgcaaagccgtcaaccgtaatatcataagccgtggtcacgctgccgccgcacagatcaaacagctcgtccaccttaatatatttaaggaacttgcggttgtactttgtcctcagttctgccgtaccgagcgggattacgcagtctgcctggccggctgcaatcgattttgcaatacgagttgcgaaaacggtttttgttgtgttgtttttcatacttacacgtcctttctgttcttattatcgcatttctttcctaaaaaatatcaccgagaaaacttgacgtttttccgaaaagcaccgaactgtaaggaggcgaatactatgttcgatccagcaccggaatatgtcgcggataaacagaaaaataaaacacaggcttacgactttttgataagggtgcgaaacgccgcccttcattacgaggtttatggcgacaatcgaattgagctgataaataaatgctgcgattacctggaaaacctccaggatagactgcatacaaaaatttggccgaaaggccagcgtgaacccctcgaagaatttcaagatgttttccagctgctgatttacgcgattgcagattcgggattcttattcgatagtaatggatactttttagatgaaccggctgcatatcacacggaaaagctcttgtttccgtctccctgggacacatcggtaaagagctatcacgaagttgcattcgcaatgaggcgccgaaattatgcccacttggaactgcaagctattcgaaagcacctggacgagcacaataagcagagccagcagtatgaaacttatgccatgagcgaggagatatctactgcaaatcagacccagtgtattattgatatgatgacacgctgttcaatgcattgccacattgcgatataccctcgagactataccttgaatgaaatccaacagattgctgccgtgcggaacacgatccgccaggatcgcatattaaaaaaggtagaaccttttatgatgtttatgctgttatccggaaaagtacggtgtagtaatatacagagtgcagcagatgtgaaatccttactgaaacccaacaaaacgttatttcagcagagaaacgtagcagaagactgcaaattattttcagaaatcataaaatggtacaatgacaatggtgatatcgaactgaccgatggtcaccgtttattcgacccgtatgcattgatcaatggtttcaagcagttcggcgatttgaagatgactaagcaagaacacgttaatcttgcacatctttgtgaagattgctttagagaacccacgaaaaagaaggaatttgcaggctatacgcaaaaattgcatggtgtcgaaattggtgagatcatgaaagcgatttttcagctgattgacgcacagaatcgttccatagatgatacaatacagcccagagaatggaatgcaacaataaaaaccttgcagaaagcagaaattctgccgttaaatgtgtctcccggattaaagggttcgaaattgttaaacatgatcgggaaaaagtattttatcgagcagtacagctttgcatgggaaacattctggctgatcacgcagtatacaccgcctccgctgtttgactggaaacagaattataccattaaaggctggcctcctcgatcatatgagctgtatgccctttgtgcagagcatttaacaaccgcactcgattttatttacggtgcatttgcggaagattgggaccaactatctttgtatccggaactgcgatttgatattgccaaagtacagcgaatctttgcagatccgaaaaagacagcaccgcttcggaaacagctgctaatcgatatgaggttctggaaaatacaagctggtggtaaaaatttacctcaattgcttgcagacaagtgctggagcgcattcgaagaactatctgcctcctccaaagacgcaaagctgaaaagcctgcggcaatatccggagatcatgaaatatgcaatggcggacgaagtcatgcggcagttatgcgccgaaacttatgcaaaagtatttcacctgctggtgtcgatgaatcagtatctgtggccgatcacctgacgattgatacctttatgccgatatgctataattacctcaccaaagcacgaaaggaggacgccttatgcagtacattttaatgaacaaagacgagctgtgggcgtcgttctcctgcgtgcaggatgaatttggcgaggaaagcgcggttttgaacgagtggtacaccgatctgcgcccgctcggcctgcaatcgctgacggcgtggcttgagaagcgcaaagctcccaagcaccgcaagcacatcgagcagctcttggagcagtacggctgcgttgggctggaggaattccttcatgtgacgcacgcgctgtcgctcaacgatatcttttgggtcaagaatgaggccgaaacgctcggctgggacgaggtttccctatatcggaacgagtttgatgccctcatcgcgcaggcggctttcagcggcgtgatcagcgtggagtccctgtcctctacctcgccggagttcggcacggacggttattacgcgaaatgctgggtgcgcgaaccggacggaatttacctctacaaaggcggcagcgacacctatgagatcgagccgatgtccgagttccttgcgtgccagcttgcggtatgctgaccgatgaaatccggcaggagctcaaaaatctggacggtttccgcttcatgccgcattcgactattgagctgccggaggaacggctgagccggctgtccgaaatcgtggagcggcaaagaagagccattctggcatgatagatttgccgcatgccttgtcggaaacacgattgaatacaaaaaaacagcaaacccgccgagcctcgtatttctggaggttcagcgggttgtgttttagtctttaattttactcgttcggcgtcggctcatcgtccggcgtaatccgaattgccttgctcatttcacggagcaggtcggcgtagcagagctccggcgggtcgtctgcatacttcagccagaaatggtcgtgtgccacgacgccatgcgtttttcggcagatcagcttgggctgatagaacgacagcccaaccgcagaaagcagtttgtctgcgttctggcgtgtgcgcggaaagcagcggtccgcaataaagcggtcgagccgcttggcgttcggtgcggccttgccgtccattccatagagcaggacgggcagacaacggttattcagtacagcgaactgcggctgtccggcgtcatcgaactgtacgcgcacaaccggtatttccttgtagtaaatatcaaaatcaacacgtttcatgcaaaatactccttgatctgctgcaaacgggtgcacagaatgtccatgcagtaagcgcgcatgctgtcggacagcggaagatcgtacagtacactctccgggattgtgtccggcagggtaattccctccggcagacgcgataccagatgcagctgcttggaaaagctcgttgaaaacggcttcgccttgcaggaatacagatactgctctaccggcttgtgttccgcctgcataaagccgagcgcatagccgttgtcaaacagcggtggaaagcggaatgcgccggttgcatcacccagcagaatgccgaagttgttcaagtggcggtcctcgttgcagatcagatagtcgaacagcagcatggtatccagataacgccgcgcgtcgaggccggtcagtttggtgaacagaccaatcaccagttcatagttctccttcgcagatgccgcccactgaaccggcgtatccatgctctcgaccatggtctcaaaggacagataggtttcgccctcgtggcagaaattcggtgaaagtgtaccgagaatagactttccatcgtccagacggatacggcacagcgtatatggaacgacgtcgatatgcagcagagcgccgacccgtgcggcgataacttctgcaatcgagtcctgatattcgcgcccgtggtcgatacgattcgccttgatgtagcaattctgttccggctgataccatttcagcgcgtcgcccttgcttgcgccggataatgccagagaaatgcccggtgtgttttcttggatgtacatatatccgcttcacctgcctttcctatattatatgggcttgatttgcgaggacgcaagagctttctttgccgcacaccggcggtaaaacgtattcggcttcaacccggtctgccgcatagcctcggtggcggtaatttctccggcacgccagcgtgcgactacccgctcgaagttgtcggggagggggagcggcttgcggccagtgtatttgccctgttcccgagcgatggcaataccttcgcgctgtcgttgcaggatatactcacgctccagttctgcgacagccgcgaatacggtaagcatgaatttgccggttggcgtcgtggtgtcgattgcctcctttcggctgacgaattcgacctgcttttcggtcagccgttccacgaggtcgagcaggtcgcgcgtgttgcgggcaaagcggctgatggactcgacaatgaccgtatcgccgcgccggacgtaattcatcatacgggcaagctcaggacggttagcgttcttgccgctggccttgtcgataaacagttcgtcaacgccgaggtcgcgcagcaggatttcctgtcgcgcggtgttttgctcctcggtgctgacacggatgtagccgattttcaaatgcgttactcctttcgcttgtaaaagtgcttttttcttggtatactacaattagagaaaaatatacatcaggaggtgtccaaagtgaaaacctatacacttgaagaaattcgggaaattgtatccagattagctgcgcagtatggtgccaaacgggtttatttgttcggttcattcgcacgcggcgacatgacagaatcaagtgatattgatttacgtatcgacaagggcaatatcaaaggctttcagcttgccggacttctccttgatttagaggactcccttgggcgatcggtcgatctggtgccgacaaccagtcttgaccaacgcttcctggattccattcatgatgatgaggtgctgctgtatgaagcctcttgaccgcaatatcagcgtgctggaacatatcgtgacttattgcgaacagatcgaacaaaccgtagagcgctttggaaacagtgcagagacttttcgcgccgatccgatttaccgcaacgccgcagcactctgcattctgcaaatcggtgaactggttggcaagctgaccgatgaatttcgagcgcagcatccatctattccgtggcgtcagattaaagctatgcgaaatattgttgcccatagttacggcactgttgatccggaaatcacttgggaaattatcaccgatgatattccggacctaaagcaatactgcacgaggattatcacctcggaataaacaaggtatggcaatagggtcgtcctctgttctgctatattgcaaaagagcaaaaccaatcttattgacataactttaccctgtttcgatagggtataccctaatgaaagactcaaaaaagtaccggttcgcgtgagccggtacttttgcgttcagtcgtcatctgacagcagatcagccaataggccgatgaccgtcatcacaccgaggacaattttcgcggcgtccatgaaatcacctccctcagtacgcatataaga

SEQ ID NO: 12892 - DNA, 991 bp, Unknown
  gut microbiota DNA sequence
attatatcactaattgatttgaattgcaacccatatttgcgttttttcgcctttttgagcacaaaattatatttttttcttgacatcccatagttagcatggtattcttaattacagaaaacaaaaaaagagccgatgcctaggaaacatcagctctttgataaacggtatccgccacttggtgcaaccaacaccagcgagcggtaagatctcactaccctgagaccaataacgcgccaaatggcgcataccgcttacttgtataactattatacattcaacaagcggttatgtcaatacgacgcgcgtttttcgacaaaaatcaatttttcttccttgtacgacacattttacttgtgcaacattacgaattttcgatttttagtgcgaatttagacatggtttttcaatcgtctggtgtgagagcatcagacgattttttgtttcttctgcaaaaaaatttgaccatcggaaaggagggaaggcaatgtccgcgaccggctacacgacaatttacaacgaagtcctgcgcgacagcacgctttccctcgacgcgaagggtctgttcgccgtcatcaaatcctttatcggcctgccggattttgcgctgagcaagcgccgcctcggctatgcctgctcggacagcggctacctgctgaacgcggcgtggaaggagctgaaacacaaaggatacttgcagcactatttctcccagtcggaaaatggtgcgttctgccatgtctacaacctgatgcagcacccgtccgcgccggtggatttcgtttattccccgtccatcgaccgcccgaacggcgatgttgtctgcatttccgatgcgcagcgcgactacacgaatatttccaccgccattctgcgcgacaagaccatttccctcgcgagcaagggactgttcgcccttgtcagccatctgatgaaaattcccggctttgttctccgccccgagggaatccgttcgttctgcatggagaag

SEQ ID NO: 12893 - DNA, 857 bp, Unknown
  gut microbiota DNA sequence
ttgcctgccgtatccggcaaagctgcggggattggagaaatacgtccagccggtcacgcactggttcataatctcgttgatctcgcggatctcccattgcttcggctcgtcaaaagcatggttcagcgcctccttgtaaagctgcttggaacagacggtatcgcctgtgtagctgtccagaaacgcctgaatcatgcccgctttcgtgtcctccggcatgaagtccttctgatgttctttgagatagcgcaccatctccgggctgaacgtcagcttccaaccacttgtccggtagatggtcattgcctccgcccatacctgctgcaaataggctctggatgcggcttcatcctccaaaatgtgaacctccgcctgctccggacagacctgcaccggcagaaagcgtcggttaccggagcggtcgaggggcaggaagtccattgcgtttgacgtgccgccgaacacgcattgccgcaatcggtctgccggatgggtttcatacgggattttgtagacctccttctggcggctcagaaacgacttgatttcctcaatactcttggcattggcggttgcgatcatttcggacatttctataatccagtgcccttgcagcttgcggtatacattttcatcgtccagcttccgcagatcgtcggaaaaccactcatccttgcctgccagcaggcgaaagaaggtggactttcccgcgccctgaccgcccaccagacagagcatgacttcaaatttgcagccgggacgaaatgcccgatggatcgcgccaagcaggaacagccgcagcgcttgaaaggtgtactcatctgcttccgctcccagaaaatgatgcagacaaaagc

SEQ ID NO: 12894 - DNA, 746 bp, Unknown
  gut microbiota DNA sequence
cctgaaaagtgtactcgtctgcgtccgcgccgagaaaatggtgcaaacaatagcggatgcgttccgtgccgtcccatgtgaggctgttcagatagccccggacagggtgatagctgttttgatgggcggcgagatcggcggcgtccatgatcttcttctcgcttgtcaggtcgtaattctcttccagatacagccggatgtacttcatatccgtgtcggtcatggatgcgctgtggcttcggtcataaccaatgggcttcacaatatcggtgcggtcggtcagcagattgtatgcaatcgcaccggagagcagcggatcgtgctgaaacaccgtcaggcaattcttgatactgttgcggacgccacctttttccgtggtgtccagcatggcttttacttcttcaatgctcatcggcgatgctatactgcccgcctgcattttgagctgctgcctcatctgcggcggcaagctctgccattcgctgctcaatgttcctcacttcctctccatattcgatcacaacggatgcccgcgcatgtatatccccgcacagcagctcgtccagcagatattcaaccagcgagagcttctgtaatgcttctacaaagcgcggatgatatccgtcctccggcgtttgcggggtatcctccttccagcggcatagctgccggtaatagtccaacagcacacggaaacagtagcgttccatgtgctgataattttgttcctcggtattctgtttttg

SEQ ID NO: 12895 - DNA, 987 bp, Unknown
  gut microbiota DNA sequence
ggcgctggggcttcggtcataaccgatgggcttcacaatatcggtgcggtcggtcagcagattgtaggcgatcgcgccggagagcagcggatcgtgctgaaataccgtcaggcagttcttgatactgttgcggacgccgcctttttccgtggtgtccagcatggcctttacttcttcaatgctcatcggcggcgctatactgcccgcctgcattttgagctgctgcttcatctgcggcggcaagctctgccattcgctgctcaattttcctcacttcctctccatattcgatcacgacggatgcccgcgcctgcatatccccgcccagcagctcgtccagcagatattcaaccagcgagagcttctgcaatgcttctacaaagcgcggatgatatccgtcctccggtgtttgcggggcataatcctccttccagcggcatagctgccggtaatagtccaacagcacacggaaacagtaacgctccatgtgctgataattctgttcgtcggtattttgttgtcgcggcttgctcgtcttgcccgcgccattctcatacggaatagcaaaatcctttgccagcagaattgctgcctccttgctgccgatcccgcgaagccgggaaacgaagtcgatcacatccccggtggcaccacagccgaagcagtaataccggcgatccagtttcatgctgggtgtgctgtcatcgtggaacgggcagcggcacattccgttccgctccacccgaatgccgtatcgctccgcagcctgccgggtggtcacagactgcttgacggcttcaaagatactcaataggcaatgccctccttagcgttctatttcctgctttttctgccgcgtcgcggtgttttgacgctcctgctcacgctgcacctcatagatgttgtaatgaattgcccagagctttttcacggcggcatggagcggtgaaagctccgtctgaatgtctttgtattcctcctccaact

SEQ ID NO: 12896 - DNA, 23274 bp, Unknown
  gut microbiota DNA sequence
cgcacggcggacgaggccgcgccgccgcggcgcgggcagcggtataaaagtccggcagagctggacttttatggggaattttatgcggcctgctgcggcaggcctgtccgccctccttgccgaaggcaagtttgggtggaaatagcgcacgctttgcgtgcgcggcgtctgggagggcgcaagcactcggggaaactcgggtgctttttttagtgtgctgcgaaaatttaaaagtcttgtaattgcaccagggctgtgtttttgctataatatactttgtacgagtgcgtactgcgtgtatcgctcgtttacttcgaattttcttcggtatgcgccggcaggaagggcatactgtttttaaatatatccttatatcaggaggaattttatcatgctgaacaatatcaagggctgcgcagaggctctgcgcgaaaccgccccggaaatagacattctgatcaacgagccgatgcgccgccacacgaccttttccatcggcggcccggccgaccttttcatcctgcccaagacgcgcagggagctgatcggcgcgctcgaggtgctgcgtgcacagggcgttccgatgctgctgctcggcaacggctcgaacattctggtctcggatgagggcgtgcgcggcgcggtcgtgtgcacctccgaggtggacgaggtccgcgtgggcgacgacaactcgctgacggcggaggccggcgcgctcctcagccgcatcgcacgccgcgcacagcgtgccggtctgaccggcgcggagtttgccggcggcattccgggcagtctgggcggcgcggtattcatgaacgccggcgcatatgacggccagatggccggcatcgtcgagagcacggaatatctggacgcagagggcaatatccacacgctgcgcggcgaggagcatggcttcggctaccgccgcagcattttccgcgaccatccggactggaccgtgctgcgctcggtcatccgccttcagccgggcgactcggcggctattctggacaagatgaacgatttttcgcagcgccgccgcgacaagcagccgctcaacttcccgtcggccggctcgaccttcaagcgccccgagggatatttcgccggaaagctcatcgaggacgccggactcaagggagcgtccgtcggcgcggcgcaggtttcggaaaagcacgcaggctttctcatcaaccggggcggcgcgacctgcgacgatatgctgcgcctgatcgagctggtgcaggagcgcgttcgggagcagttcggcgtcgagctggagtgcgaggtgcgcattgtaagataaacgggagaaatcccgctgaacacgggcaaggaggatggaattatgtattttttgatcatttccggcatgtccggtgcaggcaagagccgcgccgtcgcgacactggaggatctcggctattactgcgtcgataatctgccgatcgcgctcattccgcgcttcgcagaggtctgccttgccgcgacggagcggtatgagcgcgtcgcgctcgtgaccgatgtgcgtgcgggcggtgactttcagcagctctttgactcgctcgactccatccgcgacatgggctgcgactaccgcatcctgttcctcgacacggacaccgcgacgctcatccgccgctacaaggagacgcgccgcaggcatccgctgatggacaagggtgtttccatgacggcggcgatcgaaaaggagcgcacgatgctgtccgcgctgcgcaaccgcgcggatttcgtggtcgataccacgggcctgtccgccgccggtctgcgcgagcgcctgctcgccctgttctccaccgagaccggcgcggccttcgaggtcatcgtgcagtccttcggcttcaaatacggcattccgcccgagagcgacctcgtgttcgatgtgcgcttcctgcccaatccgtattacgagatgagcctgcgcgagcgcaacggcaccgaccccgaggttcgtgattatgtgtttcagggcggcacggccgacgtgctcatgcgccatctgaccacgctcatcgacttcctcctgccgcgctacatggcggagggcaaggcgaacctcatcatcagcatcggctgcacgggcggcaagcaccgctcggtcgcgatcgcggaagcgctcagcgagcatctgcgcggccgtgaatacggcgttgtcaccatgcatcgagattatcagagataaggctccggtctgcggagcaccgcagaaatggagtcagaatacatgtcattttctaccgaagttaaaaacgaactgtgcagcgtttccatgagccgggcgtgctgcacccgcgcggaggcctacggcgcgttgctgcacgcctcggtgttctcgcataaggagatccgcctttcggcggagaacgcggtcgtcgtgcggcggctccaggcgcttttgcagcgcgcgttcttcgtggacagcgaggcggaaagctgcggccgcaagcagcagctcatcatcaacgacgcgccgcgcatcggccgcatctttgacgcactgggatatgacagaaaaaatcacatcacctaccacctcaaccgcaacgtgctcgaggaggactgctgcatcgcggcctttctgcgcggcgcgttccttatggccggaacggtcgcgggaccggacaagaagagccatctcgagctcaagagtacccaccagagcctcgcgggcgaggagaccagtctgatgctcgacctcggtcttgcgcccaagcaggccaggcgcgcgagcgcacagctgctgtacttcaaggacagcgcgagcgtcgaggactttctcacgcgcatcggcgcgccccacgccgcgatggagctgatgcaggcgaaggtggagaaaaacctcaggaacaccatcaaccgtcaggtcaactgcgagacggcgaacctcgtcaaggcggcggatgcgtccgcgcggcagatcgccgcgatcaaaagcgtgctgcgcgagggcggggaggaggccttcccggacaatctccgagagaccgtgcgtctgcggctttcctatccgaccgacagcctgaccgagctggcgcggcggttcgatccgcccatctccaagccgggactgagccacaggctgaaaaagataaccgaatttgctgcaaaggagaactaaatggtaccatttgcccatctgcatgtgcatagcgaatacagcctgctcgacggcgcgtgccgcatcgaacagctggtcgagcgtgtttctgacctcggacagacctcgtgtgcgctgaccgaccacggcgtcatgtacggcgtgatcgacttttaccgcgcctgcaaggcgaagggcatccatccggtcatcggctgcgaggtctacctcgcgccgcattcgcgccacgagcgcggctacgtcaacggcgaatggcacagccaccttatcctgctgtgcgagaatatgaccggctacaaaaacctcattcatatggtgtcgctcgcgttttccgaaggcttctacatgaagccgcgcatcgacatggagctgctgcgcgggcacagcgagggcctcatctgcatgtccgcctgcctcgcgggcgcgatcccgcgcgcgatcgcgaacggaaatatggacaaggcctatgagatctgcgaggaatttctcgagatcttcgaccgggagcatttctatctcgagatacaggatcacggcatcgaggagcagaaaaaggtcaatgaggggctgtatcagctcgcgaaggagctgaaccttgagcttgtcgcgaccaacgacgcgcattatctgacccgtgcggacgcgcgcacgcaggacatcctcatggcgatccagatgggcaagacggtcgatgacccgacccgcatgaagttcgaaacgcaggagttctacatcaaggacgcggatgaaatggcggcgctgttcccggagcatccggaggcgctcgcgaacacggtcaagatcgcggagcggtgtcaggtcgactttgagttcggcaagtaccacctgcctgaattcgatgttccggagggctatacctcgctcgaataccttcagaagctgtgcgatgagggctttgcgcggcgctatccggacgatgacggcacggtgcgcgggcgtttgcagtatgagatcgacatgatcgccaagatgggctttgtcgattatttcctcatcgtttccgacttcatcggctacgccaagagtcagggcattccggtcggcccgggccgcggttcggcggcaggctcgatcgtttcctactgcctcggcatcaccgacctcgaccccatccattattcgctgtatttcgaacgcttccttaacccggagcgcgtctctatgccggatatcgacgtcgacttctgctacgtccgccgtcccgaggtcatcgaatacgtcacgcgcaagtacggcaaggaccgtgtcgcgcagatcgtcaccttcggcacgatggccgcgcgcggcgcgattcgcgacgtcggccgtgcgctcaacatcccgtacaacgacgtggacgcggtcgccaagcaggtgccgaacgagctgcacatgaccatcgagaaggcgctcacggtcaacccggagctgaaaaaaatgtatgacggcacgccgcaggtgcgcgagctgatcgacacggcccgcaagctcgagggcatgccgcgaaacgcctcgacccacgccgccggcgtcgtcatcaccaaaaacccggtcgatacctatgttccgctctcgcgcaacggcgaccagatggtaacgcagttcacgatggtgaccatcgaggagctcggtctgctcaagatggacttcctcggtctgcgcaacctcacggtcatcgcggacgcggagaagatgatccgccgccatacgccggatttctccatcgaaaaggtggacatgaacgaccccgcgacctatgaaatgctcggaaaaggctcgaccatgggcgtatttcagttggaaagcgcgggcattactaacgttgtcaccggtctgcggccgcagtccatcgaggacattaccgcagtcgtggcgctgtaccgcccgggaccgatgcagtccattccgcgctacatcgagtgccgccatcaccccgaaaaggtgacgtacaggcatccgctgctcgagcccatcctcggcgttacctacggctgcatgatctatcaggaacaggtcatgcaggtgttccagtcgctcgccggctactcgctcggcaaggcggacatggtgcgccgcgcgatgagtaaaaagaagatgaaggagcttgaaaaggagcgcgtcaacttcatccacggcaacgaggagcttggcattgacggcgcaatcaagcgcggcgtgcccgaagcggtcgctgcaagcctgtttgacgagatcatggacttcgcaaactacgccttcaacaaggcgcacgcggtctgctacgcggtcgtgtccttccgcaccgcctacctcaagtgccactatccgcgcgagtacatggcggcgcttctgacgagcgtgctcgatgtttcggagaaaatctccgagtatatccagaccgcgcgcgagatgggaatttcggtgcagccgcccgatgtgaacctgtcgtatgacagcttttcggtcgcggacagtgacatccgcttcggccttgccgccgtcaagggcgtcggccgctcgtttatgaagcagctggtcgacgagcgggagaagaacggcattttcacctcgttccaggatttctgcgagcgcatgtacgaccgcgagctcaaccgccgcgccctcgagtgcctcatcaaggcgggcgcgttcgactcgatgggctgccgccgcagccagctgctgcgcgtcgcaggcccggtggtcgatgccatcgcgcagaaccgcaaaaagaatatcgagggacagatggacctgttcggcatgggcaacgacgcggtgcaggacacgcagatcgcgctgcccgatattcccgaggtctccaagcgcgagctgctcgcgatggagaaggagacgaccggactttatctgtcggggcatccgatggacgaataccgcgagcttgccgcccgcgccaaggctgcgcccgtgcgcaggatcattgacgacctttcgggcgagagcgcgcagccggtctaccgggacggcatgaccgtgcgtcttgcctgtgtcgtcaccgccgtcaagctcaaaagcacgaaaaacggctcgatgatggcgtatgtgaccgtggaggacgacacagcggccatcgagctcgtcgtattcccgaaggcgctccagcagtgcggcgcgtatctgacggcggacagcgcagtgctcctcaccggacgcatcgacgcgcgcgaggaggaggcgcccaaggtgctgctgaacgaggcgcagccgctgaacgagggcgcggtaaacgcgctcacgactgcggaaaagccggccgcgagcgtattttccgacgcggaagcggcgaaaagggcgccgcacaagctgtatatccgtctcgacagcctgaagggcgtcaaatggcccggcatccgcgcggtgctctcgacctgtcccggcgacacgccggtctatctgtatccgctcgacacgaagaaaacgacgctcgtctcgcgccgcctgtggtgccggccggacgaaaacattttgcaaaaattacgcttcctcttgagcgaggatgatgttataataaaatagaggaaatttggagcatcagcctcggcagggccggatgcttcaggaagatgtagaggggacaggacgacactgcaacagaacagcgccgcccgaaaagctcaaagcacacagaaggaggctttcttttatggaaaagcagattcgcagaattggcgtacttacaagcggcggcgatgcgccgggtatgaacgcactcatccgctcggtcgttcgaagcgcgtcggcaaacgacatttccgttctcggcatccgccgcggctatagcggtctgatcaacggcgatattatcgagatgggcgcgcgcagcgttgacggcatcatccgcaagggcggcaccatgctgtacaccgcccgctgcaaggaaatgatgaccgaggagggtctccagaaggcggccgacacctgcaagtatctgggcatcgacggcctgatctgctgcggcggcgacggtacgttccgcggcgcgcaggcgctttcgcgcaagggcgttccgtgcatcggcgtgccgggcaccatcgacaacgatatcgtctgcaccgactacaccatcggcttcgacactgcgtgcaacactgcgatcgagtgcatcgacaagctgcgcgacaccatgcagtctcacgagcgctgctctgtcgttgaggtcatgggccgccgcgcaggtcatctcgcgctccaggtcggctgcgctgtcggcgcaactgcgatctgcctgcccgaacgtcagctggatttcgacgttgacatcgtagaaaaaatgcgcatcggccgcatcaagggccgcaaccaccacatcatcatcgtcgcagagggctacggctccgcacaggaggtcgcagaccagatccacgaagcgaccggcatcgacacccgcgttaccatcctcggccacatccagcgcggcggctctccgtccgccatggatcgtgtcatggcgacccgcatgggctacgcagcggtacgcgctctgagggagggcaagaccaaccgcgtcatcatctccgacgccaacatagtcaccgacatcgacattgaggaaggtctggcgaagcataaggacctcaaccagtgcctgtttgaagcacagcagacggtcgcgatctgatgggttcggtatttattaccggcggctcgcgcggcatcggtgcggcctgcgtccgcgcctttgcggaggcagggagaccggcagcgttcacgtattccgcgcgtcgcgacaaggcggaagcgctggcggcggaaaccggtgcgctcgcgctctgcgcggacagcgcggacagagacgcggtggaaaacgccgtaaaaacggcgcgcgaaagccttggcgcgatcgacaccgttgtctgcaacgcgggtatcgcgcagcagaagctgtttcaggacatcacggatgacgagtggctgaccatgctgaacgtcaatctgatgggggcggtacgcacgatccgcgcggcgctcccggatatgctgcaccgccagaagggcagcatcgtcatcgtctcgtccatgtggggcgagcgcggcgcgtcctgcgagagccattacgccgcgagcaaggcggcgctcatcggtctgtccagatcgctcgcgctcgagctcgggccgagcggcatccgcgtcaactgcgtcgcgcccggcgtcatcgataccgacatgaacgcgatgcacggcggggacgtcatgcagtcgcttgcggacgaaacgccgcttgaacgaatcggacgcgcggatgaggtcgcggacagcatcctgtatctctgctcggaaaaggcgtccttcgtcaccggacaggtgctcggcgtgacgggcggattttaagctgtaatcaataaacgaaagaccttctcgatattcgggaaggtcttttttgtgtgcgaacgttatgcaaaatattcaaggattccattcatgatgccctgcgcgaagccgaaggggtcggtctcgagccgcagcgcatcctgcgcgttggtcagataggcgagctcgaccagaatggccggcattttcgtgcgacgcaggacatacagccccggccgcacgcgcacgccgttgttccgcgtaccggtgcgctgcacgatgccgttcagcacatgctgcgcgagccagtaggcctgcgtgttttcccggtagacgtagacctcggtgccgttgacggccggattttcgttcgcgttgcagtggatgctgatgaagtagtcggcaggccagtcgttggctgcctgcacgcgcgcggcgagactggttgcattgctcgtgccgaggatctcgtcgggagaggtgcggctgagccgcacctcaaaccgggggtcggcgtacagcagctcggcaagatacagcccgacggtgtaggtgatgtcctgctcgatcaggccgttcccctccgcgccggtattggggccgctcggattgtgcccctggtcaatgaaaattcggattgccataagaatatcacatcccctgacagtctatgcgatgcggcttgacgcggtgcggacggtggtgtatcctaagggtacagggagggatggatatgaatctgtgcatgaaacagaaggtcttttcgtggggcgaccggtttaccgtctgggatgagaacgggaacgaccgctactatgtatgcggcgaggtgttttcgctcggcaaaaagctgcatctgaccgacacgaccggcgcggaggtcgccttcatccagcagaaggcgttttcgttcaggccgcgcttttatgtgtacatgaacgatgttttgcaggccgagatcgtcaaggacttcaccttatttacgcagcactaccgcgtggagggcatggactgggaggtgaacggcaacttcggcgcacacgattatgagatcagcggcgcgcgcggtacggtcgcgtccgtccacaagcagtggttcacctggggcgactgctacgagatctgtatttcggagaatgagaacgagcagctggtgctcgcggtcgtgctcgccattgatgccgtgatggcgcagtcgagtgccgccgcggcgaacagcgcaacataaaggggaaaacagagatgaaagagcttgactgggagtatatcgacgcgctcatgccgcgaagggcggcggagagcagcaaaaacgactacgggcgcattctttgcgtgtgcggctcggcaggatatacgggcgcggcgttcttcgcggcgcagggcgcggtgcgcatgggcagcggcgtggtgacgctcgccgtccccgagcgggcgtggtccgtgctcgcggtcaagctcagcgagccggtcgtgcggccgctcccgtgcacggaggacggcctgttctccgtccgggcgctcccgcggctgctcgagctggcggagcatgcggacgcgctgctcatcggctgcggacttggccgttcggacgaggtgaccgaggtcgtgtgcacgctgctgtgcgaggccgcgtgcccgatcgtgctggacgcagacggcatatttgcgctcgcgcagcataaggatatactgcaccggacggccaagccgctcgtcatgacgccgcacgcaggcgaatttgcccgtctgtcggggaaaaagcagatacagccggaggagctgcgcgcctttgcgcaggaaaaccgctgcacggtgctctacaaggcgcaccgcacgctgatcgccgcgccggacggacggctgttccgcaatcacacgggcaaccccggcatggcgaagggcggcagcggcgatacgctcgccggcatgctggtctcgctcatcgggcagggactcgcgccggaggacgcggcctgcgccgcggcatggctgcacggcgcggcaggcgacagcgccgcgaaccggtacggcgagtacggcatgacgccgaccgacctgctcgcgtgcctgcccggagtcacgcgccgatataacacaagggagtggtgaactgaaacgatggctgcctttgctgctgctcgccgcgctgctgtgcggctgcggaacggacgaaaacagcggcgaggatgtgcgtgcgcattatgagaatatcagcggattttcggcgcatgtaaaaattttatccgaaacagatgattttactatggcgtttgagctggattacgcctataataaagaggatgtcgatgttttcacgatcaccggacccgagtcggtttccggagtatcgggccgcatcgcaggggacagcgaagcgacgctcgccctgcagtatgacgatctggtgctcgacgacgcgcggccggtccggccgggcatgacgccggcggatgctgtgtttggcgtcgtgtgcgcgctgagagatacgccggcggacgaaagctggcgcgagagtgcggacggcacggcgctcaccgtgctgcactaccgaagcgagagcggagacgaaaccatcgaaaaactggtctggctgcgcgaggacaacatgcagccggtctatgccgagcttttcgcggacggaacgcgagagctgagcatccggtttacatcgtatcaggaaaacggcggataacgccgaaaatcaggggatgaagaaaaatgcagccaaacaagcatcgcacctgggcggagatcgacctcggtgccatcgaacataactaccgcgtcatctgcgaggccgcgaaggcgcccgtgctgtgcgtggtcaaggcggactgctacggccacggcgctgttccggtcgcaaaccgtctgcaaagcatgggcgcgccgtatttcgcggtcgcgaccgtgccggaggcagttgaactgcgcgaaaacggcatccaaaagccgatcattatcctcggctacatcgacgccgcggatatggacactgtcgcggaatacggcatcaccgcgccggtctacgacgaggagaccgccgagctgctgtcggcggcggccgtccgcacgggccgcgacatcaccgtgcactacaagctcgacaccggcatgacccgtatcggtttcccgtcgtgggagcgcgaggagaccgttcgccgcattctcgagtgcgcgaaaaagccgggcctcaggagcgagggcatctttacgcacttcgcggtggcggatgtgccgtcgggcgaggaatacaccgagatgcagtacgaccgcttccgcggcgtatgcgagggtctggcggagaacggccttgacctgccgctgcgccactgcgcgaacagcggcgcgatccagagctacaagcagatgcactgcacgatgacccgcgccggcatcatcctgtacggctaccgtccggatgcctcggtgccgccggtgctcgacctgaagcccgccatgacggtcaaggcgcgcgtggtgcaggttcgcgacattccggcgcacacgaccatcagctacggccgcacgtttgagacgggcgagccgacgcatatggcggtcgtttcggtcggctacgcagacggctttctgcgcacgggctcgggaaaggcgcacgttgttctggacggcaggctcgcgcccgtcatgggccgcatctgcatggatatgtgcatggtgcgcatcccggagggcgcgcaggtgcaccgcggcgacgaggtcacggtgttcggcccgggcgcgtggacggcggaggatgccgccgaggccgccggtacgatctcgtatgaggtgctgtgcgcggtcagccgccgcgtgccgaggtactgcatcggttaaaatcgcatagaatgaagcggggaagcaaatctgcaaaattgcatcctcgcttttttctgttcccggctataattttcgtacagcatggggacaataggtttgcacccgaaagggacgcgaatctatgagcggagagtgactgaatatggacagcagcattaaacgcggcgatatttactatgcagacctcagtccggtggtcgggagcgagcagggcggagtgcgtccggtgctgatcgtgcagaacaatgtcggcaaccggtacagccctaccgtcatagccgccgccattacatcgcaggtgaacaaggcgaaaatgccgacgcatatttcgctcggcgcaccgaactacggcctgacgcgggattccatcatcctgaccgagcagatccggacgctcgataagcgccgcctgcgcgaaaaaatgggtacgctcgacgagcgggcgatgcgccatgtggatgaagcactggcggtcagcttcggtctgggcagcgtacagggctgaggttctaacagaaaacgagaccgcgtaccttgtaatacgacggtctcgtttttcttatggggggatgtgtatgcggacggcggtgtattttgaagggcggagggcaggctcgctcgactggcggcaggagtccggcggcgtgcgcgccgtgctcgactgcgagctctgctctgcgtgcatcctgcgcgtttacgcggaaacagagggagccgcgccgctctatgtcggtctgcccgagccgcagggcggcaggctgcgccttgcaaggcgtctgtcggccgaaacactgcggcaggccggatggacagggaaagaaccgctgcgcgtgtacctggccgagcggcaggagcagacgccgcgtgtcgagccggagaaacgtgcgccgcgcaccgagccgccgtgcatcgagccgccgcgtaccggggacgcagtgcttgatgcgctcatcgaggcgggcgcggtcagcgcggtgcggacggagaacggggtctgcctgtcctgtccgttttcgccgcacgagccgttcgccctcgcgccggccttcgtgctgtgccgcgcggagcaggggagagcggtgctcgactggaaaacagaaggcgcagccgaaccggctgcgccctcggaaatggaatgatttttactttacgatagcctttgcttcgaggtagtagcgcttctcgtgcgcttcgcccatggagaaggtcttgcgcggcagcacgccgtcgaatacaacgccgcggaacaggtcgttcttggcgatgtccggcaggatgaagccgaagttgcccttcttctcggcgagcgagacgacaacgtccgcgccgtggataaagtcgatcttgacgtccttgtgctcggcgaggaaggcgtccaggccggtctggatggtcgcgaccgggatggcccatttcgggttctcgacaacgaatacgccgttcttctctgcggagacgaacggatagaagtgtgcgccctcggtctccggcgcgttgtccgcaacatatgccttgcagccctgtgcctcatagaacgcggtgagagacttcagcagctcctcaccgtctataccgaacagtgcgcggtggatcggctcgatgatgatgctctcgtcgtggatgttgacgatctccgcgagcgcaaagcgagccggatggttttcctgctcctcgggggtcagacccttcttgacctcctcccagtatgccttggcggtagccatggagtggttgccgtcaccgactgcgtaggggaggagcgcctgcgcgtccgtgcagccgtacttcgcgttgaaggtctcgcggtcgcacagcgcctccagaccgctctcgatcgcgtcggtgtccttgccctgcggaatgaaccagccggtgatgtggccgccgttctgcatgaggtcggtatcatacagcttggagaaggagccggtcttttcgaacagcggctcgatgatcctgcggtcggggtcgtcgatgaggatcatgatgtgcggcagctcgaggcaggcgccctcgcgcaccttcagacggggcgggatgcgctcaacgaccgtcttttcggtcgggcggataagggacgccgagccgggggtgtactcgtaggcctccagatcgaccgcgagcacgatgccgcggcgcggcgccgagccaccggaccagcgttcggtcagtaccgcgccggcaggcagggtacgcagcgtgccgtcctgcacgtactgctgcatggtcttgtggatgcgctcgatatgggacgcgacgtctgcgtcctcgagatagacctcaggcagggtcagacgcagcgtagacggtgcgtcgccgacgatgcggtcggtctctgcccagtattcgggctgagaggtgtactggtcgcaggcgatgaccgcccattttgacaggtcggtgccctcgcggggcatcatgatttcgggaattcgtgtgcagcgatttgccattgggatagtcctccttacagggataacatatgtttttagtatagcagaaaatccgcgatatggcacagaaaatatcgaatgatgcaacatttttttgagaatgctcagatacacttgacggaaacgacaatataacgtacaattaaggtggtaaaattgtaaggaattacaggaaagccaagacgcatgagagtggaggaagaaaagatatgctgaaaatcaaggcaatcggcgtttccgagggtctcgcgcgcgcaaaggcgctcgtgatccgggacgtcgacctgacggtggtaaaaaatacggtcacggacatcgaagcggagcagcagcgcgcactggaggcggtcgaaaacgccaaggcgcagatcgcggcgctgcgggacgagaccgagaagaatatcggccccgaggaggcggagatctttgacgcgcatctgatgatgctcgaggacccggatttcgtcgagggcatgacgaatgagatcgcagacgagagcgtgtgcgcggagtttgcgtgcatggtcaactgcgagaatttccaggcgatgttccgcgcgatggatgacgagtatatgcaggcgcgcgccgccgacatcggcgatatttcgatgcgcgtgctcaaaaacctcaagggtatcgcggaaaatccgctcgacacgatcaccgagccgtgcatcgtcgtcgcgaacgaccttacgccgtcggataccgcgaaaatgggcggcaagccggtcgtcggctttattacgaagatcggcggccgcacgagccattcggccatcatggcgcgctcgatgggcattccggcggtcgtcggcgcgggcgaaaagctcgacccgatcgaggacggcatggagctgctgatcgacggcgcagccggcgagctgaccgcgcagccggacgaggagacgctcgtgcagttcgcggaaaagaaggcgaaggatgatgagcgccgtgcaatgctcgcggagttccgggaccgtccgggcgagacgagcgacggccgccgtatcatcatcgagggcaacatcggcacgccgggcgatgcggtgcgcgtcatggagctgggcggcgagggtgtcggcctgttccgctcggaatttctgttcatggaccgtcccgatctgccgagcgaggaggagcagttccaggcgtacaaaaaggcggtcgagaccatggacggccgtccggtcatcatccgcacgctcgacatcggcggcgacaaggaggttccggcgctcgatctggaaaaggagcagaatccgttcctcggctaccgcgccatccgtatctgcctcaaccgcaccgacctgttcctcgtacagctgcgcgcgctgctgcgcgccgcccggtacggcgacctgcgcatcatgttcccgatgatctcgtcggtcgacgagctgcgcaacgcgaagcaggtgctccgcgaggcgagtgatctgctcgacgcggagggcgtagactataacccgaacgtcaaggtcggcatcatggtcgaaatcccggtcgcggcggtctgcgcggatgtgctcgcgcaggaggcagactttttctccatcggcacgaacgacctcattcaatattcgtgcgcggtcgaccgcatcaacgagaagatctcgtatctctaccgtccgctccatccgggcgtgctgcggctgatcgccatgaccgcgaaggcggcaggcgagaacggcatcgagtgcggcgtgtgcggcgagatggccggcacgccgggcatggcgagtgtgctgtgcggtctgggcgtgaccaatctgtccatgtcggcgtccgcgatgccggcggccaaggcagaccttgcggcgcattcgtatgcggagtgccgcgagctggcgcagaggctgctgaaaaccgcaagtgcggaggatgcggagaatatcttcgcggagtggcgcggcgaataagcatataacacaggaaagaccatccggaaccgaaaaatgatgtgctccctatatagcgaacagtgaaataaaacactgaaagctatgtagggagcatttttcgcgcaaaaaacttatttcattctccctttgacggggcgcggttcaaaaaaacagcccggatggtcttttttttatgtatagatttctgatagacggcatatactggactgtcagccggagggaggaaggaacatgggagaggagaaaagcgcgcggtataccatcattctcggcgtctgcctgctgctgtgcctgctgatgctcggcaggatgctggtcggacggtcggagagcgaagcgccgccggacggcaccgaaccggtcgagaccgtgcccgaggagcagcaggagccgcagctctcgctcgtgatgacgatgagcgagagtgatctggcgaatttcctgctgcaatatctgccgtttacgccgcgcggccttgcggtaagcatcggggcggacgaaaccgcgtcgatgtccatgagcgtcgacagggcggagctggaggagagcggtctgctcaccggccatttccgcgccgcggcgcagctgctgcccgaacggtgctcgcttgccggtgaatggggcgttcaggcggagcagggcaagctgcggtttacctgtctgagtgcgcagctgaacgatgctgacctcccgcagacggcggcggagcttgtgacgggcgccatggcgaatgcgctgaaccgtaagctcgaagagctgaatgtcgcgccgcagcgccttgcatggagcgacggcgagatagagatctacgcataaaaaaagcaccggcctcgaaggaggtcggtgcagattgttctatcagtcgaagatcacgcggccgccgccctggaaacgggtagcgtaggagccgctgagcgagtcatacttgacgacgtcgccggtgtgcggtgcgtggatgaactggccgtcgccgacatagatgccgacatggctgatcgagtaagcgctgctgccgaagaataccagatcgcccggcagaagctcgtcacgggagacgcgggtcgtggtgtcgaactgcgcctgcgccacgcgctcgatcgagcagaccgtgttcttgtagacgtaggacgtaaagccggagcagtcaaaaccggacggggtgctgccgccgtagacatacggaacgccgaggaacttcgcggcgtaatccagaacggcggtgcgctttgcgctcagaccggagtaggatgccatgttggcggacgaggataccgaagtggttatgtagtcagccttgatgtagccggacttgccgttaaccgaaaccttgtaccagccgttctccttggcgcccagcgtgacggcggtgccgtttgcgagggatgccagaatgttggacgaggtgttcgcctcggcgcggagattgacggtcgaggagcaggataccttgcctgcggcggccgccggagcggatgccgtggtgccggtggaagcggaagagccgccgtttacctgaacatagtccgggtgaacgtagccggtcttgccgttaaccgaaaccttgtaccagccgccgctgacgcccgtgatggtgacggcagtgccgttcgacagggacgcgagaatgctggacgaggtgttcgcttcgcttctgaggttgacggtagaagagcaggtgatcttgccagagccgacggagaagtcggtcgcggtcgtgccggtcaggtaagagccgcttacgtagccttccttgccgtcaacgatcaccttgtaccattcgctgctgttgttcgttaccgctacagtcgtgccctgagagagcgtcgcaatgacgctgccgccgggtgcagaacgcaggtaaagcgaatctgccttgaccttggcctgatacacagccagcgagctggggagcagcatggatgcggtcagtgcaccggaaacgagcagtcgaaacagtgttttggtggatttcataataagcctccgttttttagtcggaaagttgtgcgccgttgagccgcttatctgctgcccagtgcgcggtcgagccagatcgaggcgatgtccatcgcgctccacaggctgttcttctcggttttctttacgatacggtccttgctgcggacgttcgtgccggtctgctgaagctgtacggaaacacgctttgcaaccggaagatccttcatgtcagcggagtcaaggatctgcatcatgatgatatgggagtcactcatcgaaccgtagtagatgatgttgtccttacgcatcagaggatgtcccttgtattccagaaggtcattcttcttactggtggtaggcattttctgcactccttatagtctgtacatagttacaaaatggttacattccaaagttacattacggttacagtataacacgctgatatagctttgtcaaatgttctttttcaaaatgtcataaaagttcgtcaaaaccgcaaaagcaaacgttttcgaccggttttgcgtgataacccggagggtatacgaaacgtaataccggaaaaatgcacagcggaagggttacagatgcgcctgttcacaaaaatgtaacaatctgcttcagccgtccggaggcgcgccgcgctcttcactctttcccgtgtttgtgctacaataaacagaagcaagaatgaagaggagtacggcatgaaatttgctttctttacgctcggctgcaaggtcaacctgttcgagacacaggcgctctcgcagcttgccgccgagcgcggacacgagattgtggacagcggcgcggacgcggtcatcatcaatacctgcacggtcacatcggtctccgaccataaaaatatccgcgcgttccacaggctccgccgggacaacccccgcgcggtcatcgcggcgtgcggctgctttgcgcagatcgacccggagcgcgtacgggcgaccggcgaggtcgatatcgtctgcggcacgcaggaccgcgcacagatcatcgagcgctgtgaagcggcggtgcagggcagagaagcggctctgccgcagggaagcggcggctatgaagctctgccggccggcattccgcagggacgcacacgcgccctccttaaaatagaggatggctgcaacaacttctgcacctactgcatcattccatacgcgcgcggccgggtacgctcgctgccgccggagcaggcgcttgccgaggcacgacgcctcggcgcggcaggcgtgcacgagatcgtgctgacgggtatcgagatcgcctcctacggccgcgaccttgcgccgcgtctgacgctcaccgatctgctcgagcagctgctcggggcgctgccggacatccggtttcgtctcggctcgctcgatccgcgcatcatagaggaagcgttctgcgagcggctgcgcggctttgacaaccttgccctgcatttccatctgtccatgcagagcggctgcgacagcgtgctggagcgcatggggcgcagatatacgtcgggtgagttctatgcgtgctgtgagcgcctgcggcgggccttccccgactgctcgatcacgaccgacctcatcgtcggcttcccgggcgagaccgaggaggaatttgaaaccacgctgcgctttctggagaaatgcgcgttcgcgtcggtgcacgttttcccgtactcgccgcgcgagggaaccaaggcagcggatatgccggggcagctcgataaagcggtcaaaacagagcgagccgatcgggcgaagcgcgtcgcggctgtgctcagcgagaactgccgccgcggctttatcggacgggagcttgaggtgcttccggagcacccggcgggcggtgtgtgggccgcacacggacgctatggctttccgatatatatagaaggggagcaggtgcacaaaaatcagccgcgccgcgtgcgtctcactatcttatataaggatggcctcaagggcgaaatcgttgagtaatgggattgccggcgaaacgtcagcttcgcgacagtcagtcaccaaagcggagccttctccatagaatgaagtgtaagcggtgcggcgcaggagccgcacgctgacaattctgacaggaggaaatacacatgtgcaactcgaacactctctggggcgataactggctttggtggatcatcctcatcatcatcctgatctgggtatgcggcggtcagaacggctgctgcggcgacaacaataactgctgcggcggctgcggctgctgaatcacgcgcggcgctgtcctgtgagaaggggcagcgccgccttttccgtgtgcgccgctccggctgaaaacgcagtttttgtcacactcggaaaaaaatcgggaaaatttcagatttcctcttgccaaagcggaggaagtgtggtattctaaataagcactgttcgggggcgaactctgaacggaaatttggaattatgattttggaggataccgattatgaccgcaggtgaatttcgtaacggcgtaacttttgaaatggacggtcaggtacagcaggttattgagttccagcatgtaaagccgggcaagggcgctgcttttgttcgtgtcaagatgaagaacgtcgtaaccggtgcggttactgagacctcctttaacccgactgcaaagttcgaggaagctttcgtagagcgccgcgagatgcagtatctgtacaatgagggcgacctgtactacttcatggacaacgagacctacgagcagatcccgatcagcaaggacactctgggcgacgacttccgtttcgtgaaggagaatgagaacgttaaggttctttcctacaagggcagcgtattcgctgttgagccgccgctgttcgttgagcttgagatcactgagaccgagccgggcgttaagggcaacaccgctaccaacgtactcaagccggctaccgtagagaccggtgctgtcgtcaaggttccgatctttatcgagcagggtgagcgcattcagatcgacacccgtaccggtgagtatctgggccgcagcaagaagtaaggtcacaactgaaaactggtcacaggggacggcagtccgctgccccctgtatttggacatttagctcagctggaagagcatccgcttgacgtgcggaaggtcagcggttcgaacccgttaatgtccaccagttaaaaacccgtcagaaatgacgggtttttctttgttttacgctgatttgcgttcgtacttcaaaaattgttcctgatttcgtgtgttgcggttttcgtgaaatgcgtgatatacgcgacagaaacaggtgaaaatgataacacgtgtaggaaatgtgtaggacgcgcgcaagggagcaggtggaatctcttaaaatttcatcaactttcactcaatgcggaaaaatggccgatgtaggatttatgtaggacagatgtaggattggaccaggttcgcaaaagacgcggctcaatcggctgcgtcttttgcttcctgcatttctcggatgtcgtcctcggtaacgtggctgtaaatgttggccgtcgtcgctatgtcgctgtggcccatcagatactgcgccgttttcaggtccacgccctggcggcggagattggagcagtaggtgtggcgcagatagtgcggtgtgatggacggatcaaaggcgtgcgtgatgatcttgtttcggtagatctcggcaccggcggcgcgatcacaggcgcggtggaagctcgcccacatccgccgcaggccggtcgcggtaagcattcggccatccttccggtggaagaagtagcgcgattttttatccagcatcgcggcaagctcgtccggcagcggcacgaagcgcacgcctgcggccgttttggtgtccttgagcgtcggctgattgcagtctgacttatattccaccgagcgcgagatctggagcaggccgcccttgacgtcctgccagccgatcggcacggtctcgccgcggcgcaggccgcagtccagcatcagcagcacccacggcccggcgtagtgatgttccgcgaccttgcgaataatgtcttcctcctcgtgcgtcagcgaacggcgctcttttttgcgcgcgaccggcatttcgagatttcggcagggcgaggccacgatcagaccgttgatctccgcctgctcgaagatcgcgcggacgatgtagcgcaactgcgcggccgttccggcaccgagcggcttgccgtcgtccgtccgtgcctcgttgagcagctgctgcacctggaagggcttcacgtccgcaatcgggagcgcgccgatcgtcggagcgatgcgcagccggatgtgcgtttcgtaattgatgcgctgggacgcgccgacgcgcggcgctttgtaactgcggaaccactgccacgcccactgctcgacggtcgtcttgccgggcgcgccgccgcgctcggtcagcgcgcggacctgccgcaccttcgcgtcaaaacgcattttgctgttgtcttggatgtacttccggatcggcttgccgtccgggcggtggccgatgacgatgctggtttggtatttgtagtcaggcatgatgataatctctcctaaggttcggaaaatttgcggaataagaacatttgttcggttaggtggatgaaaatatagcagaccccagaaagggcagggg

SEQ ID NO: 12897 - DNA, 1744 bp, Unknown
  gut microbiota DNA sequence
tcgaccttgatgtcggcctgatccgtgaacgccgcaccggcaaacatagtgaacgcgcaagcgaacgccagtaccagtgcgagaatctttttgagattgcaggcaaaataatcgatttcacggttaaacccgcaatttcgaaaaaaacgttggcttttccgaatttttcagaaaaatcacgcgctccgaaatgatggaataatcttgcagctctcagatttcgatgatcggaatcgcgctcttggcgatagactccttctccacatacggcacgtgcgcgtaaacgtttgcggtcgtggcgatatccgaatgaccgagccattcctgaatctgcttgagggaaaagccctgctggagcaggagcgtcgcgaccgaatgccgcagatcgtgaaaccggatgcacggcagaccggcgcggcggcagacgcggccgaactcgcgggaaatatagtccgggcggagcggcgtgccgtcctcatggacgcagacataatcgctctggtggtaggatttgccgtatttccggcggttttccttctggcggcggcgaagatcggtcagataccgccgcagcgagtccgacagcggcagcgtgcggtagctcgagcgggtcttgacgttatcgacatagagaatccgcccgttcgagagaatagcggtgtggttgatgaccatgcgccgcgcacggaagtcgatcgcgctccaccgcagcccggcgcactcgctccgccggaggccatagcttgcagcgaggacaaacgccgcctcggcgggggactgcaaagccgccgcaaggaaaacattcagctgcgcgcggtcatagacctgtccgcggaatcggcgccgcttgggcagcatgacgttatccgcgggattattcgggatgatctggagcgcgacggcatatttcagacatttgtgcatgatcgagtgaaatttcgcgatcgaggtcggagaaaggccctgctcgaacttaaaattgacgaaatcctgaaaatccatcggccgggcggtcgcgagggtcatcccccgcgcatcaaaaaacggccggatatgcttttcgaaggcataccgatagccgtccatcgtattttggcgcacttgcgttttcatctggccgagccagccgtccataaacgcggaaaaggcgatcgtcgactgttccgagtagcgcagccgcatcagctcctcggggcgcaggataaaatgaatatagccgccctcctcaaaaacgcgaatattttccatgataaaacctcctgaaagtgatgaccgggcgaaaaaaccgcgcgagtcacctttattttacgggaaaacggcagaaaccgacaatatgaaatccgccgcgcggcggcaggcggtgtaatgcggcgtgtaatattacgcttatgttacatctcgcgaaaatccgttgaccgtgggggcgcgctatggtattatacttaacgaaatgagcgaaagctcaaaaaattttataaggaggaatttccccatgaagaatctcaaaaagattctcgcactggtactggcgttcgcttgcgcgttcactatgtttgccggtgcggcgttcacggatcaggccgacatcaaggtcgagaatgaagtcgtggacactctcattgagctgggcgtaatcaacggttacaccgacggttcgttcaagcccaatgacaccgtaactcgtgcggagatggcgaagatgatctacgtgctgcgcactggtaactctgacgcttctgcgtac

SEQ ID NO: 12898 - DNA, 153 bp, Unknown
  gut microbiota DNA sequence
cgctgaagtcgtggacaccctggtatccctcggcgtaatcaatggttacaccgacggctctttcaagccgaacgataccgtaactcgtgcggagatggcgaagatgatctacgtgctgcgcactggtaactctgacgcttctgcgtacaacaa

SEQ ID NO: 12899 - DNA, 573 bp, Unknown
  gut microbiota DNA sequence
cagcagcgccggctctttcatcgagttatcgtagttgtcgacaaaatcaacggtgtcggagtcgatgtcgcggaagagttcggcgcagatgggcgcgagcttcgcctcggtgtatcggctggccgcccacgccatgtcgcgcgaatagaccttgccgaagttgcccttcgagtcgacgaacgggtgcagcagcgcgccgtagcccttggaaaggcgcaccatcgtgtcgtagatcgcggcgtcgccatgggggtttaagcgcatcgtctgtccgacgatgttcgcgctcttcgtgcgcgcgccggtgagaagccccatcttgtacatcgtgtaaaggagctttcggtgcgagggcttgaaaccgtcgatctccggaatggcgcgcgagacgatgacggacatcgcgtagggcatgtagttcgtttccagcgtctcggtgatattctgctccaccacatccgcgtggaggcccatgacgttcgggtccgcgcggcggtgggtctgcttgggtgttttgtcgcttttcttcattcggttacctcaaaatcgctccgacggcaatatggccgccgg

SEQ ID NO: 12900 - DNA, 30993 bp, Unknown
  gut microbiota DNA sequence
cgacaatctgtgttttgacttcgcaaaacacggacgtccgaaagttcccatacggaaactttctccctcttaaagtatgaaaaccgaggtacacgcccccggttttcatgcgtttgcgcagcaaacgcttttgaatgcgcgctgccgcgcgactgctgttttggcgtgaaaacagactttatcgacaggctgagacccacgaatttcgtgggtcctggctttttatacgtgcgtttcgctcttgtgcgttccggtgatggagaattccacccattccgcgatgttggtcgcgtggtcgccgatacgctcgaggtactttgcgatcatgagaacatcgagcacgcgctcgccgtccgtggggttctgtgcgatttccgcgatgaggtcctgcttgcactcgtcgaacaggcggtctaccacatcgtcgtactcgatgacgctccatgcaagcgtcaggtcgcggcggacgaaggcgtccaaactgtcggttaccatcttgatggtcgcctgcgccatctggtcgatgtgggcgttatggccgcacgcgccggacaggcaggtgacgatctcggcgatgtcgctcgcctggtcgccgatgcgctcgatgtcggtgatcatcttgagcaccgaggagatcagacgcaggtcgctcgcgaccggctgctgctgaagcagcagtttgaggcacatggattcgatctcgcgctccttgcggtcgatctcgtggtcgatgcggatcgcagcggcggcgagcttggtgtcgccgtcgatcagggatttcaccgcgctcgcgatcgcgttctcgcacagtgcgcccatcgagatcagttccttgttcagctctgcaagttggttgtcgaaacggtttctcatatcagccgaacctccccgtgatgtagtcctcggtacgcttgtcgcgcggcgtggagaacagcttctccgtatcgtctgcttcgatcatgtcgccgaggaggaagaatgcagtcgtatccgaaacacgagtggcctgctgcatattgtgcgtgaccataacgatagtataatcttttttcagttcgagcacaaggtcttcgatctttgcggtcgagatcggatcgagcgcggaggtcggctcgtccatcagcaggacctccggatcggcggcgagggcgcgtgcgatgcagatacgctgctgctgaccgccggacatggagagcgcggatttgttcaggctgtccttggtctcgtcccagatggcggcgcggcggagcgaggtctcgacgatctcgtcgagcttgacgcggctgcggatgccgtgggtgcgcggaccgtaggcgatgttgtcgtagatggacatcgggaacgggttcggcttctgaaataccatgccgacgcggcggcgcagcaggttgacgtcgcagttcttgtagatgtcctggccgtcgaggcgaatgtcgcccgtgatgcggcagccttcgacgaggtcgttcatgcggttgagcgagcgcagcagggtgctcttgccgcagccggacgggccgatgaacgcggtgatctcgttggccttgatgtccaggttgatgtcgtgcagggcatgaaaatcgccgtaatgcagattcatattgtgaatttcgatcttattttccatgttcattctccatttacttcttggtcagcttttttgctgccagagcggaaagcgtattcatcagcaggaccaccagcagcagaacgacggcggtcgcgttggcctcgttcatgtgcagcgcctcgccggagagcacatacatatggatggcgagcgtgcggccggactgggtgaggccggggatctgcgccatggtgccggcggtgaagatgagcgcggcggtctcgccgacgatgcggccgatgctgaggatgatgcccgacaggatgcccggcacggcggcggggagcacgatgcggaacacggtgcgcaggcggccggcgccgaggccgaacgagccctcgcggaaggaatccggcacgctcatgagcgcctcctcagcggtgcgcatgatgagcggcaggatcatgatggcgagcgtcatggcgccggcgatgagcgagtagccccagtgcagccgggtgacgaagaacagcatgccgaacaggccgtacacgatggaggggatgccggagagcgtttcggtcgtcacgcggatgacgccgacgagcttgttgccgcgctttgcgtactcgttgaggtaaatggccgtgaacaggccgagcgggacggcgagcagcagcgcgagcgcggtcatctcgacggtcgtgacgatggcgggcagcatggaaacgttctccgaggtgtagtgcagggaaaagagcgacggggtgagatgcgggatgccggtcaccagaatatagccgatgaggaacagcagcaccgcgaaggtcaggatcgcggcggcgtagaccagacccttttcgatggcggcggaaacgccgccgcagacgcgctcggagcgcgcgttgtcccggggaacggagaccgttccggcagcttctcttgtcatgcctgtttcctccttttcaggatcgagaatgtcagattgatgatgaggatgaacacgaacagcacaacgccggtcgcgataagcgcctcgcggtgcagtccggtcgcatagcccatttccataacgatgtttgcggtcatggtgcggatgcccttgagcatattgccggtcagacgcggctggttgcctgcgaccatgatgaccgccatggtctcgccgatggcgcggccgatgccgagcacgatgccggcgagtacgcccgacttcgccgccggaagcatgaccgtgaagatcgcgcgttcgtggcgtgcgcccatggcgaccgcgccctcatagtaggcggacggtaccgcgcgcagcgcggcctcggagacgccgatgacggtcggcaggatcatgatgccgagcagcacggacgcggcgaggatggacgagccggagatgtccgcgccgaacagcgcggcgacggtgcggatgcacggcacgatgacgaccatgccgaaaaagccgtagacgatggaggggatgccggcgagcagctcggtgcagggcttgagcaggccgtagagctttttcgggcagtagaacgccatgaagatggcggtcagcaggccgaccggtacgccgatgacgacagcgccggcggtgatgtagatgctgccgaggatcatcggcagaatgccgtaaatgtcgttgcccggcttccactttgcgcccgtgagaaagttcagcaggccgatctccttcatggccggaatgccgttggcgaacaggaacaggcagatgagcacgaccgcggcaattgaagccagcgcacagacgaaaaatacgacgtgcatcagagtttctcgaaagtttttcatgattttactccatacatagggaaagggacgaagtattccgcccccgtgtttccctgttcggttgtcttacgcgaggtcgccccagtcggtgatgtcgccgacgtagatgctcttgatctggtccatggacagctcgtcgatggtgttggccgggttgacgatgactgcgatgccgtcgagcgcgatcgcagtgccggtcagctgggctgcttcctcgtccttcagctcgcgggatgccataccgatggcgaacgtgccgtccatcgcgccggtcatgccggaggtggagtcagaggtctggaggtcgatggaggcgttcgggttgaccgacttataagcctcgatcagcttctccatgaccggagaaacagaggaggagccgccgactgcgatctggccggaggagccgtcggatacgaaggactctgctgcatcgttgactgcgatgtacttgttgtcggtgacaacggcctggccttccttggagaggatgaagctgatgaaatccttggcgactccggtcagctcgcccttggtcgcgatgttgaacggacgggacagcttgtaggcgcctgcctttacgttgtctacggttgcctcggcaccgtctaccttgacagcctttacggtatcgttcagagcgccgagcgagatgtagccgatggccttctcgttgcctgcgacgctggtcagcacgacatcggtcttgtttgcgatctccgcatcggcggtggtgttatcgacctttttgccgtcagcggtcttttcctcgacgccggtcagctcgatgaacgcgccgcgcgtgcccgagccgtcctcacgggagatgaccgtgatcgcgccggaaacgccgctgtccacgccgtccgcagcctgcgtgccggaggcggagctgccgcagccggccagtgcgccggtcagcatgagcgctgccagaagcagggatacacttttcttcatgattgttttctcctttgtcattcgttcattttttcagtacggtaacagcttacaaaagctgtgtaaaatccaaaagaggagctttgtaaaatatatgtaaaatgaaaaaaatctgaaaaagcgtttgtaaaaacgcacaaaaaagagcgcggacttacgtccgcgctcgggtaaagtgctgtgttaaatgttttatgcttttcgcttttttcggaagtatccgaggtagagcacggcggcggccatgctccagaagtaggccatcatgtacggcacctcgaaaatgttctcgaagtagcagtgcaccatgacgccgcacatgccggagaacagggagaccgcgagcacgcgcgtgcggtcggtctcgcagagcctggtgcggccgatcgagcgcaggcaccacagcgacatgccgacgagcaggatgataaaggcgatgaggccgacatagcccatctcgacgagcgtcttgaggtagtagttgtccatgtagaagtaggagaactcctcgttctgctcgatgatcttgttctgcatggcgaccgcgccgccgaagcggccgaggccgaagccgaggagcggattgctctcatgcagcagatccagaccggtcgcccagcgcaccatgcggcctgcgcgctggctcgcagcggcgtagtccgaggtgaacatataggtgatgcggttggcgatggaggggatggcgagcagagcgccgcagccggccacgcccatcagcgcgatcagacggcggtcgaggaagatcgcgaacacgaggaccgcgaccacaaggccgccccacgcgcccttggagaacgtgaagatgcagcacatgcacatcatgccggtgccgcagacggcgagcaccttgacccacattttgcggctgtaatacgccagtcccgcgaccatcggcgcgaacagcacgagcaggctgcccatgatattcgggctgcccgtgagcgagtagacgcgcgtgcgcacgttctgctcggtctgggagacccaggaggccgggataggcgcggcgatgatgaactggtaaatgccgtgcagggcgatgcagagcgccatggcgatgagcgcaccgtagaagatcgcgaagtcgcggtcatcctcgatgagccgcgtgacaaggaagaaccagaacaggtactcgacgacggcgcggtagcctgccagcgcgatagacgggtagggagataccgcgcacatcaggaagaagccgacggcgatgaacaggatgaggtaggcgtctacgggcgtggtgcgcagctggagcggcgcgcgcttcatcgcggtgtgccacagcaggtagcaggccgccgcgagcatgagcatttcatcccagccggaggcgatgaatgagggcagataacccgcattcgcagccagacggataaaatagtcgagcggcaggtacatcgccagacagatgagcagcaggccgcgcatgccggcgaagcggagcgcccggccgacgaagccgtcctcggtcacgcgcacgatggggcgccagacggccagacagagacggtagatgaggctgttctgcacggcggtgccgatgcatacgaccagacggcgcagcgccgcagcgatgcgtgcgtagccgctgttcgccgtcgtgcagggcggagcggcgcagaagcgctcccacaggcggcggaaccgcgagtcggcataggcctcgcggatacgcgcgaaaaagtgcgcgatcgcgccttcgtgataccaggcacacaggcagagtatcgcccgtaccagaagactgttttcaaaaatcgctttcatcggctcattccgcgatatcgaccgagtcgatgttgccgctcgtctcgaagtcgttggtctttacgatgaaggtgcggcctgcgcgaacctcctgcgtaccgatggacggggtagcggtgcccttgggaacggtggtcttgatggtaaatacgatgtccttcttgtccgggtcgaccgcggtgacgatgcggccgtcagcggtggtgacctgctgcgcgtagtcctcgatcttcatgtcctcgatggtgccgttgacataggagttgccgctgacgagctgcttgccgacctggctgttgcgctcgacctcagtgacgaggaacggggttgcgccgcgcacgcggacgatggcggtcagctcgacctgcggctggaccgactccttgatctggggcgcgaacagcttgtagccgacgccggcagcgacagcgacagccgcaatcagcacgagcagatcgacaatgttgatcagaccgaacagcttgcccttttcattgatgattttcataaacttcctccgttggtttcgttttcggatatacatactgtataccgagctattataccataaaggtaaaagaaattccacagaaaacgccgggttttacacggccgtcacagaaagtacaaaaaatcgactgaaccagccgaatttcgataaagtaaaaagccttggagcaccggaaatatccgtacacccctcgcctttagccgcgaacgcttcgctgagcggccaaaggaaggtcgggggagtcaagagggggcaggaaaccatacggtgtcctgccccccttttgcccctgccgtgggaacggcaaagcgcacggcttcgcgtcggaaacgttttaagaaattaagaacggctccactgcgtaccctgacgggtatccttgatggtaacgcccatgtccgccagcacgccgcggatgcggtccgcctcggcaaagtccttggccttcttggccgctgcacgctgtgcaatcagctcctcgatcttctctgcgtccgggtcgactgcgtcgtcgcgcttctgaaccagattgagcacgccggtcagctccatgaacagatcatgcgctgcgatgaggaacgccttagtcgcgtcctggtgtgcgccgttgtaggcgttgatctcgcgggtcagctcgaagatggcggagagcgcatctgcggtgttcagatcgtcgtccatcgcgtcgatgaacttctgcttgtagcccgtgagcgcttcgagcttctcggtctcctcggcggtcatggtgtcgccggatgccttctcgatgcggaattccatgttgtttcttgcctcgtacagacgggcgagcgacgccttgttcatctcgagcgactctgccgagtagttgagcggggtgcggtagtgcgccgacagcatgaacatacggatggtctcgtagccgaactgcttggctgcgtcgcgcaccatgaagaagttgcccttggacttggacatcttctcgttgtcgatggtcaggaagccgttgtgcagccagtaatgcgcgaaggtgcagccgtttgcgcactcggactgcgcgatctcgttttcgtggtgcgggaagatgaggtcgagaccgccggaatggatgtcgatggtcttgccgaggtacttgttcgccatagccgagcactcaatatgccagcccggacggcccttgctgccccacggcgtatcccatgccggttcgcccggcttggcagccttccagaccgcgaagtccatcgggtcctccttgacctcgccgaccgagatgcgcgcgccggcctgaagctcctccatcggctgatggcacagcttgccgtattccgggaaggacttggtgcggaagtaaacgtcgccgttctccgcaacgtaggcgtggccgttctcgatcaggcgctcgacgatgtcgatgatggcgtccatggtctcggtcgcgcgcgggtgcacggaagcctttttgacgccgaggccctgcgcgtcgacgtagtattccttgatatagcgctctgcaatggtgttgaagtcaacgccctcttcgttcgccttgttgatgaccttgtcgtcgatgtcggtgaagttctgcacgaacttgaccttgtagccgcggtactcgaggtagcagcgcagcaggtcgaaaatgatgaacggacgcgcgttgccgacatggaagtagttgtatacggtcgggccgcaggaatacatctttacctcgcccggcgtgatcggaacgaattcttccttctgacgggtcagtgtgttgtagagtttcatggtttttatctccttttagaaatgttctccgccggctctgcaccagcggacaaaattttcacagttattgatggctaaattataatcgctctcgcccagtcggcttttggcacggcggactgcgacctcccgagaataattcaaaggactttccgtttctgaataacggtaaaccgtatgtccttctgcaaattcttcaaaagtagtcaatcgcacatttatatctccgacctctccggcatagtgaattaccttaccatcaccgatataaatagcgtgatgtgtatatgccactccagccactcctgcaccacttcgatataaatgatccgctaactcacattcttctttacttattgcagtcaaccagccttctatccagccatccagcgtaagctttttttctgtttgatctcctgcattagagaagctatcctgtaaattacggtcaaatgttttctttttatccaacgcattgtctactgcaatcgcagcatcaatgttcactttggacaacatatcaacagcaatttcctgtgctttatcatcaaattttcgctgcgcgttcgtcgctgcacgtcgtgcttttctgcacaatatactccatcccggaactaccatattctcattctcctaataaaaagcctcccggggatattgttccctcgggaggcgtaaagacgcggttccactccgatttttcactcgtgcgcgcggtaacgggcgcgttccgcggggcgtttgaccccgatgctcggcaggcgcacttcgccgctctgcgcacagagccctttcagccgggaggctcctctcttttcgcgcgcgaaaaaacggttacttttcctgcgtcatcgcataaataacgattataacgttaccagtatatcaatatccgtcggaaaagtcaactttaattgcgcagcttcgcggcagtccggtttcattgtgcggtgctgccttaaagataatgataccgcgtgcgctgccgccacaggagcgccgccgagacggcggcggaaagaccctcggccgcgacaacggcgagccatacgccgtccagaccgagcacgggcggaagcaggaggaccagaccgccgcgcagcagcagcgaacgcaggaaggagatgaaggcgctcagcgcgccgttgcacagcgcggtgaagaacgccgacgcataaatgtttacgccgcagaacagatagcacagcgcgaacaggcggaagccgtgcacggtgagctgcatcaggtcgggggagtagccgacgaaggccgcgcacagcggccggcagagcgcttcgctcagcacgaccattgcgcccgaggtgatgaatataaggaacatgcttctgcggaacacgtttttcagctcatcgtgattgttcgcgccgaaatgatagctgatgatgggcgcgctgccgatggagaagccgagaaacgccgcgataaagacgaaatcgacgtacatcatgaccgagtgcgccgcaacgccgcgctcaccgaccagccgcatcagctcgaggttatacaggatgccgacgagggacgaggagatgttgctcatcagctcggacgcgccgttgccgcaggcctgcaaaaactcacggatatacagtcctgtggcggtgaggtgcaggccggaacggtgcgtgatgaagaatacgagcgggatgatgccgccgacgcagtagccggcgaccgtcgcccacgccgcgcccggcaggccgaggagctgaatgagcacccagtcgccggcgaagttggtcacgcccgaggcgatggacaggataagacccatgttcggcttttccgcgacaacaaaaaacggctggagcgaggtctggagcatgaaagggaggctgccggcgaacagaatacggccgtaggacacgcaggagtccatcagaatatcgctcgcaccggcgagccgggcgatgggttcgacgaacgccgcaccggccgcgctcagaatgccgccgaaaaggatgacggcaaagacgaacatcgagaaaaagcggttcgccatgtcgggacggccctcgccgagcgtgcgcgcgacgaccgcgctgccgccggtgcccagcatgaagccgaccgccgaaatcagcatcgcgaccgggaacatgatgttgaccgcgctcaggccgatgtcgccgatcatgttggacacaaaaagtccgtccgcgacgctgtacagcgaggtcaggatcatcatggcgatgctcgggagcgtaaaacgaagcagacggccgaaggaaaagtggtctgacagtctgatctgcataaaaacctccgtatgaaagaaatatttttccgcattctattatagtccgaaatcggacttattgtcaagcgcggcttttcgtctcgtgcttgcatattctgcgcggttgcggtatgctaatagcgtaagaaaaaatgatccgaacatggcggcctttcagccgtcccggaaaggaagatcaatatggaaaccagaaagatccctgcacgcgaggacgtcgcagcgcaggataaatgggcgatcgaggacctgttcgcgaccgacgacgcatggcgcgaagcgcttgccgcagcgaaggagttcattccgcgcgttaccgccttccgcggccatctggcggagagcggcgagaccctgctgcgctttttccgtctggacgacgagatcagtcttgcgttcgacccgatcgtgcactatgcacagcgccgcagcgatgaggatacccgcgtggcggcgtatcaggaaatggtcgcgcaggtgacacgctttgcggtcgagcttcagtccgccgccgctttcgagacccctgagctgctcgccatcgacgacgagacgctgaaccgcctgtacgccgaggcgcccgagctggaaaactaccgtctgtgcatcgaccgcgtgcgccgccgccgcgagcatgtgctctcggataaagaggaggccattctcgccgccgcaggcgaaatggcggccagcccggacgacatctattccatgctcaacgacgcggatctcaagttcccggacgcggtggcgggggacggcgaaaagcatcccgtcacccacggcacctatatcccgctcatgcagtcctacgaccgcgttctgcgcaagtcggcgttcgactcgctctattcggtctacggccagttccgcaatacctcggcggcgacgctgtccgcgcagctcaagcagctgctgttctatgcgaaggtgcgcaagtatccctcgacgctcgatgcggcgcttgacagcactgaggtcccgaccgagatctaccgcaatctgatcgacgcggtgcaccgctccttcggtcccatgtaccgctatgtcgagctgcgcaaaaagctgctcggcgtggacgagttgcatatgtacgatctgtatgtcccggtcgtcgagggcgtggagatgaagttcacgtttgaggaggcgaaggagatcgcgctcaaggcgctcgcgccgctcggcgaggattatctcgcgctcatccgcgagggctttgaaaaccgctggatcgacgtttacgagaacgagggcaagcgctcgggcgcgtattcggcaggcgcgcgcgtgcatccctatgtgctgctcaacttcaagggcacgctcgacgatgtgttcacgctcgtgcacgagatgggccactccatccattcctacctgtccaacacccgtcagccgaccgcatatcaggactatgtgatcttcgtggcagaggtcgcctcgacctgcaacgaggcgctgctgatggagtacctgctgtcggtcacgaccgacaaaaaggaacgcgcctacctgatcaaccacttcctcgagcagttccgcggcacactgtaccgccagaccatgttcgcagagttcgagctggaggcgaacgagatgacgcgccgcggcgagggcacgaccgcagacgcgctgtgcgctctgtacaaaaagctgaatgagcagtatttcggaccggaaatggtcgtagatgacgagatcgcgctggaatgggcgcgcattccgcacttctactatgattactatgtttatcagtacgcgaccggctacgccgccgcgatcgcgctgtcgcgccgcatcctgcgtgagggcgagccggcggtccgcgattacctcggcttcctgtcgggcggctgctcggccgacccgatcacgctgctgcgcggtgcaggcgtcgatatggcaagtcccaagccggtcgaggacgcgactgccctgttcgacagcctgatcggcgagatggaagagctgctgaaataaaaaataaaaaaacgcttgacttttgggcgcatactgtggtattatataaaacaatcagcgagaacattgcagacgaaaacatcctgtatgcgccagtagctcagctggatagagtgtttggctacgaaccaaaaggtcgggggttcgaatcccttctggcgtaccagatcaaccggttatttcgtaagaaatgaccggtttttcttattttctgtacaaatagaaatcgaagaaaaaatttttaccgtctatttaccgtccatgcggacatagcaaaagcctcagatattttaccgtctgaggcttttgtttatcttcttttcgatacaagtgctatcaactgattttccaaattatattggatgtcagcttccgtcatccggatcaaaggacgagtcactgtcatcggcagagccttgattgcaataaatatctctgggtattttgcattgttctgcataacttgcctttgtgcagaattgtagtcaaacggttctttcttccattcatcccatgtgtctaaaatatccttttccaaatcagtaagatatggctttgctctcaaaagagcaatcaatatactataatccatcaacagccctcctcgctattcggcagcttgccagactgtgccgccagtttcttttcctgagattttacacgccgctccagctttttaatatcttccgcaggcggcagattctccggctgaataccacgctgtcccaacatatcccgtacggagcgattattctgcacgtgctcaccggtaatatcgcgttctcctcgaagatctttttcctctacattgtagttggtcatttctgctgcaaggttcttcgctgcaatggaaagcgtcggcaaaaaatcagccagtgggcggccgtcctttacgccaagccgctctttcatctcctgtgtcgtataaccgccaaacagcgcttgatcgcctttagagcgaatacggccgaatcctgcgtcatctacaccgcgctcataaatgttctgcgaaagccgcttttccgattctcgcaatctgccgcgtgcctctgtgcgctcaatcagagaaatgcgttcttcgatcagttcctgcttgcgggtctgaacagcgaaatagctctgtgcaaatgcaatttcttcttttttcggatcgccgttctgcgcaatcaaataacaggcatagcgcgtcagcatatagtctttgactgctcgctgtgctccattgccgacagttatcattttcgtgacctcacgaaaatgatcctgcactgctatcccgcttgtttcacaggattcgatagcacgaacgattgctttcgcaaagttctcccatcgttcatatccgaggagcgacatcagatcgcgtgcataccaaaattcaacacctgcttcttgatcgctatgtattacaagatcaaaccgttctttgatttgaccgactctccttttatccattatccatcctccagtgtattcagtatcagctttttcgccttatcttagattcctcttatatttacattatattattcaaagtgagtttcatcaagccaaagaaatcgccgaaaccgtcctgtttcagacaggtttcggcagttttccatgtttttgagcaactacctcgccttaccgtccgaggctgttacccctgctttctgcgcaaaatcacatcagcaaggcattcgctggccttggtgcgctcggcctcgataatatgcgcgtaaatattatccgtcgtgctgacctgactgtggcccagtatattggcgaccgtcaccacatcaatgccgtgcgcaatcaaccgcgatatgctcatcgacagcagcctgctcgggccggacggtacggcgtcgctcatcgaagaggtcgcgtgcaaggtattcaacagctgaggagggcagagcatcatggaaaagaagcaatccgaatttaacaaggtgttcagcgcatgggacatcctcgtcatcgcgttcggcgcaatgatcggctggggctgggtcgtctcctcgggcggctggatccagaagggcggcgtcctcggcgcggcgctcggctttgtggtcggcggcgtcatgatctttttcgtcggcctgacctatgcagagctgacggcggccatgccgcagtgcggcggcgagcacgtctggagccatcgtgcgatgggcccgaccggctcgttcgtgtgcacctgggcgatcattctcggctatgtcggcgttgcgtgctttgaagcgtgtgcgttcccgaccatcatctcctatctgtggccgggcttcctcaagggatacctgtacacggtcgcaggcttcgacatttacgcttcgtggctgatcgtggcgatccttgttgcgttcggcatcatgctcatcaacatcgtgggcgcaaagacggccgccaagctccagaccatcctcaccatcattatcggcggcgcaggtatcctgctcatcgtcgcatcggtcatcaacggtacggtggacaatctggacggtcagatgttcgcagaggtcggcggcggcggtatcgtcaagtccatcctctcggtcgcggtcatctctccgttctaccttatcggctttgacgttatcccgcaggcggcggaggagatcaacgttccgccgaaaaagatcggcggcatgctcatcctgtcggtcgttctcgcggtcctgttctacgcattcgtcatcattgcggtcggtctggtcatgaactcgggcacgatcaccgcttcgcaggccggcacgggtctggtcacggcggacgcgatggcgctcgccttcaagacctcggtcatggccaaggtcatcatcgtcggcggtatgtgcggcatcatcacctcgtggaactcgttcatgatcggcggctcgcgcgccatctactcgatggcggagtcctacatgatcccgcgcgttttcgccaagctgcatcccaagcacaagactccgatcaatgcgctcatcctcatcggcatcctcaccatgctcgcgccgttcgcaggccgcgtcatgatggtctggatctgcgatgcaggcaacttcggctgctgcctcgcctactgcatggtcgcgatctccttcctcatcctgcgcaaaaagcagccggatatgccgcgtccgtacaaggttccggccggccgtctgatgggcggcgttgcggtgctgatgagcggcttcatggtcgtcatgtactgtatccccggctcgggcggcacgctcatcctgccggaatggggcatggtagcggcgtggagcgcgctcggcgtcgtgttcttcgccatctgcaagagcaagtacagagagtccttcggcagcatggttcagctcatctcggacgaggacgcagcaacgctgctcccggaggcggacgagcgcgagctggacaaggtcatcgacggcgcgatcgaccgcgtactggcacggctggcataacgagtgccgcgaaaccggcaattccccgtttttcacagaaaacagcgcagtgtcgggttgttttgcactccggcactgcgttttttcatcatcatccccatattaccccgtatttttgcagaggagtgtttattatgaacgatttcagcttttccgttccgcaaaatatcatggtgggccgcggctctctcgcgaagctgcccgaggccgcaaagcagctcggcggctcgcacgcatttatcatttccggcccgcatctgacaaagatgggtctggtgggcaaggtctctgactcgctgaaggcggcaggctttgcggtcgacgccttcaccgagaccgagggcaatccgtctacggatacggtcgaaaaggcggcggcggcctacaaggcgtcgggcgcggattttatcgtggccttcggcggcggctcgccgatggatgttgcaaaggcggtcggcgttgtcgtcaaatacggcggcaggatcgaggaatatgagggcgcgcacaaggtcccgggcaagatcgtgccgctcatcgccatcccgaccacggcaggcaccggctcggaggtcacggcgttctcggtcatcaccgaccacaggcgcgactacaagctgaccgtattcagctatgagctgctgccggcctgcgccattctggacgcggagctgctgacctcggcgccggcgagcgtcgcagcggcctgcggcatcgacgccttcatccatgcggaggaggcctatgtttcccgcgcggcgtcgccgttctcggacgcgatggcggaaaaggcgatggagctgctcggcggcaacatccgccgttttgtcgcgtgccgcgaggacatcgaggcggccgagaatatgatcgtcggctcgctgttcgccgggatcgcgttctcgttcgcccgtctgggcaatgtccacgcgatgagccacccgatcagcgcgtacttcgacgtaccgcacggcgtggcaaatgcggtcctgctgccggtcatcgcggagtacaacgcgctcgccgaccacggccgctacttcaagatcttcaattacatcagccccttcaaggtggacgcgggcgaatttgagccggggctgctgccgggtgcgatccgcgagctgtgcggggagatcggcatcccgaacggcatcgtcgaggcggtgaacaacgcgagccggaacggcccggtcagccgcgaggcgatcgaggagaagatcgaggcgatggcggcggacgccatgaagagcggcaacatcgcggtcaatccgcgcgcctctcgccagagcgatattgaagtgctgtaccggagagcgctctaaaccgcacctccggcgcacggaaacggagaaaatgacatggattatctgtcccataatatttcgatcaatttaagacgcatccgccagtccaagtcgatgagtctggagcaggcggccgagcagaccggcgtgagcaagagtatgctcgcacagatcgaaaagggcacggcaaacccgtccctcggtgtgctcggcaagatcacgagcggtctgcgcatcgagtttcagcgcctgatcgagactccgagggaggatttctgcctggtgaagccggaaacgctcgtcccgaccaaggagatcgaggggcagtaccgtgtctggacctgctttccgtatgaggatacccggctggtcgagatctaccgcatcgacgtcgagccgggcggcgtgtacatgagcggcgcacacggcgaaaacacgcgcgaatatctgaccgttacggacggcgagctgaccgtggagtgccgcggccatgtgcagcgcatcgggcggcaggaggcgttcaaattcgagaccgatcagccgcatatctaccgcaacgagggcagagagcgcgccagctgcttctgcttcttcctcgactacaaataaacacaggctttatcaacagcctgtggataaaacctgtgagaaagccaaaggctccatccaagaaacgggtggagcctttttgcgtgatttttactttgcctgcgcggtgatgatgcggatgcggccaccgccgcgatcatgaccagctttttcagcttttttcgtctgcctttctttccggcagaggccggcgcaccgcctgcggcgtcggctgcgtgaggtcggctcgcaggccgtcatccgggcggagagcggcatcgggtattacctacagcctgcttgaaaaaatacacaaaacagcaagctgaaatttgtgcagcattttccggaattttctgttaccttctgtgtccctcaatcgtcttatcggtagaaagcacaggctgactgcggcggacgcatggggcgtacaggatagagagtgcagaacgatgtccgccgcgcgagtcagaatatgcagaaaaaaggacctgtaatgcggatttctccgtttacaggtcctgattatttccttaaggcaacaccgcacaatgaaagctgcggcgctttgcggaaattttgtgccctgacttcgtttcgatttcacggtaatacatcaagtattaccgcaaaaccgcgcctcgtcagtacgcaaaatttgctcgcaaatcgctcttgttcaattgtacggtattgccttaaataccgcgctcgagcaggcgctgccgaacggcggaggccggacgagcgagcgtttctgcgatctcctcggggtgttgtccctcgcggcgcagctgcgcaagacgtgcgtcctcctcgggcgtccatggtgtatggcgcagcacaagctgacgggcggcctcgtccagaatgtcgtcgagcgcatccatgataaaatgctgcgcggagagcgtgtaaagcacggctccggcgccgggttcgaccagaataccgacctcgccgccgctctgtgtcggcaggtaggcgtactcgccgcggctgtccggcatccacgcgagcagaccggcgtcagtcagccagtcgagcaggggcgagacggaaagcggctctgtgttctcgggttcgagggcgtgaatgcgctgcacgacctcctctacgggaagcggtcggtcggaataggcgaaatccgcgcggcggttatagggtacggccggcggcagccggtgcttcgcctcgctcccgccggcaggggcggctttggtgcggggcgcaggcttgatggaggaggcagggcggagcatggcggcgagctcgggcggcaggctgcgcggcccgttctgcgcaggagccgcaggcgtgtttttcggcgcggcaggctgcggtttttcggcgtgcggcgcactgttcgtcacgaccttgtcgagtacctccgcgacaaaggcaaagcagcgcgacatacggccgttccggatgaggtcgccggctgcgaccggcgttccgtcgagcggattgatgccatgcgacagcttttccatatacatttgtgcgcggcgtatcatatcgagttcggtcatgctgtgcctccgtaaattacaaggataatatctttatcttagctcatactgtccgctggtgcaagcattttcggaaaacaaagcaggcagagcgtgagctctgcctgctgaaatgatttctgctgtgtgtttagaatacagttacaactgcgcccttgtaggtctcgtcgacgtacttcttgacgtcgtcgctctgcattgcctttttaagagcctggatcttgtcgctgttctcctcgccgctgcggcaggcaacaacgtttacataaacctttgcgtagtccggattctcggtgatgagggagtcctcggcagcgttcaggtcagcctgaagtgcgtagttgccgttgatgactgcgaggtcgacgtcagcgagcgaacgcggcagctgctctgcggcgatctcctgaatgtcgaggttcttcgggttctcggtgatgtcgagcttggtcgcgtcggaggtcgggtcgatgccgtccttcagcttgatgaggcctgcgtcctgaagcaggagcagcgcgcgggtctcgttggagccgtcgttcgggatggcgacggaagcgccgtccgcaagctcctcgatggatgcggttttgccggcgtagatgccgaacggctcgtagtgcatatcgaacgctgcggccagatcggtgccgttctccttgttgaagttgttgaggtacggggtgtgctggaagtagtttgcgtccagatcgccgtctaccagcgcggtgttcggctgaacgtagtcggtgaactcaacgaccttgagggtgtagccctcagcctcgagcgcgtccttggccgcgttcaggatctcggcgtgcggggtcggggtagcgccgacggtgatgaccttgtcggagtcgccggtgtttgccgctgcgctgctgtcagaggaggacgtgctgccgccgcaggcggtcagagcggacaggcacagtgcgcctgcaagaattgctgcaatggattttttcatggaaattcgctccttttcagatatatatcataatttttatgataacagaattaacgattgcgcttgtccagatgatgcgcaaggcgcatgccgacctcctggaagatctgcacgacgacaacgatgatgatgacggcgatgagcatgatagggaagttgtagcggttgtagccgtagttgacggctaccgtgcccagaccgccgccgccgatgaagccggccatcgcggagtagccgaggatggtgacgatggagatcgcgccgccgaccatgagggagggcttcgcctcggggacgagcaccttccagacgatctgccacggacttgcacccatggactgcgccgcctcgatgacgccgaacgggacctccttgatggaggattcgaccatgcgcgcgacatagggcgcggcggcgaacgtcagcggaacgaccatcgcggtggtgccgatggccttgccgacgatggcgcgcgtgatcggggtgatcatgaccgcgaggatcaggaacgggatcgagcgcaggatattggtgacgatgccgagaacggtgttcagcacgggcatcgggcggatgccgttcttgtcggtcacgacgagcgtcagaccgagcggcaggccgatcagataagagatggcggtggacaggatgaccatgtaaagggtctcccaaaggctctgcgcccagacattaaacggcagcatttgcgtctacctcctccgtgtgtacgttctgcgtttccagataggcaagggcgcgcttggcggcgcgctcgtcctcgggcagttgcaggatcatctgaccgtaggcctttccgtcgatgttcttggtgtccgcgaacatgatgttgaccggcgccttgcactcgagcaccatattggagacgatcggctcgaacgaggaattgccgtcgaatacgatgcggcagtagcgctttccggtcgcgagggcgcggcgctttccgtccggatagatgagctgctttgccatggcggactgcggacgggtgaaaacgtcgtctaccgcgccgacctcagcgatgcggctggagtcgatgatggcgacgcgctgacagatctcctcgatgaccgccatctcgtgcgtgatgacgatgatggtgatgccgagggtccggttgatctccttgagcagggcgaggatcgagcgggtggtcgtcgggtcgagcgcgctggtcgcctcgtcgcaaagcaggatcttcggactggtcgcgagcgcacgggcgatggcgacgcgctgctgctgaccgccggagagctgagacggatagttgcccgcgcggtcggagaggccgacgatctcgagcagttccttcgcgcgcttttctgcgtccgccttgctcgttcccgcgatctcgagcgggaagcagatattctggagcgcggtgcgctgctggagcaggttgaactgctgaaagatcatgcccatcgagcggcgcgcctcgagcagctgctttttcgagagactgccgagctcctgaccgtccacggtgacggtgcctgcggtcggcttttcgagaaagttgatgcagcgcacgagcgtggatttgcccgcaccggacagaccgatgatgccgaaaatttcgccgcggcggatgtcgaggtcgatgccgtcgagcgccgtgaccttgccggctctgccggtgaatgttttgttgagacttcggatgcgaacgatagcgtcctgttccaagttcattcctcctgacatgaaaaatgtgttctgaaaaaataaaagcggaaagcctttttcctgctttccgctcgttttcctgtttataccgcgccgcatgacaagcggcccgtctgcgccgtgctctcagcggagccttctggcagaaaaacgagcaaaatcacgcatcatgcacatggacattcgagatacggtcatagtgattttctcctttttctacagcttcgataaaacttagtatagcccgttgccggcactttgtcaacccctttctcgtcacgcatggacggcatcaccggacggggacagagatttaccgactgtgcggtttccgtgcagttttgcgcggcggtgtacggtaagaacacaatatctggtagattgtatccgtgctgacattgaatgataacaggatatatgttatactgaagacagagaaagagaacaggaggagataacatggatctggcggatttttttgcgatcgacagactttccgaacatgatgaagagacactggtcgagtctgcgatgcagcttcagcaggttatgatgctgtatgagtccggcattcgtgagatcaagaccaaactggacattctggcagacgagtcgcgcatttcgggcaagccgagcccgatcaacgcgatcaagagccgcatcaaaacgccgcgcagcatcgtgggcaagctcaagcgccgcggctttccggtgacgcttcagtccatgatggacaacctgaacgacatcggcggcatccgcgtgatctgtccgttcattcaggatatttataccgtagcggacatgctcatgcggcagagcgatctgacgctcatcgagaaaaaggactatatcagcagtcccaagccgaacggctaccgcagcctgcatctgatccttgaggtgccgatctttctgtccgagcgcacggtcccggtgcgcatcgagcttcagctgcgcacgatcgcgatggatttctgggcgagcctcgagcatcagctgcgctacaaatccgacgttgaggtgccgcccaacctgtcggatgacctcaagcactgcgcggacgtcatcgccgagaccgacgaggacatgcagcgcatcgcgaaggatctcggcgtccttcgttaatccctgtttcagcgaaaggaaaaccaaatggaactcattcccgtcatcacactcgcactcgtggccgttctgctcgtgctcgttatcatcctgctcgcgcgaaagccggtgcagccgccgaaaacgaccgacagcggcgcgatctctgcgctcggcgcgctcgtcacgcagaatctgcgggagggccgcgaagcacaggacagccgccttgcggcgatggaccggtcggtctctggccagctcgaccgctttgaaaaacgcctgcacggcttttcggtcgaaacttcgcagcagcttgacggcatccgcgccgccgtggacggcaacctgcgcgagctgcgcgaggacaacaacaaaaagctggacgaaatgcgcggcattgtggacgaaaagctgcaaaaaacactgtccgaccgcatgaacgagtcctttcgtctggtaaatgagcgcctggagcaggtctatcgcggtctcggcgagatgcagacgctcgcacagggcgtgggcgacctcaaaaaggtgctgacaaacgtcaaaaaccgcggtatcgtgggcgagatccagctcggcgcgatcctgtccgacatcctcgcgcccgagcagtacgcggaaaacgtcgcgaccgtgcccggcagccgcaacgttgtcgagttcgccgtgcgccttccggcggaggacggcggcgcggtctggctgccgatcgactccaagttcccgggcgacacctacggcgcgctgcgcgatgcctatgagagcggctcgcgcgagcagatcgacgcctgcgcgaagcagctcattctgacgctcaggagcgaggcgaaggacatccgcgacaagtatcttgcaccgccgtataccacggaattcggcatcatgttcctgccgtttgaagggctgtacgcggaggcggtgcagcgcggcatggtcgagatcctccagcgcgattatcatgtcaatatcgccggcccgagcacgatggcggcgctgctgaacagccttcagatgtcgtttcgcacgatcgccatccagaagcgctcgggcgaggtatggaacgttctgggcgcggtcaagaccgagttcgacaagttcgagacctgcctgacgcagacgcagaaccgtctcgatcaggcgagccgcgagctggacaagctggtcggcacgagaacgcgcgccatccgccgccgtctcaagagcgtcaccgagctctccgaggcggaaaccgagcgcgtgctcggcgcggcggaggacgacgagccgacttcataaaaaattaagaaaaaattcacggttttgtgagggaaataacagggactttcgaggtatactgtaggtacaagggatagagaccaccgcgcagtgataaaagggaggaattatcatgaaagcaaatacccgtgaaggtctgttcgcattgctgcaccgcctgctggcccggctgttcggcccgatcgaacgcggcaaataccgcgtctgaattgtgaacttattgcaaacaccgctctgccgaccttgcatgaggctgcgcagagcggtatactatattccacacaaaacggacagcaggaaaggcaggcgaggcactatgacagctgctgcattttttgaactttttcatcagtacggactgttcctggtctgcggcgtgatcttctgtgaatacatgaatctgcccggctttccggcgggcgtcatcatgccgtgcatcggcgtgctcatcgcacagagtagcctgtcgctgccgctgacgctcgtgctgagcgttgcttccggactgctcggcagtctggtcatttacggcctttgctactggggcggcgagccgatcatggaaaagctgttcggaaagagcaggaaattccgctcgttcgtacagaaatgccatgaattcatcgacgcgcagcatggacgcggacttgcgctctgccgcatcatcccgatgctccgcacgatcgtttccattccggccggtctcatccgtatgccggtcaagtggttcatcggctggtcgaccatcggtatcgcggcatggaataccgcgctcatctccgccgggtatctgttcagcgacaggatactcacgctggtgatgtgagacagtcaaaataaaaacaggtgtgataccgtatcaaacggtgtcacacctgtttttttggcagcgttgcagctttgattgtgcggtattgccttagtttcgaacgatgagcagccacgagtcggccctgctgtcgagcgtcagaccgatgtcctcataggcggtcacggtgcagccggacttttcgagcgcgttcagtgtgttctgaagcgtagacatattgttgtcgagctggaaccatgccgcgctgctgtctgaatacagcagtttgccgtcaagctcgggcagctcgccgccgtctgcgatatagcagtgtgcgatgcgcagcccgcgcaccgcctcggggagcgtgagcgcgccggtgtcctcggcgggaacgatgccggcagagtcaccgtccgagatcgcgcggccggatatgccgccgctctgcgcggcgatgctgctgtcagcctcggggagggagaagacagagggcgtatcctctgctgccgtctgcggcgcggtctcgcctgacgcgctgccgcctgcggcaatatcactcgtgccctgcacggtggtttcgggaatgctgcgtgatgcgctgttcatgcccgcattttcagccgcctctgcgatatctgcggcggcgccgtcggacgccgcgcctgcgtcgtcggaatagctgtccgcagtcacagcggccaccgcgtcaccggcgtctgccgacgcaccggagctgccgcttccgaccgtgctgaacgacggcatcagaccgccgccgagcacaacgagcacgactgccgcagcaacgccgaccatggtgaacaccggcatgcggcgcaccggcttttccggctgaacgacgtgcagcttggtctcctgccgcagctgctccatgatcccgtcatggaggctgtccggcgcctcggcttcctgtgcaaagagtgcgcgcatctccctgagatcacgcagcagcgcggcgcacgaagggcactctgcaagatgcgcctcgagcttttcacgttcgctgtcggtcagcgtgccgtccacgctgttcgagcagagctgtccgaaatattcttcatcattcatgcgtctcgcctcctttctcatggttagacggagcgagcggcagaatgttccctctttgcagcaaaatcctgcgcagggcaatgcgtgcgcgcgcaagccgcgattttaccgtaccctcgctgatctcgaggatttctgcgatttcggaatagctcatgccggaaacatcgcgcagcagcacgatgcggcggtgctcctcgctgatctcggcgagcgcggcggcaagctcgcgccccagctccttattgtcgagctgctcctcgggcgtgggagcagtatcgtggatgggacgctcctcatcatcctcggtcgtcagcgtcgtggtctgcggctgcgtctgtcggtggcgcgcatgatcgacgcagatgttcatggtgatgcggaacagccaggtcgaaaagccgctgtcgccgcgaaaattctcgatcgaacgccacgcacgcagaaaaacctcctgcgtgatgtcggcggcgtcctcgggattgccggaggagcgcagcgcaatgacataaacgcgcttttcatagcggcgcacgagctcctcgaaggcgtccagctcgccgcggcgcgcccttgccagaatatgcttgtcgtccaaccagtgctccctcctttcgggtgtcattcctcagagacggtctgtttgagctcctcgacgatctcgtagagctgctcgagacgttcgagggcgcagatgcggcttttgaaggtcttgaggccgctctgctgcttgagatagcagttgacgtgccgtctcgcctcgagcatggcgatgtgctcgcccttctgcgcggcggcaagctcgatctgccgcacggcagtatccatgcgctcggcaaacggcggcaggggagggcagacgccggtttcgagaagcgcgttcgcacgttcgaagatccacggatcaccgagtgcgccgcgcccgatcatcgcgccgtccgcgccggtgtattcgaggatgcgtaccgcgtcctccgggacggcgacatcgccgttggcgatgacggggatggagaccgcctgcttgaccgcacggatcgcgtcccagtcggcccggccgctgtactgctgcgcacgggtgcggccgtggaccgcgatggcggctgcgccggactgctccgccatacgggcgaattcgacgcagttgacgcttccctcatcccatcccttgcggaatttgacggtgacggggacgttcacggccttgacgaccgcttcgatgacgcgcgaggcgagcggcaggctgcgcatgagcgccgagccgtcgccgttgccggcgatcttcggagcagggcagcccatgttgatgtcgatgatgtcgcagccggatttttcgagcgcgatgcgcgcgccctccgccatggtctccggctcgtgaccgaagatctgcgcggcggccggatgctcgtccggcgcaagctcgagcagacgcggcgttttcctgtcctgatagcacagcgccttggtcgagaccatctcggttacggtcagagccgcgccgtgctcgcggcagatgcggcgaaaggcgaggtcggtcacgcctgccatcggcgcaagtacgagccgtccgtcaatttttaccgttccgatctgcatagtgtccctccagatttgatttacggtttattctaccataacatcacagggaatgcaacttgcagaatggtaacagagcggaaatggacggatttttctgggaaaatgcgtgaaaaacgtcgaaaatcccgtgaaaagtgcggaagataaaacgcagaaaaagaaaagcgccgcgcgaggccatacctattatatatagagcgccgccggatgccggagggcggcaggagatgggctgtcagactgcacaaaaatttctcgtaaatttcgtgaaatccccttgacagaatgctgaggatatagtaatatagttaaggttctgcgagagacaccgcagacaacgcgatgatgccggagattgctgctccaggaagcaggtaacttcggcggagtaggtccgacaatcgggcggttgagataactgctatcagctgaggtgcagggcctcggcaaaacgcaatgttcctgcgtaaattcgggactcgcggcagatgcgccgcaaagccgatggcacgaaccacttacgtttcctaattgtgaccggatcgttacactgtaagtgtgcccggttattttcatgtccgttcgcgatacgcgcggcggagttgcagtttctctccgtagcgagtcaaaacattattttaatgtatggcacacatacgaggaggatattccacaatggcaaacgcacagaaaatccgcattcgcctgaaggcgtatgatcacgagctgatcgaccagtccgcagagaagatcatcgagaccgctaagcgcaacggcgctaaggtttccggcccgatcccgctgccgaccgagaagcagatcgtaaccatcctgcgcgcagttcacaagtacaaggactcccgcgagcagttcgagcgccgcactcacaagcgtctgatcgacatcatcaacccgaaccaggctaccatcgaggctctgaccaccctggatctgccggccggcgttgagttcgaggttaagctctaatctaaaagagcggacgcgaacgcaatcgccgcaagggcgattgcacaaaacaagtttacaaatcgccggattaacccgccggagatttgaaagccctgccgcgacacgcgcggcgaggtcatgttggcggttaaatgccgtcaaccaataacctttaaggaggaaaaacaaaatgctgaacaaagcaatcatcggcaagaaggtcggcatgacccagatcttcaacgctgacggcaaggttatcccctgcaccgtaatcgaagcaggtccttgcgttgtaactcagctcaagaccgaggagaaggacggctacaatgcagttcagttcggttttgaggatgcaaaggaagctcgcctgaacaagccccagaagggtcacctgaagaaggctggcgactccctgaagaagtacctgaaggagttccgtttcgaggactgcacgatgttccagctcggcgacgttgtcaaggctgacatgttcgttgagggcgacttcgtagacgtcaccggcacttccaagggcaagggctacgcaggcgttatcaagcgtttcaacgcttcccgtctgaaggagacccacggtaccggcccggttcaccgtcacgctggttccatgggcgcgtgctctgatccttccaagatcatgaagggcaaaatgatgcctggtcacatgggtgctgagcaggttaccgttcagaacctggacgttgtcaaggtagacgctgagctcaacctcatcgctgtctgcggcgcagttccgggtccgaagggcggcatcgtcgttctgaagaacaccgttaagaacaacaagcttgtcaagggcgaggctggcgtcagcaagaacccgcagaaggcatccgcaagaaagtaagggaaggaggagcaactcatgcctacagtagcagtttttgatatgaccggtaagaagaccggcgaaatggagctgaacgcagctgttttcggtatcgagccgaacatgactgtcgtacacgctgcagtaaagaattacctggctaaccagcgtcagggcactcagtccacgctgacccgcgcagaggttcgtggcggcggcatcaagccgtggcgccagaagggcaccggccgcgctcgtcagggttcgatccgctctccgcagtggacccacggcggtattgccctcggcccgaagccgcgttcctacaattacagcctgaccaagaagaccaagcgtctggcaatgctctccgctctgtccgctaaggcagcagcaggcgagatcatcgtcatcgacggtctggacatgggcgagatcaagaccaagaacttcgttggcttcctcaatgcaatcgaggcaaccggcaagagcctggtcgttaccccggaggttcgcgtaaacgtagttaagtctgcggctaacatcccgggcgttcgcaccacgatcgcgtccaccctcaatgtatacgagatcctcaatgctgacaagttcatcatcgacaaggcagcagttgagaagcttcaggaggtatacgcataatgaagttcgcatacgacattatcaagaagccggttatcaccgagcgttccatgatgggtgcacaggacaacaagtacaccttcgaggttgctgttgacgcaggcaagatcgagatcaagaaggccgttgaggaaatcttcggcgtcaaggtcgctaaggtcaacaccatcaagctgccgggcaagtggaagcgcatgggcgtccacgtcggcaagcgccccgacatcaagaaggcagtcgtaactctgaccgctgactccaagaagatcgagatcttcgagaacatgatgtaaaatgtataggagggactccgtcccccctatatacgagaaaagttcccaaggaaacttttctcgatacccccctctcgtccgcacggcggacgaggtt

SEQ ID NO: 12901 - DNA, 24887 bp, Unknown
  gut microbiota DNA sequence
tgtcccgaagcagtggtgtaaaagtccggcagagccgtacttttacagcgcccctgcggggcgatataaagcctgctcgaagcgagagcttctgacaggtatgtgtatggggaagccaccccgataataacgaatcaaggagttgaaattccaaatggctattaagactttcaacccgacgacgccctcgcgcagaaatatgactgtgctcaactatcagggtctgtctaaggtgaagcccgagaagagccttctcgaaaaggtcaagaagaccgccggccgcaacagctacggccgcatcaccgttcgccacatcggcggcggcaacaagaagaagtaccgtatcattgacttcaagcgtcagaagctcgacgttttcgcagaagtcaagaccatcgagtacgacccgaaccgctctgccaacatcgctctcatccagtatgaggacggcgagaaggcatacatcctcgctcccgagggtctgaagatcggcgacaaggtcatctcctccaaggatgccgacatcaagccgggcaactgcctgccggttgagaacatcccggttggtaccatgatccacaacatcgagctgtacccgggcaagggcgcgcagctggttcgttccgcaggcgtcggcgctcagctgatggctaaggagaacggcaagggcatggttcgtctgccctccggcgagctgcgttacgtccgtctggactgcaaggctaccatcggtgttgtcggtaactccgatcactccaacgttcagctgggtaaggccggccgtacccgtcatctgggtatccgcccgaccgttcgtggttctgtaatgaacccgtgtgaccacccgcacggcggcggcgagggcaagagcccgatcggtcgtccgtctccggttaccccgtggggcaagccggctatgggttacaagacccgcaagaagaaccaccgcaccgacaagcagatcgctcgtcgtcgcaacggcaagtaagaaaggagttatcttaagatgggcagaagcattaagaaaggcccttttgtggctcctgagctgatcaaaagagtcgttgaaatgaacgaaaagggcgagaagaaggtcctcaagacctggtcccgcgcttccacgatcttccccgagttcgtcggtcacaccatcgcagtacacgatggccgcaagcatgttccggtatatgttaccgaggatatggttggtcacaagctgggcgagtttgctcccacccgtacctacaagggtcacgcgggcagcaagacctccaataacggcaagtaaggaggagttaaagtaacatggaagcaagagcaatcgtacgcaacgtgcgcatgactccgcgaaagatcaagctgatctgcgatctgatccgcggcaaggatgcgggcgaggctatggccattatcatgaatacccccaaggcagcatgcgagccgatggagaagctcctcaagagcgccgtcgcgaatgctgagaacaaccacggcatgaacactgacaagctgtttgtcaaggaagttcacgtcggtcccggcccggttatgaagcgcgttatgccgcgtgcacagggccgtgcatatcgaatcctcaagagaacctcgcacatcacgctggttcttggcgagaaagaataagggagggtaatcaatgggccagaaagtaaatccgaacggtctccgtgtcggcgttatcaagaattgggattcccgttggttcgcaaaggacaatgcgttcggcgacctcctcgtggaagactacaacatccgtaaggaactgaagaagcgtctgttcgatgcaggcgttccggcgatcgagatcgagcgtaagaacgacgagatcaagatcatgatccagtgcgcgcgtccgggcatggttgtcggccgcggcggcgaggacatcaagaagctcgaggaagagctgaccaagaagtacggcaagaaggttcgttgctcgatcatcgagatcaagaacccggacaccaacgctactctggtagctgagaacattgcagctcagctcgagaagcgcatcggtttccgccgtgcaatgaagcagtgcatgggtcgtgcaatgcgcatgggcgcaaagggtatcaaggtatcctgcggtggccgtctgggcggcgccgagatcgctcgtaccgagcactaccatgaaggcaccattccgctgcagaccctgcgtgcggacatcgactatggctttgccgaggccgctaccacctatggtcgcatcggcgttaaggtttggatctacaagggtgaggttctccacggcggtccgcgtctgggccgttccatcgaggctccgaagccggcattcgagcgccgcgagcgtcgcggtggccgtgatgaccgtcgcggcggccgtcgtgacttcaaccgtggcgagcgtcgcgcaccccgtcaggaaggaggcaaccgctaatgctgctccctaagagagttaaataccgtcgcgtacagcgcggtcgtatgaccggcaaggcaacccgcggtaacttcgtatcgaacggtgagttcggtctgcaggctaccgagccgtgctggatcacctcgaaccagatcgaggcagcccgtatcgcaatgacccgttacaccaagcgtggcggtcaggtatggattaagattttccccgacaagccggtaactcagcagccggccggcacccgaatgggttccggtaagggcgcacccgagtactgggttgcagtagttaagccgggccgtgtcctgttcgagatcgcaggcgtttccgaggaagttgctcgtgaggcgctgcgtctggcaagccacaagctgccctgcaagaccaagttcgttgcccgtgagcagaagaatggcggtgaagcatgatgaaggcatctgagatcagagaactgacggctgaggagctgtctgcaaagctcggtgagctgaagaaggacctcttcaacctccgtctgcagctcgctaccaatcagctcgacaacaccaacaagatcaatgaagtcaagcacgacattgctcgagtcaacaccgtaatccgtgagaagcagctcgcggagaaggcataaaggagggaaacgaatattatgagcgaaagagcattacgcaaaacgcgagtaggcaaggtcgtttccgataagatggacaagaccattgtcgtagcaatcgaggatcgtgtagcacatcctctgtacaagaaggttattccgcacacctataagctgaaggcgcacgacgagaacaacgagtgcaagatcggcgacaaggtaaaggtaatggagacccgtccgctgtccaaggacaagcgttggagactggtcgagattatcgagaaggcaaagtaaggaggagagcacatggttcagcaggaaagctttctgcgtgcagctgataacagcggcgcaaaggaactgaaggtaatccgtgttctcggcggctctgctcgcaagtacggcaacatcggtgacgtagttgtctgctcggtgcgcaagtgcaccccgggcggcggcgttaagaagggcgacgtagtcaaggctgtcatcgtccgcaccgttaagggcctgcgccgtgcagacggcagctatatccgctttgacgagaacgctggcgttatcattcgtgatgacaaaaacccccgcggcacccgtatctttgggcctgtcgctcgtgagctgcgtgacaaggactacatgaagatcctgtcgcttgctccggaagtactgtaaggaggtcgccaacaaatgaacaatttgcatgtaaagacgggcgacaccgcagtcgttctttccggtaaggaaaagggcaagcgcggcaaggttctgtccgtagacccgaagaagggtatggtagtaatcgaaggtgtgaacatggttaagtgccacaccaagccccgccgccagggcgagaccggcggcatcgtagagcgcgagggcgctgttcgtgcctgcaaggtcatgaaggtctgcccgaagtgcaacaagccgacccgttcggcacacaagtttgctgagaacggcgcgaagctcgtagtgtgcaagcactgcggcgagacactttaagaagaggaggttgcaataaatggttccgaatatgaaagcaaagtatactgcggacgttgcgcctgctctgatgaagaagttcgagtatgagagcgttatgcagatcccgaagatcgacaaggtcgtcatcaacgtcggctgcggcaaggaagcaaacggtaactccaaggttatcgaggctatcgtccgcgacgtaaccgcgatttccggccagaagccgatcatcacccacgctaagaagtccatcgcaaacttcaagctgcgtgagggcatgccggtaggcgttaaggttaccctgcgccacgaccgtatgtgggagttcctcgaccgcctgttcaacgtagctctgccgcgtgtccgcgacttccgcggcattaacggcgacgcgttcgacggccgcggcaactactccctcggcctcaccgagcagctgatcttcccggagatttcctacgagcagatcgacaagctgcgcggcatgaacatcgtcatctgcaccaccgcaaacactgacgaagaagcgaaggagctgcttactctgatgggcgctccgttcgagaagtaaggaggagaattgatcaatggctaagaagtctatggtactcaagcagcaggcgaagccgaagttctccgttcgtgcttacaaccgctgcaagatctgcggccgtccccacgcttacctgcgcgactacggcgtttgccgtatctgcttccgcgagctggcttacaagggccagattccgggcgttcgcaaggcatcctggtaaagacgcttcaaaaggcacccctgtatggggtgccttttttcgctttcttccaagggggacgctgtcccccttagatacgcccccggttccggagaaaccgcgggcgataaccccctctcgtccgcacggcggacgaggccgcgccgccgcggcgcgggcagcggtataaaagtccggcagagctggacttttatagggaattttacgcggcctgttccggcgcttgcgcgccgaaatgcggcaggaagcagcgcacgaaattttttcacttttttgaaaaaaagacttgcgcgatacgcctggaatagtgtatactaataacagtgcgcatcaggcgtactgagcggcgaaaatcgtcgccacgcccattagccatcaaccgtttcatacggcgtggtttctggagcggccaaaaacggccgacctgccgttataacctgtatcttagcgatttgactgcaaacaacgtgaaaaaagacgcaaaatcagcacttttcccgattgtagtcaatgctttgctgtgttataataaacgctggtctggttcgttcaggccagcgtattttttatccccatagccgctgtccgtggaagggccacgaacagtgtaaagaaaagtgggaggcaaacagacaaatcagaaccggattaacccaccggcgctcgattgctgcactacccccaaacttcttgtaaaggagagcatttatgcagatcactgatcccatcgcggatatgctgacccgtatccgcaacgccggcaatgctcgtcatgccagcgtggatgtacccgcatccaaaatgaagaaggctattgcccagatcctgctcgacgaaggctacatcaagtctttcgaggttgtagagggcaacacgcagggcatcatccgaatcgctctgaagtacgttgacggccgtcagaaggctatcaccggcatcaagcgtgtatcgaagccgggcctgcgtgtatacgccggcgcacaggagctgccgaaggtacttcgcggccttggtgttgccatcgtttccacgtcgagaggcgtcatgaccgacaagaaggctcgcgagctgaacgtcggcggcgaagttctcgcattcgtttggtaagggaggtttaaacaatgtctcgaattggtagaatgccgattgccattccggctggcgttgaagtcaagattgacggcaacgttgttaccgtaaagggcgctaaggcaacccttacccgcgaattccatccgaacatgaacatcgcggtggagggcaacgaaatcctcgtcactcgtccgaacgacgacaagcacaaccgtgcactgcacggcctgacccgcagcctggtccacaacatggtcgtaggcgttaccgaaggcttcaagaaggagctgagcgtacagggcgtaggctaccgtgtagcaaagcagggcaaggatctggttatgaacctcggttactcgcatcaggttaccatgagcgaggtcgagggcatcacgatcgacgttccgaatccgaacacgatcatcatctccggtcctgacaagcagaaggtcggccagtttgcagcggaagtccgcgagaagcgtccgccggaaccctacaagggcaagggcattcgctacgctgacgagtttgtccgccgcaaggaaggcaagaccggcgctaagaagaagtaaggaaaggagaggcgtaagtaaatggtttcgaagaaggactccaacaaggcgcgtctgcagcgccacaagcgcgtacgcgctaagatcaacggtacggccgatcgtccgcgtctggacgtattccgttccgcaaagaacatctatgcacaggtcatcgacgatgtcgccggtgttaccctggtatccgcctcgactgctgagaaggacttcaccgagtacggcggcaacaaggaagcagccaagaagattggccagctcgttgctgagcgctgcaaggctaagggcattgagaacgtcgtattcgatcgcggcggctatgtgtaccacggccgcgtgaaggagctcgcagatggcgcccgcgagggcggcctgcagttttaagtcggggaggaggtaaaacatggctcagtttaacagaaacgataagcgtgaggacgagtactccgagaccgtcgtagcgctcaaccgtgtatccaagaccgttaagggcggccgcgtgatgaagttctccgcgctggttgttgtaggcgacggcaagggtaccgttggcttcggcacaggtaaggctgccgaggttccggacgcaatccgcaagggcatcgaggacgccaagaagaacctcgttaagatttccatgaagggtaccactatcccgcacgagatcatcggcgagttcggtgcaggccgtgtcctgctcaagcccgctgctcccggtaccggcgttatcgctggcggtgcagttcgtgcaatcgtagaggctgccggcatcaaggatatccgcaccaagtgcctgcgctccaacaacccgcagaacgttgtttccgcaacgatgcagggtctgaagagcatgcgcagcgctgcacaggttgctgctgtacgcggcaaggctgtagaagaactgtaagaaaggggtaacttataatggctaacatgaagattaccctgaaaaagagcctggtcggccgcttggagaagcacattgcgaccgctcattctttggggcttaagaagattaacgacgtaaccgttcagccggacaacgcgcagacccgcggcaagctccagcagatcggctacctgctcgaagttgtagaggaggcgtaacccatgaagctgcatgaattaacgcccgccgcaggcgcaaccaagccggcataccgcaagggccgtggcgccggttccggcaatggcaagaccgcaggccgcggtcacaagggccagtgggcccgttccggcggcggtgtccgtccgggttttgaaggcggtcagatgcctctggcacgccgtctgccgaagcgtggtttccacaacattttcggcaccacttacgcaccggtcaatgtttccgctcttgagaagtttgaagacggcgctgaggtaactgcagagatcctctgcaatgccggcatcgtcaagaatgctctcgacggcatcaagatcctcggtaacggcgcgctcaccaagaagctgactgtcaaggcagcagcattctctgcgtccgcaaaggagaagatcgaagccgcaggcggaaaggccgaggtgatttaaggtgtttcaaacccttaaaaacgcctgggctatgcccgaactgcgcaagaagatcctgtatactctgtttatcatcctgatcttccgcttcggttcgtgcattccggttccgttcatcgacacccagctgcttgctcagtattttgagcaggcaagcaccaacggttcgatgctcggttatctggatatgttctccggcggcggtctgtcgcgtgcgacgatcttcgccatgagcattactccgtatatcaatgcgtccattatccttcagctgctgaccgtcgccatccccgctctcgagcgcatggtaaaggacggcggcgaggagggccgcaagaagatcgcaagctggacccgctacgtcggcgttctgctcggcctgctgcagggtctgtcctactacgctctgctgcgcaaccagggcttcctttctgacaagggcgttctggcggccgttacgatcattatgaccttcaccgcaggcaccgcgctgatcatgtggatgggtgagcacatcacccagaagggtatcggcaacggcatctcgatcatcctgttcgcaggtatcgtatcccgcggtccgtcgctcatgcgcacgctgggcaacctgttccagaccggcacgagcggcatcgtttccgcaatcctgatgatcattatcggtatcttcatcgtagtgttcatcgtattcatgtccaatgcagagcgccgcatcccggtgcagtacgcaaagcgcgttgtcggccgcaagatgtacggtggtcagtccacccatctgccgatcaaggtcaacgcatccggcgttatgccgatcatctttgcgtcctccatcctcgcgctgccgcagaccgtttcgatgttctggcagccggaggccggtacggtcggtgcccacatcctcaatctgttctcgcagagaagtgtggtctacatcgttctgtacgcgctgctgatcctcgctttcgcatatttctatgcatccatccagtttaacccgatcgagatcgccaacaacctgaagaagaacggcggcttcatcccgggcttccgtcccggcaagccgacctccgacttcatcaccaaggcgctcggcaaggttaccttcgtcggcgccgtattcctcggcatcgtcgctctggtaccgctgatcgtcggtgcgatctccacgaacctctccaatgtggctctgggcggcacctcggtcatcatcgtcgtcggtgttgcgcttgacacggtcaagcagatggaggcgcagatgctcatgcgtcatcacaagggctttttggaataaatctggaggctgattttaagtgaatttgattcttcttggcgcaccgggcgccggcaagggtacgctcgcatcctacctgatcgaaaagatgggtgttccgagcatctcgaccggcaacattctgcgcgaggcaatcaagaacaatacgccccttggccagtcggctaaggagtacatggacgccggcaagctcgtaccggaccagctcgtcatcgacctgctcaaggaacgcatcgcaaagcgcgactgcaagagcggcttcatccttgacggctttccgcgcacgatcccgcaggccgaggcactcgacgagatcgcaaagatcgactgtgctctggctctcgaggtaccgaacgaggtcatcgagaagcgcatgaccggccgtcgtgtctgcctgcgctgcggcgcaacctaccacgtcgaggcaaatccgccgcgcgtggctgatgtctgcgatatctgcggcgacaagctcgttatccgcagcgatgaccaggctgacgtcgttcgtcatcgcctggagacctaccacgagcagaccgagcccctcaagggctactacgacgctcagggcaagctcaagagcatcgacggcaccaagggcatccatgaaactgagaaatttgcggttgaggcactgggtctgtaattatgattcacattaaatcagaaaaagaactcgaacggatgcgcgtcgccggccgaatcactgcgctcgcgcgcaaggcggcggctgacgcggttcatccgggtgttactaccgaagaaatcgaccggatcgtccgtaagaccatcgaggatgcaggcgcaaagccttccttccttggctacggcggttttccgggcagtgcgtgtgtgtccatcaacgatgaggtcattcacggcattccgtccaagacgcatatcgtccgcgagggcgatatcgtcaaggtggatgtcggcgcctacatcggcggctaccacggtgactgcgccgctaccatcccctgcggagaggtaagcgacgaggcgaaaaagctgatcgcagtcacgcgccagagcttctttgaaggcattaaatttgcccgtgtgggctatcgtgtttccgacatcggcgccgccgttcaggcatacgtcgaggcgaacggcttctcggtcgtgcgcgactacgtcggtcacggtgtaggtgaaaacctgcatgaaagccccgaggtcccgaactacggcaaacccggccatggcatccgcctgcagagcggcatggtcatcgcggttgagccgatggtcaatgtgggtgtttacacggtcaaggtcctgcccgacggctggaccgtcaagacccgggacggtaaactttccgcccactatgaaaacaccattgccatcacggatggcgagccggagatcctgacaagcatcgacggcgaggtactgtgatgtctcgcgcccgattatccgacatcgtgctctctctgaccggaagggacagaggacagctcatgctggtcgtcgcggaggagggggatttcctcctgctggcgaacggacgcgcgcggcgggcggaaaacccgaagcgcaaacgcgaaaagcacgtttcccgacagggggcgtgcgatgagcggacccggctcaagctcgaggagggcggccggctgacaaacagtgaaatccgcaaggcgctcgccctctggacaggggacgaggacaacatttgaccgaggaggggaaacgaacaatggcaaaagatgatgtgatcgagctggaaggcaccgtcgtagaggcgctgccgaacgctatgtttcaggtagagctgccgaacggccataaaattctggcccatatctccggcaagctccgcatgaactttatccgcattcttccgggcgacaaggtcaccgtacagatgtcgccttacgacctgacccgcggtcgtatcacctggcgttccaagtgataaaagcgggcggaggtacgcatgtgacctgcgcgccagtggtcgccggggtctccccggtgtcccatcccaccataaattcttgatggaggtaaaacaaacatgaaggtaagaccgtctgtaaagccgatctgcgagaagtgcaagatcattcgccgcaagggccgtgtaatggttatctgccagaacccgaagcacaagcagaagcagggctaagaagcgccttcggcgctttataggggacttcaaaagtcccctatatacaaaaacaagttcctgacgaaacttgtttttgatacccgaacgacgcgatccaagatcgctgagtcaaggtataaaaagtccggcaaagctggactttttatggcgattgttcgcaatcgccgaataaatgcgcgcccaggggcgcggatcatggtttacgcgaacacgacaagcacgcgcggcgagcgcgacgctgcaggggcggaggcggtccctatactgtgtttgcaaacacgcctcagtgtgtaactatggaggttataatagtatggcacgtattgccggtgttgaccttccccgcgagaagcgcgtggagatcggcctgacctacgtcttcggcattggccgcaagacgtccaacgaaatccttgctaagaccggtatcaatccggatacccgcgtcaaggacctgaccgaagaagaggctgctaagctgcgtgaagtcatcgagcgcgactacaacgtcgagggtgacctgcgccgtgagatcggcctgaacatcaagcgtctggtcgagatcggctgctatcgcggcctgcgtcatcgccgcggcctgccggttcgcggtcagcgcaccaagaccaatgcacgcacccgcaagggcccgaagaagaccattgcgaacaagaagaagtaaggaggggaacgtataaatggctaaggtacagaagaagggcgcagcgacccgtactcgtcgccgcgagcgcaagaatatcgagaagggcgcggctcacatccgttcctctttcaacaacacgatcgttacgattaccgacctgaacggcaacgctatttcctgggcttcctccggcgagatgggcttccgtggttctcgtaagtccactccgttcgcagctcagaccgcggctgagaccgctgccgctgctgctatggagcacggcctgaagaccgtagaagtatatgttaagggcccgggttccggccgtgaggctgctatccgtgcactgcaggccgctggcctcgaggttaccatgatcaaggacgtaaccccgatcccgcacaacggctgccgcccgccgaagcgtcgtcgcgtataatagaaggaggaaaccaataaatggctaagaatacccagcccgttctcaagcgttgcaagacgcttggtctttccccggcggtacttggttactccaagtctaccaagcgccagcccaagcagactcgccgcaagcagtctgagtacggcatgcagctcaacgagaagcagaaggtaaagtttatctacggcgttctcgagaagcagttccatcactactacgagaaggctgagcgcaagcagggcatcaccggtgagatcctgctccaggagctcgagcgccgtctcgacaacgtagtattccgcatgggcttcggcaacacccgccgcgaagctcgtcagctcgtaaaccacggccacttcaccgtaaacggcaagcgcgtcaacatcccgtccttccaggttaagccgggcgacgtagttgcagtctgcgagaagtcccgcaccaccaccaagttcaagtctctgctcgaggaaaacggcaagaaggcttgcccgaagtggatcgagaaggctaacgatgctttcgagggcaaggttgtagcaatgccggcacgcgacgacatcgactacgaagttgctgagcacctcatcgtcgagctgtactcgaaataatagaccctcgcttttggaacgggcgtggcgtctgctgcgtctgttccgcttagagtttccaaccaacgtgaaggagggtaccacatgatcgaaatcgaaaaaccgcgtattgactgtgagcagctcgccgaggacggctcctacggcaagttcgtcgtagagccgctggagcgcggatatggcaccacgctgggcaactccctgcgccgcattctgctgtcctctctgccgggtacggcagcgtccagcatcaagattgcaggcgtgcagcacgagttctccaccatcccgggcgttaaggaagacgttaccgagatcgtgctgaacgtcaagggcatcattgccaagctgcactgcgacggccccaagacggtctacatcgaggctgccggcgagggcgaggtcaaggccggtgatatccacgcggacggtgaggtcgagattctgaatcctgacctgcacatcgctaccctgatgagcgatgctcgcctgtccatggagattacgatgacttccggccgcggctatgttccggccgagaagaacaagcagcatcagacctccatcggcgtcattccggtggattcgatctacacgccggtctacaaggtcaactacacggttgaaaacacccgtgtccgcgatctgaccgactatgataagctgacgctcgagatctggaccgacggaaccatcaccgcccgtgacgctgtatcgctcggcgcaaaggttctccgcgaccatctcgatctgttcgtagacctgtccgaggagatcggctccaagtccaccgttgttgaaaaggctgaagcgcagcacgataaggtgcttgaaatgacgatcgaggagctggacttctccgttcgttccttcaactgcctcaagcgcgcaggcatcaacacggttgaggatctcatcaacacctctgaggaggacatgatgaaggttcgcaacctgggccgcaagtccctggaagaggtcatcggcaagctggaggctatgggcctgcatcttgcaaagtccgaggagtaatcttcgtactttcgcccacagcttcgtcagaagctgcaagcgaaacagcttgattaccgaaaacggacaaactgtgtgccgtgaggcactgtaactgaactgacgcggcggtacgttttaccgcgccgccgcttttactttaatttggaggtaaacacgaatggctaacaatcgcaagctcggccgtcctactgaccatcgtaaggctatgctgcgtgcgctggtaacctacctgctggagaacggcaaggttgagaccaccctcgctcgcgctaaggaagtaggcccgatgaccgagaagatgattaccctcggcaagaagaacactctggcttcccgtcgtcaggctatggcttacgtcaccaaggaagcagttgttgctaagctgttctctgagatcgctccggagtacgctaaccgtaacggtggctacacccgcatcgtaaagatcggtccccgccgcggcgactgcgcagagatggcaatcatcgagctggttaagtaattcctgacggaatactgacgactcgacctgagcgcaggctcgggaaaaaatgattttcaaaaaggttatccagtagcgtgcttattggataacctttttctttttgccttttttggatacctatgatactatgtaggtagaacgtaaattgtctgattgaaaattggaacgttgaaggagggctgaaagatgtttgcaatgtttgatatattgagtttcatcgttcccatcatgtttattgtcgtatttggcatcatcattttttccatcatacaggggataagcacatggcataagaacaataattcgcccagattgaccgtaccggcggtgatcgttgcaaagcggacagatgtctcgcatcaccggcatgccaatgcaggcgacatgagcggagcgcacggcttccacacaacgtcgagcacgacctattatgtcacgtttcaggtagaaagcggagaccggatggaattccatgtttccggcttggaatacggcatgctcgcagagggcgacaccggtagactaaccttccaggggacgcggtatctgtcgtttgagcgataagctctttttcaggcttcggccgaaatctcacccggacggtactcggcaatgcctgaacagacaccgtagggcaggctgccctcagccagccgccgtaaaccggtgcagaacgtgagaaacagcgtgccgaggtcgtcacgccctgcgaatatcgtttcccaatacgcaaaagccttgcagaaccaacaatactgtgctatcctgaacttacagtaaaaggttttcggcaacagaaaggaagggggggagattatgtacctgaaaacgaccatattcaccattattgcgtggtttattgggctgatactggatgccaatattccgtttggcgacccgatgggcttcctcggactgcgaaacttgtttcccatcctcgcgatgggcttatgcatcctgcatgaggtgaagaacggcagcggcaaacgctgatttttatatttttcgaaaatatgcagtctgcacgcctaattttgtgcagttttacagggaaaaccgagatgattattccaaaaacgcttgcaatagcgtgctgcacgtgttatactgttaaagtaagaatgaaagtaaccgtagggagtggccaagtgccactccttacgttttgcttatacaaaatttttcgataaccgaaggagggacggctttgcaggcaaagcagatcgtcgcccgcgtggaagagctggtcagacccctgtgcgaacaggccggcgtttctctgtgggatgtagaatttgaaaaagagggcggacagtatatgctgaccgtcaccgtggaccacccggagggcgtgaatatcgaccagtgtgagaaggtctcccgcgcgcttgaccccatgctggacgcaaaggaatttgacgatatgccgtcctacacgctgtgcgtttcctcggcgggacttgcccgccgtctcaagcgccccgagcatttcgaggcgttcatgggacagacggtcgaggtcggtctgtacaaggccatgaacggcgcaaagcagatcgagggcaccctcgcaggctacgacaacggcgcggtaacgctcgacatcggcggcgagcgcaccgtatttgagccgaaggacattgccgcagttcgtcttgcggtcgagatataaaaaggagttggattggaaaaaatggtgaacgcagaattttttgacgccctggaacagctcgaaaaagaaaagggcatcccggtggactatatgctcgaccgcgtaggtcaggcactcatcaccgcttacaagcgcgacaacgacggcatgactgacaacgtttacgttgagccgaaccgcgaggaaaagaccatccgtatgtacgtgcgcaagacggtcgtccgcaccgaggacctttatgagccctatgaggagatcaccctcgaggaggctgccgactacaaggtaaatccgcaggtcggcgacatcatcgacatcgacatcccgaccaagtcgttcggccgcatcgctgcccagaccgcaaagcaggtcatcattcagggcatccgcgaggcggagcgcggcatggtcatctccgagttcgagagcaaggagcacgagatcctgaacgctacggtcgcacgcatcgacccgcgcagcggcagcgcttatctggacgttgtttccggcggcgagaagagcgaggctatccttgcggcttccgagcaggtccgcggcgaaacgctcgtcgagggtcagcacgtcaaggtttacctcatcgaggtccgccgcggcacccgcggcgtgcaggtcatcgtttcccgcacccatccgggtctggtcaagcgcctgttcgagctcgaggtaccggagatccattccggcgtggtcgaggtcaagtccatcgctcgtgaggcaggcaaccgcaccaagatcgccgttacctcgcacgacgagaacgttgatccgatcggcgcctgcgtcggtacccgcggcgcgcgtgtttccaacatcaccgcagagctgaacggcgagaagatcgacatcatcaagtggaacgaggatacggcaaccttcgtatccgcagcactcgcaccggcggacgttatctccgcttccatgcaggcggacggcaagtcctgccgcgtcatcgttccggacgatcagctgtcccttgcaatcggcaaggagggtcagaacgcccgtctcgctgccaagctgaccggctgcaagatcgacattgcgccgcagtctcaggcgcaggctgagccggaggcggagccggtcgaggagccgcagaccgagccgcaggctgaataagcaggcggaggtgcggcagaatatggtacaaaagaagattcccatgcggcagtgccttggctgccgtgaaatgttcccgaaaagggagctgatccgcgttgtgcgctcgcccgagggcgagatcacgctcgatttcaagggaaaggcacccggacgcggcgcgtatctgtgcggcaggccggaatgcctcaagaaggcacgcaagagccgcgcaatcgagcgcgcgctcagcgtcaccgtgcccgaaacggtctatgaccagctcgagcagcagatggaacaggagggcgcacatggcgaatgatcctgtactgagaatgctcggccttgcacgccgcgcaggcaagctcgcctacggcgatgagctggtgcgcgaggtgtgctttgcccacaaggcaagatgcgtgttcctcgcaggcgacgccggcgcgagcacggcgaaaaaaggtgcgttctacgccgagaaggcgaatgttccctgcgtgcagctgcctcacggtaagatcgaactcggcacgtcggtcggcaagtccggctgcgcgatcgttgccgtgacggatatcggactcgcctcgtccgcagttgaaaagctggcgagcgagcacgaggagtatgcggagactgcaaagctcctcagcgagaagaatgcacgcatccagtcccgcaagggtatcaaaaaacagaagaacaaggcggaaaccgagacggaaaagccggttgaaccggaaaaacgtgaggaaatccgctcgaaaacggcggagaagcgccccttccgcaaggcggacggcgaaaaacgcccgtatcgtaaggacggcgagcgccccttccgcagggcggacggcgagaaacgcccgtaccgtaaggacggcgagcgccccttccgcaaggcggacggcgaaaaacgcccgtaccgtaaggacggcgagcgccccttccgcaaggcggacggcgaaaagcgcccgtaccgtaaggacggcgagcgtcccttccgcaaggcggacggcgagaagcgcccgtaccgtaaggacggcgagcgccccttccgcaagacggacggcgagcgccccttccgtcgcgacagcgcacggaaaccgcattttacaggcgaaaagcgcagcttccgcaacaaaacgtaacgaacgcgcgaaagcgcgcattcaatagagcctgctgtgcaggctcataaaaaccgggagcatgtatcacggtttttatacaggaaagcggttctgtgtgccgcgaagcgacgcgcagaactgcgccaaggatttgtccgcgccttgcgcggcacagcctattctcgctcgaaagcgtggtttcgagcgaaataaattggaggtattgcccatggcattagacaataaataccgggtacacgaggtcgcaaaggacttcggtgtatccaccagggagatcacggaaattctgaccaagtatcgcaccgagccgaagaaccatatgcaggtgctcgacgatgctgatctgtcggttatttttgaatatatgacccagcatcatcaggtcaagaacatggaaagcctgctcggcgcacagcagtccgagcgcaaggagcagcctgccgcgaagcaggaggagaagccggccgagaaggcgtcggagcagacttcggcttcctccaaggtcaagcaggtacaccgcatcgatacgcgcggcaccggcgacgtaaaccttgcaaagtacgacgaccatgtcgataagctggtcgacgcaaaggcggagcgcatggagtccaagggccccaagaagcagaagctcaccaagaagtccgatcagcgctccaagccgttcggcaacaagcgccgtcaggaggagcaggagaagatgcgccgcctgcagcgtcagcagcagatggcagcgctcaagaagatcccggtcaaggtcatgatcccggacgagatctcggtcggcgagctcgcttcccgcatgaagcgcaccgcagcggacgttatcaagggcctcatcaagctcggcgtcatggcgtccatctccgaggtcatcgactacgataccgcagcgatcgttgcggaggaaatgggctgcaaggtcgagaaggaagttcacgttaccatcgaggagcagctgttcgacgagcacgaggacaaggcagaggagcttcagccccgcgatccggtcgttgtcgttatgggtcacgttgaccacggcaagacctctctgctcgacgcgatccgcaagaccaaggtcaccgcaggcgaggccggcggcattacgcagcacatcggcgcataccgcgtcacgatcaacgacaagccgatcaccttcctcgacaccccgggccatgcggcgttcacctccatgcgtgcacgcggcgcacaggtcaccgacattgcgatcctggtcgtagcagccgacgacggcatcatgccgcagaccatcgaggcgatcaaccatgccaaggcggcaggcgttccgatcatcgttgcggtcaacaagatcgacaagccggcggcaaatccggaccgtgtgctccagcagctgaccgagtacgaactcgtaccggaggagtggggcggcgacaccatcgtctgcaatatctccgcgaagttcggtcagggcatcgacaacctgctcgaaatggttctgctgaccgcagagatggctgacctcaaggcaaatccgaaccgcaaggcgcacggcactgtcatcgaggccaagctcgacaagggccgcggcccggtcgctaccctgctcgttcagaacggcaccctgcacgcaggcgataccgttatcgcgggcacctctgtcggccgcgtccgcgcgatgaccgacgatgacggcaagaagatcgagcaggcaggtccgtccgttccggtcgagatcatcggtctggccgaggtcccgggcgcaggcgacatcttcgacgctgtagacgacgagaagatggcgcgcgagctggtcgagcagcgcaaggacaaggagaaggaagagcgcaacaagctgttccacaaggtaacgctcgacaacctgttcgattccattcagcagggcgagatgaaggagctcaacatcatcgtcaaggcagacgttcagggttctgttgaggcggttcgctcctcgctcgagaagctgtcgaacgacgaggttcgcgtgcgcgttatccacggcgctgtcggcgcgatcaacgaatccgacgttatgctcgccgccgcttcgggcgcgatcatcgttggcttcaacgttcgtccggaccgcaccgcgaccgaatccgctgcacagcagggcgttgacatgcgcatgtaccgcgtcatctatgatgccatcgaggagatggagcaggcgatgaagggcatgctcgagccgaagttcaaggaagtcgtgctcggtcacgcagaggttcgtcaggtattcaagatcaccggcgcaggcgcggtcgcaggctgctacgttcaggacggcaagatccagcgcaacgctgaggtccgcgttgttcgcgacggcatcgtattccacgagggtcatctcaacaccctcaagcgcttcaaggacgacgtcaaggaagtcgctgctgcatacgagtgcggcatgagcatcgagaactacaatgatatcaaggaaggcgatatcattgagtgcttcgtgatggaggaagtaaagcagtaaactgcttttctaagggggacgctgtcccccctagatacccctccggttccgaagaaaccggaggggatacccccctctcgtccgcacggcggacgaggccgcgccgccgcggcgcgggcagtggtataaaagtccggcaaagctggacttttatgggggattttatggcctcgcgctgcggcgcgggcccaaaatgcgctttgcgcattttaccgatattatctaacccatcctgaaaaaggaggtttcaccatatatgtctactcgaattgatcgtatttccgaagaagtgatgaaggcgctggcggaggcgctgcggtcggtcaaggacccgcgcgtgcagaacgcgatggtttcggtcgtgcactgcgatgtgaccaacgatctgcgctatgcaaagtgctatatctccgtgctcggcagcgagcagcaggcgaaggacgtcatgaagggcctcaagtctgcggccggctggctgcgccgcgaggtcggccgcaaggttcagctgcgctacgcgcccgagctggtctttgaactggacgagtcgatcacgcgcggtgcgcacatctcggaaatgctgcatgaactgaaaaacgaagggaagctcggaggggaggacgaggaatgatcgttcacgttgctgaagcggctgccgctttgcaggcgcatgacgatattctcatcctgacccaccgccgcccggacggcgataccgcaggctgcgccggcgctctgtgccgcggtctgcgtcagatcggcaagcgggcgtatattctggagaatccggagatcacaagacgctatgcgccgatgattaccgactgttatcctccggaggatttcaaccctcagtatatcgtttcgaccgatattgcagaggaaaagctgttccccgatacggcggagcagtataagggcaaggtggatctggtcatcgaccaccacggctcgaacgaaggcttcggcgcgaaaaacctcatccgtgcggatgcaggcgcgtgcgcggaggtgctgtacgatgtgctgacggcgctcggatgcagactgacgcgcgagatcgcggagtgcatttatgtcggcgtttcgaccgataccggctgcttcaagttttcgaacacgaccgcgcacacccatgcggtcgcggcggcgtgcctgaccgccggcatcgacggcggcgagatcaaccgcgcgctgttcgaaaccaagtcgcgtccgcgcttcgagatggagcgcatcgtattcgacacgatggagttccacgaggacggcgcgatcgcggtcgcggtgctctggcggaaggacatcgaccgcgtcggcgcggatatggacgatctggactcgatcgcttcgctcacgcggcagatcgaaggcgtgcagatcggcattacgatgaccgaaaaggcggacggaaccgttcgcgtttccgtgcgcacgaccagggaaatggatgcctccgcgatctgcaaacgggtcggcggcggcggccatgtccgtgcggcaggcgcgagcttcacctgcggcatggacgaggcgaaggccgagatgctgcgcgtagcgaaggagcagttccatgcagcagactgagctttcgggtatcctgctgatggacaagccgcagggcttcacctcgcatgatgtggtggccaagctgcgcggcattctgcacacgaggaaaatcggtcacggcggcacgctcgatccgctcgcgaccggcgttctgccggtgttcatcggcggcgcgaccaaggcggcggatttcgccgcagcgcaggacaaggagtacgtcgcgggctttacgctcggctactgcacggacacgcaggacgtgaccggcgagatcgtgcagaccggcgaccggatcgcggcggaatatgcggtgaaacgtgcggtgcgcggctttgtcggaccgcagcagcagattccgccgatgtactcggcggtcaaggtcaacggccagaagctgtacgaccttgcacgcaagggcagggaggtcgaacgcccggcgcgcgacatcatcgtgcatgaaatggagctgctggacttcgacgagaacgcccagaagggtacgctgcgctgtgtggtcagcaagggcacctatgtgcgcacgctcgtgaacgacctcggcgaaaagctcggcacgctcgccgtgctgcacagtctggtgcgcacgcgctcgggcgcgtatccgctcgaccgctgccgcagcttcgaggactgcgagcgggcgatggccgacggcacgatgcagcagctcctgctgccgaccgacagcctgtttaccgactgtccggccgtcgcgctcaccgctgagggcgcggagcgcatcgcgcgcggcgcagtcgtctttccgcggcagacagacagcctgcccgaaaccgcaggcacgctgtgccgtgtgtaccatgagggacgcttcctcatgctcggtcaggtccgcgagcttgacaagggcggtctgggtctgtttgtctataaaaactttcgataatttcagggggatagcccgatgatagaagttacaaaaccccgtgcgatcgcgctcggatactttgacggcgtgcatctggggcatcgtgcgctcatgcagaaggcggtcgagcgcgcgaagcagatcggcggcacgagcgccgtgttcacgttcgacgtgcatccggactcggtcgtcatgggccgtcaggtgccgctgctgaccgcgaacgcctaccgccgcgaggagatcaagcagctcggcggcgtggacgaggtgatcttcggccattttgatgagcggatgcagcatatggactggcgcgatttcattcacaaactgctcatcgggcagttccatgccggctggatcatctccggtcgcaacaaccgctttggctacaagggtcagggcaacgccgaaggcatggcggtcgaatgcgcgaaggccggtatcggctacgactgcatcgaggacgtcaaggtagacggcatcgtcgtctcctcgacctatatccgccagctgatcgcgcagggcgatatggagggcgcggcgaagttcctcggtcatccatacaccgtgacgggtatcgtagagcatggccgccgcgtcggcacgagcgtgcttggcgtaccgacggtcaatctgcgcctgccggctgaaatggcgctgccgccgtacggcgtgtacgcgacgcgcgtgctcgtggacggaaaaagctatatcgctgcgaccaatatcggcgtcaagccgacgtttctggacggcggcgcgccgaccatcgagccgcatctgctcgacttttcgggcgacctgtacggcaggatgatccatgtcgagctgcataagttcctgcgtccggagatgcagtttgagtcggtcgaggcgctcaagaacgccatcgacgaaaatgttcgccagacgcgcgagcttttcgccgagagataaggcaaagcaaagaaaaagagtaaaagagtaagagaaaaaggcacgccgacggcgtgccttttttgcgccctttgggcgcaatctcctgccgcattttgtcttcggcaaaacaggcaggacaggcgctccgcagagcgccgcataaaattccccgtaaaagtccagctccgtcggacttttactccactgcccgcgccgcggcggcgcggcctcgtccgccgcaccccagggcaccttctcttgccctttcagggcaattcaccttgtgcggacgagaggggggtatc

SEQ ID NO: 12902 - DNA, 17783 bp, Unknown
  gut microbiota DNA sequence
tgatcaggttgttgatgtgcagcttgccgatacggccgcagccaactacgccgattttcagaatgcccattggttttctctccttgtagaaacgtgattttttaatagatgcgctgcacttactgctgcaagtgcagcgcatggtattacggtttactgtgcagctgccttgccgtccatctggctcttgagagttgccatgtagtcctcggcggtagtgctgtcgatgaccttggtaccgcagtcaacaaagctgtccaccttttcgccgtcgaggtaggccacaacggtcttaactgcctgatagccctgatcgtaaccgctctgtgcaacggtcatggtctcgccgccatcgaggatggactgtgctgcggtgatgttgccgtcaaaaccgatgaagatggtctttgcataagccggattgttcgccgccgcgcgggccgctgcgatagcgcagtcatcgttgtggcaggcgatgatagccagaccctccgggtggctctgcatgatgccctccatgcagagggtcgccttatcggctactgcatcagcatactgcacctcgtccgcgaggaaggttccgcctgcgccgtcgatgccctcctggaagccggtgcggcgtgcgtcggcggtcgagtcgccctgaacgcctgcgatgtaggcggcttcgatcttatcccagccggctgccttcgccgcctcgacagccttttcgccgccgcttgccgctgcatccttctggccgatgccgatgaacgaaatcttctccggtgcattaaagtccgtgtcgattgcgaagatgggcatatccgtgccgctgacgagcgtcgtcgccatatcgccctgcagcggagcgataatcatcgcgtcatacttgctcgcgtgcagatcggtttcgatcatattctgctgctcatcgtatgcggtttcggaggtcgcgcccttcatgtcgagcaccgcgccggtctcggccgccgccttttccgcgcctgccatcatgtactgggtgtattcgttcgaagtggtcttgaacacgatggaaatgttgtaattgccatcaccgccctcagcctgagagccgctgccgccggtggagccggaggacgagccgccgcagcctgcgagcatggatgccatcaatgcggaggaaacaaacagtgcgccgattttcttcagatagctcataataaattctcctttacagatcgaaaaatgtgaaaaatgcagggggaatatgctgagagacactgctgattttacgatattagaactgtgcgtacttagcaacgtgtgcgcgggtgacttctgcggacttctttacgttctcctcctgcgacatctcatagtatgccggacggaagatctcgatggtgcagcagtcgccgtcaaagccgatcttcttgagcgtatcggcgtagcgtgcatgcggcaggcagtcaccctcggcacccggccacagacgcttctcgtcgttattgtagtaagcgccgcagggcatatcctcggtgccgttcaggtgccatacgaagatctttctgccgtccgccttttcgagggtgtcccagccggagcccattgcgtagaagtggtactggtcgagcgttacgccgacatacgggctatcaacggcctcaacgatggcgtaagcgtcctcgaagcggttgatggtcatggacggctcgccgcagaactcgaggctcagacggatgccgtgcggctcgcacttcttgaccatctccttgagaacggcaactgcatcctcgcggatctccctgcgggtcggggtcaggccgcgctccttcatgtccttgctcggtacaacgacgatcatcttgcagccgaggatgttgcagcggcggatgatctcgtcgagttcagccataacggcgtccttctcctcctgcgtctgcttcatgttgaagaagcacagcgcattgtaggagagcatcttgaggtggtggctctggaaccatgcgcccatctcttcgagggtgatcttgccggcttccagatcacggttcaggcactccgactgaatgtcaatgcagtcgaagccgtacttctcgcacagctcgaggtccatcataacactgtggttcttgcaaaaacggtcatttgcttcattaaatccgagtttcatagtaaatttctccttttcttttctcaattaagttcttggttagactttattatactcatgcggcaatgccgatgggcgaaaacagaatgtagatgccgatcgccagaatgataccaatgatacatacgatatggcgatacttccacggggtcagatcaactgcaccgacatcggccggaacatattcctctgtgccgcggtatttgttcagataccacatgatggcaaattcaacgacgaacagcacagcgatggcgtacagataatgaatcggctcacccgaggtggggtaacagggcttgaggatcataaacgcgccgtaagcgataacgtgaacagcggtgatgaccttgggcgcgtacttcggtgccttgcggaagatcagcgcgccgagtacggtgaacaggatcggcagggaaacgaactggctcatagagttgaggaaggtcgtgatgccctgtgcgaacataacgaacggtgccacgcagatagcgactgcaccggcgcaggtgccgtagatcttgccgaccttgacgcactgcatatccgaagccttgggattgatggcagttcggtacaggtcgagggtaaacatggtcgatgcggaattgagcaccgaattgaacgaggacaggatcgcgccgaacagaacagcggcgaagaagcccatgaccggcttgggaacaacggcggaaaccagtgccggataagcgaagtcgatcgcggaggaaccggccgccgccagcttgtcctgaatggacggcaggtggtaagcgataacgcccggcagcaccagatagaagaagccgatggtcttgaggaagccgcagtagattgcgcccttctgaccttccttcaggctctttgcagcaagtgcgcgctgtacaaaggactgattcgtgcaccaccagtacaggttgttgaagaacattcccgtgaagatgagcggccacggcagagccggttcagcagcatcccacgaagcccatgcgttgagcttttcgggttcggtttgtacgaggtacttgacaccttctaccagaccgccgccggtggtctcgtgacccagcagcgccagcgcgaggaacggaatcatcagaccgccgatgataaggccgacgccgttgatggtgtcggatacggcaaccgctttcaaaccgccgaagatggcgtagcagccgccgataatgccgatgacgacacacaggattgcgacagcctggaacttgccgatgccgaagataccggaaatatcgaagatattctcaaatacaaccgcaccggagtaaaggattaccggcagattgaggatggagtacatcacaacgatgacgaacgagaacatcagcttggtgccgcgaccaaagcgtgcttccatcagctgcgggatggtggtcgtgcccattttgaggtaggtcggcaggaaccacagcgccagcgcaaacagcgtgaacagtgcgccgacctcccagccaatcgggctcatattggaagcccagccctggccgtttgtgccgacaagctgttctgcggacaggttggtcagcagcagcgagcctgcgatgacaatacccggcagtccgcgccccgcgaggaagtatccctcggcggtgtcgagcttgtcatctctggtcttccacgctgaaatgactgccaccatgacggtgaaaaacaggaagctcagcgcgatccagatcatggaactgaaaaatgacattttgtttctctcactctctttgggggaattttttcggttttgtgaatggccttgttcacttgacaatcacagaatatcacaacggatttccggttgcaatagcttgggcgcactatcatttatccgtgcattatctcgtgattatgtatagtaagaatgcaggtatttatgatattatgcacaaaaatggcgctatcattgtatcgcgagaaatgtgcagcacaacattctcgtgcagatgtaacatctggcgcacggctgtattttatgatatagtataagtacagagaacgcaggagagtgattttatggtaacgatgcagcagattgctgaccgctgcggggtgtcgcgcggaacggtggaccgcgccctgcaccacaaggagggtgtgcgcgaggaagttgcggagcgcatccgcgcgacggcgcgcgaaatgggctatatctcaaaccgcctcgtcatgcagcaaacgcagcagtggaagatcggcgtggtgctccactccggccattcgcccttcgtgcagatgctgtgcgggctgttcgagagcttttccgagcgtgagcttctcccgaacatcacggtcatcgtgcgcgcgatgcaggatatggatgtgcagcatcagctgacgctgatcgatgagctggtaacgaccgagcacatcaacggtctcgcgctcatgccgctcgcgaacacgctcgtgcgagacaagatcaacacgctcagcgagcagcagggcatccctgtcgtgacgttcaatacggacatcaccgacgcgaaccgtatcgcctatgtcggcacggacaacatcgcgagcggccgcgccgccgctgcgctgctcggcatggtcatgcaggggcacggcagcgtgctgccgattctgggtcagcgcagcggtcactatgccgactcgcagcgttttaccggcttcagcaccgaaatggcggagagctttccggatatccgggtcctacacccggaatgctcgttcctcgacgaaagcctttccgagcgcatcgctatgcgcgccattcagtcggacagcgagctgcgcggcatctatctgacctccgcgggacgggagggcgtttaccgcgccgtgcacgctgcacaccgcagcgaaaagctgcacatcgtcgttcacgacatcaccgagggcaacatcaaaatggtcaaaaacggcacggtcgatttcatcatcgggcaggacgtcaagacgcagggcaccctgccgatccgcctgctctacgactacctcgagcggcaccagtttcccagagagcgcatgaatatgacggatattacgattaaattccgcgggaacgtgtaaaaattcatgctattggaaaatagattgcaagaccataaaaagagcgtacagcaatttcatgctatacgctccgagactgtcgaaaaacctcgttttttcgacaatctgaaaggagcagccatagactgctcctttttcatgccattcggcgtatttggttttacttttgaacgatcttctcgcaccagcgctgcatgattgcggcgatctcggcacgagttgcggtgccggtcggggcaagaagactgccgcccttgccgttcagcacgctacatcaaggaatgatgtgggcaggcggcgtttttcttatccaatctgcacgacaaccgacctccgactttgtgggaattccatcttgtgacaatcttcggaaaccgatataatagaactgtaaaagcataggaaacaaagcggcattcgatcagcgtcaatactcctccggatgccgctttccgcaacagtcggaaaggagggactgttatgaccgaactgatgctgaagcttaccgcgttccttgcgatggtgatcgaccatgcggcggcgtgccgtctggacaaggtgttttttccggggtttagcaaggtgtatatgatttccagagcaatcggacgcatggcgtttccgatttatgccttctgtctggtcgaaggattccgccacagccatgatctccgccgatacggcgggcgtctgctgctgctcggggtcatctcgcagcttccgtatgcgtttacgctcaaccgctggtatctcgagcccgcgttcggagaggtgtttcccattaacccgagtcgggcgttccgaagcttaaatattctgtttacgctgtttatcgggttggttctgctggttttctttcgtaaaaagccgctggcgcgggtgattcagtccaaagggcttgcggtgctcctgctcgcctgcggcggcttcgcggtctatacggcggagccggagtttgactcgcgcttccgccggctgtgcaccgtgctgctccttgcctcggcaatcgcggtcgcgctgctgcacgtttggcgaaagcaccttgccctgcgggattggctcgcgcggtttgcggtgctcgtgtttgttgtgctgctgtttgagcggtatccgcttgcgcatctccggtgcaacatcgactccggtgtatggggaattttgctgattttgtgcctgtcgtatgccgagagccgatggagccgcgcgcttgttgttttactctggggtgcgctgttttattcctcgctcggtatgccggattggggtaagatctgcggcacggcggcggcagcgctccttctgctgctgtacaacggcgagcgcagccggaaaccgcacccgaagctgaacaaagccttttatgcggcgtatccgctgcacctcgcggtgatctgggcgatggtgattgcagcgaaaggtccgctgccgcagctcaagctgttgaagtattatttgtaaatcgcaaaaaaacagaccgacagagtgaatgtcggtctgttttttgcaggctttaagcggaaatcagcgctttcagctcgcttagcgtcatggaaaccacatcgccctcggcggtgagtgcgaccagcttgcaccgcgcatcggtatcggcgtactgctccttcagctctttcggaacggagagttctgttttctccgtacggaatttcatggaagctgccgtcagttcgatattcttggtgacattcgcaacggtgatggtgtagctgccgttccgattgttcacgaccgtcagcttgttctcgttgccatcgttgctgatcgtagcgaggcaattcttgccgtttaccgtgagtgcggtgagatacggtccgcttaccggtgctacggtgaaggtgaccgtgcctcttgcgcgaatctgattctcgttgccgtaatcattcggggtcttcttcacatcgcttacggtgtagcccttgtcgctctgcggaatcgaatacagcgtcagcggcgtctcaaacgcaaccgcaaccgtggtattctcgttcagattttcgatggtgagcgtgttggacaggttatcctgaaccgtgccgttgaccatccacttctctaccatgtagtctgttcccggagtgacagtcagaacgaccttcttgcccttctccacctgaataccggattcggaggaggcgtcgatggtctgaagtgcgtcgccatagccagcctgagcggtcagcgtgccatttgcgccgcagaccgttttcagcgtaacaagctggcttgccgcaaagtctgctgcaactgcgtgaccctcggttacatcgtccagcgtcagcgacagactgctgttgcccttggtttcgccgtccagcgtccagccggtcagatactggtttgcatccggtactgcggtgaggactacattgtcgtgacggcttaccgtcagcttgccgtccgcgattttagcgtccttgccgtttaccgttgcggtgacatggcccagaccggtcgtgctgagcgtaatatcataggtcggaatcggttcaaatgctacatataccgttgcttcatcggtcagattggtaatggtgtagctgttctgctcggatgtcgttccggtgattgcggtcgtgccgtcagccgccgtataccagcccttgacctgataaccgtccttcggctgtgccgtaaagacgatggtcgagccggcaggctgctctgcgccggagtcgaacgcattcgtgccgttcgttgcggagaagttcaccgtatacgacttgcggacgatcttgacccgcacatccatgccgacatcgtgcgttacctcatgggtaaaggtcgtaccggtttcaccatcctgcttgctgccgttcacataccagccttctacctcgtagccgtcatccagaccggaaacggtaaaggtgatggaaccatcggtggtcggcgtggtgccgctttcaaagttggtttccgtgccgctgttcggcttgaattgcgccgtaagctgtgccttatgcgccgcagcattcgcgctgtctgcctggaagccgtaggtcacctgcttgcccagcgggtcaaactgaacttcaaccttctgcgtagtatttacaatgtcgtttgtaatggtaagcgtcggctggctgccctgcttttcgccgttgagctgccatccgccggtcttatagccggtctccggcgttgcggtgaaggtaacgaccgagtcgcggtaaaccgtaagtgtaccagcggtggagtcggtcaccttgtagctgtccatgttcttgcgggtgacagtcgccgtgagcgtgccgtccgtgccgccgtccgtgttcggcgtcttgtcgatgacagaccagttgaccgtagtggtcgggattgccgaccagacaggcttgatggtctggttgccctgcaccttgctgatggtgtaggacttgttatcggttgtagtgccgtcgccgtcggtgtattgcggagcggctccggtaatatcgccgacctcgtagcccttacccggtgccagcgtaacggtcaagtcggtgtcgaagtctacatagttgccagtcttcagcgtggtatttgccttgccgtttacagtgcccttgaccgtaacggtaccgcccgtagcggtctcaatcgttaccttaggcttttccacaaaggttgcagagaagatagtgtttgcggtgattgcagcaatctccaccttttgttcaccgttcaccttgccggcattcggtgtactggtgtttccagtgccccaatccgcctttacatccgttgcaacataattattgcccggcgttgcggttacggttgccttcgtaccggagtagacatattttgtgccgttttcctcttccggctttacctctttatctttcagcgtgtatgttacgctgaacgtgccgatttccggcgattccggcggtgtaattgctaccgtaggcttcggccgaaccaccatgttgaccgtagttgccgtggtcaggctgtcgatggtgtaggtgaaggttttgccgttgcggactgccgctacctcgttaccgtttaccttccagcctacgacctcatacgcggtcggctcttcataggtaaaagtgatgctgctgtaggtcgtgcaaccgttgccactctgaatttctgcaccgtttgcggtatactttgcggtcagcgtgccgcctcctgcaacggatgggttcttctcatttacgataccgaaagatacctttgtcggcgttgcgctgtcgttgaccagtgcgcgtacccagatatcgcattgcagattgcgaatcgtgtagctcagtccggtagcgctcgtgttgctccagtcgccgtctggcttggtcttgtactgccagccggcaatgcccattgcggaggacggcttcgcggtcagcgtaaccgtagagcccttttcgcccttgccttcggtcagaccggtcgtttcaaagctcagagcaacaatcttgtccgtatttttctggtctacagcggaatagtgtacggtgaactgtgccgtctgctcaaaggttacactgaccgtcgtattcgcggtgatggtcagcttcagctcgttgccgctgaaaacagtgccgtccgtgttcttctggggttcggatgcgtctgttccgcgtttgaccgtccactgctttacaacatagccggtcttcggcgctgcggtaaaggtaacctcggtgccgctgagcacgtaaccagctgtcaaaacgccgcctactgtagcagtgacagtgccgttaccgtcattgctcagtgccgataccgtgtagaactggttggagaattcaacttgtacatccaaagcaccattcagactggaaatggtcagcgtctttttatcatcggagagggtgtagtcatcagtgcttttcgtcacttcaacaccgttcaccgtccatttccaaacctgatagttttcttccggcgtagcggtgaaaatcacattgctgccgctggcgatctgggcaccgctgttaaaggaggtcgaataatcgccttgataacccttcaatgtgccgttgttaccattggagtaggttaccgtgtaggcatttgccttcacaagcaccatggagcttttcagcgtaggcgtgtacttggagaagaattccgcctgcttgttggtaaattcgggaatgctttcatcgtaaaccacgctgacattgtatacaccggcggtcttatcggtcggcataccctctgtcttgaacaggtctgtataattatcaccaattacaaaacctggatttccatccttgtccgtaaaggtaatttgaccatcctgcgccgtgggagccgtaatcgtgatcggctttttgcttacggtgatatacttgctggccagcagcttatcgtctgctgtagcggtaatgcgataggtgcccggaaccagcgttttaccggattcccagtctgccactgcgatagtcgcgccaaccttgtaggcggcgtaggtgacggacttgtctgcaccggaagcactgccggagccgttgctaatcgttacgctcttgaggctcggagaaatcgtttcgccataagtgcagtcgcgcacctcaatctcatagagatcgtctgccgccttggcatagtaggtgactgcgccgctgcgcgaagccgccgtctcgctgttgccgccgaaaatcgccacaatgctgtaaacgcccgcctcgctcggtgtccagctgtaggagaccttggggtctccgggggatttgcttacctgctggcgcgtcacgctgccggtggtcgtgttcgtgatttcaaaggtgaccgtgccgttggctgcggcgccggtgtccgtgacattcacgttggcggtcagcgtaacgggctcgccctttacctgctccttgctgccggagaccgtaatctccgttgttacggcagcgccgggcttgaacagcttgccttcgccgttctgatacagccccgtcaccagagacaggctggtgtaggtgtttccattcttcgagtagtaggtgccgttccgctcgtagatggtgagcgtagtcggagtctcgtcttccgtagtataggtaagaaccgtatagtcgccctcggtcacataaacgggcgtcaggctgtctttacgataggtattggcagcatcgccgatggtgttcgctgctgtcatttcagtggtcgtactatcgctatttttgcgataatacttgtcatccttacgatacagcgtcagtgtttccgtttttcctgattcaccggcaacaccggttgcggtgtacaccgtataggttgttccgttgatttcttcggccttcggcgtccgcttgaagcctttatcgctgatctcatacgcctttccgtccagtgttatgcgatccgttgcggcggtcagaggcacagctgtgccagatacggtatatacaccgttggcattcgattcagcacccgccgtcagccccgtataataatgatagccagtactgtcactgccgccgaaaacatcgcctgtgattttatcgtcttcagtgtacgcatttttatacttctggtaggttgcattcccctgtttatactctgccgtgacagttttcttcgtctcgacagtagtttcatgggttgcattgccgccggtacggctggttcccagctcagttgtgctgctcgccttgtcgaccgtcagtttgaccgtattcgagtaaaccaccgacgatttttccgtcttcatattggtctgcgaaacgatgcagcggtattcggtgccgctcatgctcttcgtgggattttcgacagtcagattcggcgtgttctggttcaaatcggtccagcgtccgccgtccgttctgctctgtcagctataggtaacgctctttgctcctccggtcggggttgcagaaatggtaaatacagcatcggtaccggggcgaacgctcgtactctccggttgctgcgtaattttcggcatatcgccgtccgacagcgtagtgaccgccagcggatcggtataatccgtggatcttccgtctgtgccgaccgatttgagcacatactgatactgcgtgctcggctgtacttcggtatcggtcagcgtgtatttgccgtccttatcggctgccagaccgctcaccgtgcccaacagggcatacttcgtgccgctggtgttgttcggcatatagcggtaaacctgatactgcgctgccgtgctaaagccgctctcccactccagggtcacgctgttggtggtgacttccttggcttccagattctgcggcttgctgggcggctgctttacgttctgcaccagatagctcagcaccggaacattgtacgaaaggccgccggtcttcagcgtggtctcccagccgacaaactgccacgaaaagccgtatccttctgtgctcttcggcagatcgcgcacggtgccgctgcgctcgatgccctcggtggagatactgctcgtgctgctgccggtggatgtgccgccgctcagaccgaacttaaatccgcccacaccggcgccggctttggcatcaacattaaaggtaagctccttcgtgttggtcttcgtggtgtcgaacgctacggactgggacttggagctttcgccggcctcggttgcaaaccagccgccgttggtgcccttgttggtggtcacggcgttcttgagtccagtcgtcgtgctgcggtaggtggagggctgacccgccgtggaggcgataatgtcgctgccgatctggggatccccgcgctgtccggccgccgcgttatactccgagagcggaatggttttgtagatcggcgcgtccgctaccgtgatatccatcgtgctcttggagccgtccgccgacgtggtgttatagtgatagaccgtgaccggaatgcagatcagcaccacggcgctttccgcctgctcggtggaaaagctgtttgtcatggtaaagctcttctcaatttcaatggagttgttccactcggcttcaaacgcggtttcaaactcaaatccgcccagatcgactacgccgccaaaagagaaatcctgctcaaaggaaacataggcgccgattcggttcgcggtgctggtgccggaggaggagccgctgcccttagagaaggagattgcggtctcgccggcgttgttgtactcaatgtcctcgaaatacgggggcgcttccataacggccagcacctgcgggtcattataggcgtattccttgccctgatagtccgcaatgaggccgtcattgtcgatgtccggcgccgccagcgcgatttcggcgatgccccaggcgttcataccccagcggcagctgcgcagaccttcaccgggatcgccgctggcgtcatccatggcgttcttgcccttgcctgtatgttgatacggaccggttgctttgctgctctcatagtcagacggcttgtagtaatagccgccgatgttgacctttccgttgccgtctccggacgataccgtaaacaggatctgctcacgacccgccgcgttgccgtcaaagttgccgacgatcggctggttgatgatcttgcggtccttcagaacattatccagaccttgtgtctttgtatctgcgccgtccagcgttccgcttttggaattgtatttgaagatctgaccgcggataacgatatacggcacggtgccgcgtccgtcaaaccgcacgatacccagcgagcacgggttcatatactgcaagtacgaatcctgctcaccgacccagttcgtattgttgtcgccagtctgtttcacatagaagccggtctggcaggatacgctgttatgctccgacgtgtccaccttatagccgttgccggtgtatcgggtgatgactgcgaaatagccttcgtcatggaagttatcgtcattgtcgttgtcgtctgcaccgacaccggcggtgacgatctccatcgcgccgtcatggtcgatatcctccgcgcggcttgccgcggcgcgcagatgccagccggtatcgtgcttgttgtccggctgattggcggcgtacacatggctgaactgatagtgccagacggtctcccagttaccgttgccattcttggacagcaccatgacaaccgagccgcgctcgccgacaccgttctcaccatacagattgcccagcgaaacggtgacgatcagctcgcccttgttgtccgctttgccgtccagatccgccgcttccagatgtaccatggcggtgttttctgcgatacgctgctgactgtctttgtccagaagctgaatgtcattcagcgtcttgccgaaataattcttcagcgtttcgtcagtgccgatgttcagtacattttcaccgccgtgatagtctccattattgcttctgagcatcagattgccttttgccggatcataaaacaccacggtttccttgccgttgccgtcaaagtcacccgccgtgatagcggtatagccctcggcgttgtagccgctcagcttgctcatccagctgtaagcgtcgtttgcgtcagagcctccgtacttgatactgctgctgctgccaaattgacccgaatggtcatcaaatacatgcagcttcattttgtaatcgttgctgccagtatcacgcgcagcaccccagtacgcaactttatcatcgcgtccgctgccatcagggtcataagccaccgcactgacatagcgatagggcgagctctcacctttatcgatcttattgctcatcgccgacgcggtcgaaaacttcgtgctgtccagaccggcgtaatagtcgctcgaactgaatacgccgccgctcgcgcctttcagaatgctcgattcgtcaaaatcgtacacgcggctgctatagtaattgccgctcgactccaggatactgatctccttggtggggttcagattgcccttgatgtctttgctgttgccaaagggctgcttgccgtcgtctgctttaaagctgtccggtgtagacagatcaaatccgtattcatccgttgtggcagcgtctttgttgtccgccagcgctaccgtcggcagcatactcaggcacatcgccaaactcaaaaagagcgcaagagcctttttgcccaagcgggtacctgtcgggacatatgggatttcatatgccatttttgctttctcatattttctcctccttggagtctatttccggctgctttcgcagcaatcagacaagttgttccagtattttcgcgaaataccgcagcttggcgttgtgcgcgtcaccgctgtcctccgcgaatttcatctctgcaatgtcgaacaacaggcagccgcaatgtcccggctgggtcggaaagcagataattttcaaatacgtgtcgatttccgggctgtgggcgatcagctccagtgtttcaccgtagagtgcggcgcgttcgtagcttttcagccacttgctgtccatgttgggaaacacgctatggaacgagcgcccgatcagctcatgcagcggcgtcttttccagccgcgcaagcgcgggattggcatatcgaaaaatccagtcaacagcgtttttgtcatcatcgagcaccatttcgatatcggtgaacgcaatcggcagcgcatcgaagcagcggtactgtgtgtgcagctcgtcatcgggcacagacagcgtttcgctgtccagtgtgtcaatcagccgagagcgcttttcagccagtgctgcggtcagctcctttttgcggcgggcaacatagccaagccgttcgccgttgttgaggtttactttgtccgtaatgtcgtgtatcgccatcaccgataccagccggctgcggtgcaccttgaggaacgagtcgcccagtatgctttccagtcgctccagcgtgatcaaactcttgtagaccttaccgctggaggtgtgtatctccgccatgttttcgtgcatttgaatatacagaatggtgcggatatcaatcgaaagattctttcgattgcaggtaatggtgagaaaatttgttttttgcaagcacttcgccatcctttctgctgccgatgagggacggatactttgctcaccgcatcgacccaaaatcttactgtaattatagactaacgaaaccgaggtttcaagaggaaaatttgcaattcgcataatattgatgtctattcgccacatatgatccggcggagacctgctgtcccgcaacaccattcttagtataccgttcttgtggaacctgtaaatcatcccaaagtatgagagggaaggggacagacgaatagtacagggaatgtcccatcacgcagttaaagaaaatcgaaaagaagaaaatgggacagctgcattgggggtgaagttcaaagcagacagctctttcttcacacgtttcgttgactttttcactggaaatgcatataatgaaaatggacagagggcgtcatcccttatactgcaatgaacagcgctgataacgaagcaattcaaaattagcacataagggccgtaaagacacgaatcccctgctgagaatatttctcggcaggggattttcgtacatcgtctatttgagcaatctccgctatcatagaatcacaaaacaaagcggaggttgttacaatggaatggaaaaattcataacggacgaacacacaggacttacaaactggtcggagattattatctggttgccggtgatgaagaaccggagctgaaatcaatcggcatctacggtcagcgccatcggcgctatctatcgctgcaacggatctcagaggttccgtgttcgttcgtcggcgttacatttgcatttttgtttgtcgaaagccgtgttttctcgtcttttactccatgcgaagcggccggagcgcctcgtttacctgctcgatattgcggacaacgcggtctttctggcggatggcaaggctgacatacagcgaatcgatcagcgagaactgtgcaacacgcggcgaaacaaagagctggtcaggcgaataaagctcaagacagaggtcgctcgatgctttgagcggggtgtctgggaagccggtgatgccgatggtctgcgcgccgtgctctttcgccgtacggacggcggaaacgatctcacgtgtcttgccggtgtgcgagatcgcgatcacggcggtattcggcatacacaggctcgcttgaatctgcatcagatgcgagtcggtcagcgacaccgcacggaaaccgatgcgcatcagacggatgtagaagtcctctgcgatggtgccggatgcgccgacaccgagaatgaggatgttttcggcgcgactgagcacatcgaccgcctgctcgatcttctggaagtcaagcagctggagcgcacgctcgagcgtgtcgatgttgcggctaaacacactctcggaaatggtctgaatactgtcggtttcagacaaatcttcgaatattgttcgaactgatttgggcgaatacttcgcgagcagcagcttcatctcgctgaacccggcgcagccgagaatcttgcaaaatcgaataatactcgattctgcgatgcccagctcggcggccatctgctgaatgctgatcgaggtaatatgtaccggatcggctatgatatggtcggcaatccgcttcccaaccttgggaaaagtcgcatattgcgactgaattgcagcataaacgtttttatccatacgctcaccttttatctgtgtcatatt

SEQ ID NO: 12903 - DNA, 367 bp, Unknown
  gut microbiota DNA sequence
gaccttgtcggtgtccggctccttggagtcgagctggaacgggttcttgccctccgcgatgcggcgcgggtcatagcggtacagatgccagtagccgcactcgaccgccttcttcatctcgtcctgcgaggtacccatgccggccttgatgtgctgctcaaggcacgggcagtagcagatgacgatggacgggccgtcgtaggactcggcctcgcgcagcgccttgagggtctgcgcctggtctgcgcccattgcaacctgtgcaacgtaaacgtactcgtactgcatcaggattgcgccgaggtccttctttgcgacctttttgccgcttgctgcgaactttgcagttgcagaagtcggggttgcc

SEQ ID NO: 12904 - DNA, 4388 bp, Unknown
  gut microbiota DNA sequence
ggcaggcgagagcctgccgcttttcaatttgtggtgatcaccgaaggtcaggcgacgctttcggcttccctgagcatatcatcgatgcaaatcgcgtagccgcttgccgggtcatccaccagaacgtgcgtcaccgcgccgatcagcctgccgttctgaacgacaggtgagccggacataccctgaagtatgccgccggtctgcgcgagcagcgtctcgtcggtcacgcgcagcatcatgccgcggccgtattcgtcattttcgggatagagccgcacgatctgcacagaataacgctgtaccttgtcgccgtcgatgttcgcgatgatttctgcgtcgccggtccggatctcatcgcgcgccgccacaggaagagcgtcctgtccgctcagaagcgagaggtcggagagcgtaccgaaaatgccgtgcaccgtgttttttgttaccgtgccgatgggacgcgcgtcggaaaagtcgccctgaagcgcacccggagcgccggattttccgcgtgtcacagtctcgaccgtcgaatagatcagatcgccctcgctgagcggaagcaggacgccggtttctgcgtcgcagatgccgtggccgagcgagccgaacacgccggtctgcggatctgcgaacgtcagcgtgccgatgccggccatgctgtcgcgtgcgagaatgccgagccggtatacgcctgtctggtccgtgcaggctgtgacctgcacagaatgcgtttcgtcaccccgcttgatgctgagctcgaccgcgccgccctgcgccgccttgagcgcggactgaagctcggcattcgatgagacctctttgccgcccgcggaaacgatgatgtcgccctcgcgcacaccggcgtcgcgcgccgggcagcgttcgccgtccgctgtcgtcaccgtatcgagccgcaccacgagcacgcccccgcttttcatgcggatgccggccgtgtgcccgatcgggacgacctcgcgcacggccgccgcctgtacagggaacaggaaaacgagcgccagaaataccgccagccgtttgatttttgaatgccccactgctgtcacctccgctgttagcttgccgcggcgggcaggcgaaaacacatgtgaagttttgcttgccccggcatgaaacgggaaatggaaggaaaaccctgatgacacgaaaagagggtgaaaacgacggatattgcaaaaatacgcagaaaaatgtcaacgaaaacacgaaaaaagttgctgaaatgaattgaataacgtcagagagtatggtaaaatcttgaacatagaaaaataaaggcaaaacggtattgtctaaaaatattctgtgtgaaagtggttgataacatggataacatggttggaaaaattcgtattcttctggcggacagcgatggagatttctgcgcggagatggcggcgctgtgcgaggacgcagaggatatggagctggtaggcattgcggagagcggcgagaaggcgctcaccgcagtcggggagctgcggcccgatctgctcatcacggagctgtccctgcccggaatggacggtgtgctgctgctcgaacagctgcgcgcggcagggaacatgccggcggtgtttgtgctttcggcattcagcagtacgcaggtctgcgcagagtgcgcgagcctgggcgtggatgtgttcctgcgcaagccaatcgcggcggaaaaggtctgtgagcgcattcggctgtggcgctcgggcagaaaacgcatggcgcgcgaggagaacgcggtcgcactggaggtgcgcgtgaccgaggtgatccatcaggtcggcgtcccggcacatatcaaggggtatcagtatctgcgggaggcgatcatgatggcggtcgaggatatcgagtcggtcagcgcgatcaccaaggtattgtacccgtcgatcgcaaagaaattccatacgacctcgtcgcgcgttgagcgcgccatccgccacgcgatcgaggtggcgtgggaccgcggcgatctcgaaaccctgcaaagctatttcggctacacggtttcgggcgtcaagggcaaacccaccaacagcgaatttatctcgatgattgccgacagactgcggctgcagatgcggtttggggcgtaaagcaaatttacaacgcaagaagcagtaatatcattcagaaaatgatttatcggcataatatgcgtactatttacgctgttatgtaaatcgcagcaaatcacttgcaagcctgccaacataacgaaagtgtgagtgaaacgcaggttcaagcctataaactttttctgatattgtgaataaattcctcagtttattgggttcgcgtgcctgataaactgaggtgtttttttatgcgtgaaattgacagacaaatcgaacaattcctgacccattgcagcatgaagcagctatctaaaaagacgctcaaagcatacaatcagactttatatttgatggcaaattatttggagcagatacacagcatcacaagtgcagaacaggtaaaggcgtttcatatctctgcgtacattggctatttgcaggagcgtggtaagtatactgtggcgtgtaactgcaatcacacacagcagaattatcctgagcggcgtacagactacaagcgcagcatttccaaaacaactatcaacaattatattcgcaatatgcgcgtattctttaactttctggtggaatttgattatatcgaacgcagtccgatgcgaaagataaagcagctgaaaaatgcgcgtcattctgtggattttatcacagacagccagtttgaaagcattattggttcacttgatatggcaaaattccatgagtaccgcgacaaggtgattatcgaactgctacttgattcgggtatgcgcattggtgagtgtttagccattcagatgagcgatatagacctgctcaaaaactgtatcgttttgccatgggaaaacaccaaaggcaagaaaacgcgcacagtgtttttcagcaacgaggttcgcaagtccctgcggctgtggattcgccacaaggacagctttatagagagtgaatacctgttcccttccacgcacaatcgcgcactcagcgtcaatggctttgaaagcaacatgcgtgtttacggcaatcgagcaggcgtgccgaatgtttccccaaaggtgttccgcaataactttgcaaagcgttttctgctcaatggcggcgatattttcacgctgtcgaaaattctcggacattcatccgttgctattaccgaagcggcctatctcgatttgacagatgatgatttgcgggaacagtatcagcggttctcgcctgtggcaaatatgagggttaggcagtgaagcagccttgaagtggacaaggctatatatgctatcaaaaattctgaaatttgtcaagtaatttgaaaatcagtcgtttgattctcaaaaatcttgcaatttttccgcaaatggtgtaatatacctacatcacgaatgcagcttacagaaagtgtaaaagcgttccgaaaatattctataaaggaggggtcatatgcttaatgacctaagtgccctaacaaacgaagtatggagcatgattgctgaatttcctgattatcaggtatcaaatcacggcagggtaaaacatatttaccgcaacggcagagaatacattttacacccatggttggatagatatgggtatcctacagtacacattcacggaacaacacagcgcgttcatcgactggtagcgcaagcctttatccccaatccatggaatttacctgaggtacaccacagaaaccgcaatcgcgcagataaccgtgtagaaaatctccgttggtgcagcagacgcaagcatatgcgtaaacatcacataggtattcctattgtgtgtctggataaggatacttatgaactgcttaacacatatgactctgccgcagaagcagaaaatgacagaggtattccgcagagaagtattcgttcctgctgcacaagagaaaacaatctgtgcggcggctatcgctggatgaatcttacagactacaacgaatggataaatgaacagaagcgtaatcacgcagcttaacgatattggacgagcgggagcactcccgctcgttccacatttaatagagtaagcattcactttgcatcctcagcgttcacacgcgctgtaatgcacgtttgcgtttttgccgtgtcctatacgctgaaaaggggaaaattcgagagagttcaaggaagagcacgaggaaatgttttgaacttttttgtgcgtttaacctatattattttaataatattagaatttttataactttttattatcctcaagggttgacgaatgaaagtgtatatgttatactatccatgtaatcaagagagcatccgaagtacaaggcgt

SEQ ID NO: 12905 - DNA, 13067 bp, Unknown
  gut microbiota DNA sequence
acctcggtttttatactcccagagggagaaagtttccgaatgggaactttcggacgtctgtgttttgcgaagtcaaaacacatcttgtcggaaaagcgttagcttttcgacaggataagacgcccctcagtgtgccgatttatcgacgcgctgaggggcgttaggctgtgtccaaacttcgttcggcacagccttctcgattcaaaggctttgcctttgaatcgaagtcttaaatctttaccgtccagcccatatcgtcgggcagcttgccccactgaatgccggtcagggtgttgtacagcttgtgggtgatctcgccgatctcgccgccattgatgtgagcaacatcgccctcgtagcgcagttcgccgaccggggagatgactgctgcggtaccggtgccgaatacctcttccagcttgccgtcgtgcgaagccttcatgacgtcagcgatcggcagacgctcctcggataccggaatgccccacttcttgagcagctcgatgcagctcatgcgggtaacgcccggcagaacggtgccgacggtcggagcggtgtagaccgtgccgtcgatcttgaagaagcagttcatggagccgacttcctcgacatacttgtgctcaacgccgtcgagccacagggtctgctcgtagccgagatcgtgtgccttgacctgagagatcagggatgccgcgtagttgccgccgcacttggtgaagccggtgccgcccgggcatgcacgggtgtactcgtcctcgacgaagatctttaccggattgatgccggtggagtagtaagcgccgaccggagagcatacgatgatgaacttgtgggtgcgggaggtgcgaacgcccagatgcggctcggtcgcgatgacgaacggacggatgtaaaggctggtgccctcagcgtgcggaacccagtcctgatcgaactcgacgatcgccttgactgcctgaacgaaatcctctaccggcaggctcggcaggcacatacgatggttggtgttgatcatgcgctgtgcgttcttgtcgggacggaacagctggatggagccgtccggggtgcggtaggccttcagaccctcaaaggactccattgcgtaatggaaaaccatcgctgcaggatcgagctcgagcggctgatacggtacgatgcgggcgtcgtgccagcccttttcctcatcgtggtcgatgatcagcatatgatcggtataatgcacgccgaaaccgagattgccctcgtccggcttagccttaggagtagtggtacgttgtgttgtgatctgcagcatggtttgtcactctttctgttgtggtttagtttcaaacattattatagcactctgttctgataaagcaagagcaatagcgcataattcagatggaaacagtggggatatatttatacaaattttgcgaatatcggtgaataaacggcatgaaaatacatagggcaacaccgcacaatgaaagctgcggcgctttgcggaaattttgtgccctgacttcgttgcaatttcacggtaatacatcaagtattaccgcaaaaccgcgccttgtcagcacgcaaaatttgctcgcaaatcgctcttgttcaattatgcggtattgccatagcggctgtgcttcggcagattctgcgccgggtgcaggcggtttccgcaaaacggcatcgtgacaaaccgccggaggtctggtataataggatatactgaaattatatgcgcaaagatgaggtgagggcagatgaaaaagggcatcagacgcatcctgagcgggctgctctgcgcaggcgttctggcgctcggcattcctgcgccctcgcgtgcgctgacgctgacggcggtcaacgacagcatcctgccgctttcggacagcaccatgccggcgcgcctcggcggcgaagtctatgtgccgtacagcgtattttcgcagctcggcgtgtccgcctccagctcggacggcgtgctcgacctgtccgcaaacggcgagacgctcagcttttccccggcggagggctatgtctatgaccagaacctcaacagctattccacaccggcctattcgatgaacggcacgacctatgttccggtcaagctgtgctgcggcaagttcggtctgagctattcgacgctcgcggtcgcgggggagaccgtgctgcgcgtgaccgacggctcggcgtcgagcgactccgcgtttgccgccgcaaaatccggtacgatcgaaaacacgatcaacagttacaagggcatttcgtccgcgaacggctcatcctcgaacggcgcttcgtcaaatggcggcacggcagcgaagccggacgagacttccattccgaaggttgaggaaaagccagcgcgcaagccggcacgggtgtacctgacgttctacggtgcgccggacaaaaatacggcggctgttctggatacgctgcgtgggagcgggcgcacggcggcgttttttctgccggtcaagtcggcggactggacggatgacaccgtgcgccgcattgcggccgagggacatacgctcgcgctgctgctcgatgcggacgaaaaagcctccggggacgcgctcgtcgagcagctgacgctcgcaaacgagcggctgcgcctgctgaccggcgtacagacgcgcatcgtctcggtatccacaggctgtgcacagctttcccgggcgcagcgcgacgtgctgatcgccgcaggctaccgcctgtgggacgcgacgctggacgccggggacgaaaaggggacggcggcccgcgcttacgccgaaaccgcgcagcgcttttccgaaacgaacgccacagtcgtgctcagcctgcaccacagcaaggaaaccgccgaagcggtcgagctgatctccgcctatatgtcgcggcagggcatcccgtccgggacgatctcgctcgccctcacgcccatcaacggcgcaaacgagacaagataatacaggcagcaccgcagcttccattatgcggtattgcatcaaaaaccgcctgctttcacggatttcgatcgaaagcaggcggtttttctaaaattgagtcttttctacgcgcataacgatggcggtgcggtcgtcgtcgctgccgcggccccgggcctcggtgacaagccgcgccgcgagctccttcggcccttcgccgccgtgctcgcgcagcagctcgcgtacccacgcatcatccagcccgtcggacacgccgtccgacaccatgatgaacaggtcgccgtgggaaagccgcagcggcaccgactggctctggtttttctcgtcggaaaggccgacgggaagcgatttcccggcgagcacgctccagcgcccgtccgtgcgcacataagagggcgccgcgccgcatttcaggctctccgcctgcccggtgaacaggtcgagcgtgagcgcgtcgagggtgacgaagcgcgtgccgtccgagcgaagccgcagcgccggagagaccgcgccgagcgcatcgccgagcgggattccggcgcggagaaagcgctccatcgagctgacgagcatgcggctgtcctgcgcggcggccgcgcccgagcccatgccgtctgcgagcagcagacaggcaacgccggcgtcggtcaggaaccagcagccgctgtcgcccgagaccgaaacgcccgagcgctgctgtctgccgatgccgacgaccgcgcggaacggcgctcgctcgtgcatttcaaggcaggtgccgaactcgttctccatctcgcgcggctcggtcagcgcaacgtcgagcagggcgctcagtccggcggaaaagccttcgccctgccgcaggatgtccgcgatgccgtcgccgtacagctcgacgatcagccgcccctgcgcgtcgcgcaccgcgcacacgcggtcgatccatccgaacgccgccgcatagcggcggatctgcttttccatcatcggctgcgcggtcacgtcctgcgtcacctccgcgccgagctggcggaggatgtcggtgatgccggcatactgccgcgcgagcaggctgcggttttcctcctgctgccgccgcaggctctgccgctcgcgcagcgcgaagagtgcgctgttgatggcgcggatgagctcgggcagatgtacgcagcgcgaggagaaatgatagggaaaatcctgcatttccgcgcggccgcgcgcgagcatgggctgcgtgacgtcgttcagcgccgcgagcgtggtcacgtagtccttctgccagcactgtgcgcacagcacgcagctcttgcacacccggtcgctcgcccggtcgaatacaacgcgcaggttttcgtctcctgccgcacggccttcggccgcgccgctcagcatggcgagatagagctcgtagaacgcctgcgcggcctcggtcgcgcagtgaccggccgcccggcgcagcttgaggcgcgttttttcaccgacgagcgtttcgggcagcagcgtgcgccgtagcgcattccagaccgcctcgggcagcgacgcgaacagcagcaccgccgccgtcagctcggacaggagcggaatgaacaggtcgctccccgtgccgagcatggaggcgcacaggccggaggtgaacgcgcagacggcgaaccttgcgcgtccgccgtcgcggaacagcccggccgcgagtgcgcaaaggccgtaacagcaggtgaacagcgctcctgagcccacgccgagatccatcaccgcgccgaaggcgacgcctgccgccgcaccgaccgccggtccgccgagataggctgtaccgagcacgagcagcagcgccgccgccctcgccggggcgaacagaccgaacagactgacgtgcgcgaggctcagcagcacggtcgcggtcacagcgagcagcgtgaccggtctgcgccagtcgccttcctcacgcggcggagcgagcgccgcgccgtaaatgcggcacgcgccgaacgtcagtccctgcacggcgagaaaggtcatcacagccggggcgcgcagctcgtccccggccggcagaaagatgaatgtacaggcggcgcctgccgctgcggcgacggccggggcgaaccacgggcgctgtacgacgcgcagaccggtgcacacgctcatgacgcacagcacgatgagcgtcgcggcgacgtaaacgccgccgagcaggccgtcgtcgatgagcatcgcgccgcagaccacgccgccgacggcggaaagtccggcgccgtgcgccatcatggcgctcgccatcgcgagtccgaagggcgcatagctgtcgaaaacgttcgcctgcatgagcagcgcacacagcacgaaccgccgcgtcccgacgagcagacgatgcagatgttcctcgttccacaggcggaccgcgatgctcgctgcccttccgagcagccgcggcgcacgcctcactttttgcttgtccattttgaaaagcctccttcactgctcattcagtataccgcagactttttgcaggagttggcggaaaatacaggcggaaataaaggcaataccggttttgatgtgcgaaaaacggcgatgcaggagaccggacatttcctgcgccgccgtttgttcagaagagcgaggcgagcaggtgcacgaggctcgcggtgagagcgccgagcgcgaaggcggcagggagcagacgggcggacacgcgcctcggtctgcgccgcctcgagccgagacagccctccgcgatgcggcaggcctcgcgcacggcgtcaccgcgcggaaaggccggatcgcgcacgaggaaaatggcctgctcgaacgggccgccgctctccggccgcaccaccacaacgcgccggctgataccctttaccatgaaaaacacccctttcacggtaaggattgccggatttagcgtatttcatacgtttcgctcgaaaccacgcttccgcgcgaaataccgaccgattttatcgacaggctgcggcctctatatcgtccattcgggcggcgtgcgcatgaaaagttcgttgtggagagctgcgagggcgtcccatgtcgcgcggtcggtcacgccggtctgcggcaggataaacacgccctgcatcagacgcacggcggcggcggtctccgggtcgtactcgcccgtgaggggaacgggcgcggtgttcgcgtagtgcggcgcggcagtggcgagtatcagctggagcacgaaaaccgcgcggccccggctgccgggggcgagaacgccgcttctcgggaagaaaagcacggcagcgggcggcgtatcggcggcgaaaagctgcgccgcggcggcgtagatgctgtcccaggtttcgcggtcgactctgcccgtgacgggcagtccgcattcgcgctgatgcgctcggacggcctcggcggtctccgcgccgtaaatcccgtccggcacgagaggcgatacgccgcgctcctgctgaagccgccgcagacaggtttgcaaatcgtaaatatgctgcgatttctgttcctcgctgtacattattcaccctcctcgccgagcgtgtagccggggtactgcccggcgtttacgagggaggacgcctcgacgtcggcggcgagccgggccatgccctcccatgtcagcggcccgaccgcacccgtggccggcaggccgagcagcgtctgcacaacggacaccgcgctttcggtcgcgtctccaaaaatgccgtccgccgtgacagccggcacctcgggatagccgcgcgatatgatgttcacaagctcctgcgcccggcggacgtcctcgccgcgcattccgctgacaagaaacacctcgggcaggccgacgaacaactcgagccactgctgttccggctgcacgagcagcaccgagcggtaggtcgagagcagcgcgtcccacgttgcgcggtcaaccacgccggtcacgggcaggccgagcatccgctgatagctttcgacagcctcgcgggtctgacggccgaaaacgccgtcgagctgcgacgcctgccagcgggggagggcatcgtagtattcgcccacgatggcgagaaaatactgcaagagctttatcgaaacgccgctcgtgccctcgcgaagctcctccgggtactggcgcgagatttcttcaagggtgagtccctcgctgtccagctcgctcaaccgttttacattgttaaagacagaggcgatgcggtaccatgtcgcgcggccgaccagaccatcgggcgtcaggttgaactggcgctgaaaggcgcggacagcggcctcggtatccgcgtcaaaaatgccgtccgccgggtagattttcggaatgccggggtagttggtcgaaatgcggttgagccgcgtctgcacggtgcggacgtcctcgctgttctcgccgagccgcagcgtcacaccgggaaacgagccgccgagggcgggcgcaagcggggcgtccgtcacgaagctgatgtcgtccccgtagaacgagcgcacgatttcctcggcggaaagtccctgctcggcgagcgggaccgtgccccactggctaagcccgccggggcaggtgacggtcgtgccgttgcagtattgcgtaaagagcggctcgaccgcgtttccgcgcgtgagatagctgccggtcatgtcgtccacgatgttcgaaatgttctcgaaaatgtcgcgtccggcgacgaaagactggtcataccgggtggaattggtgatgtcgaagtcgtacccctgggcgcggtaccactcggtaaatatccggttgagcgcgtaggacatctgggcgtagatgttcgcgcggatggcggcctcgggccaggtcgggtagatttctgaggaggcgacattcttgatgtagtccgcgaacggaacggtaacgttgggcgcgtcggcgctcggcgcaccgaggtgcacggtgatggtttcgggtatggtgacgggcaaaaaaatcactccttttcgggcagaggcgtgagcgccacggggagcaccgccggcaccccggcgaacagcgtcacgtgcagggcggtgagcggcacgaagccttcccgcatggcctcgactgtgtagagcgcgtagggcgtgacctgaccgggggcgagcgaagcgctgcgcggcggcgcggcgagcgtcatgggcggcgtcatgccgtcccggtcggtgcggaccgcgtagagcagggtgcgcgtgccgttttcgtccggtgcggtcgataccgttacgagcgcgttttcgagcggctgtgcgccgagcgcggtcgtgaccgcgacgcgcagaacagaggtgtccggcgcattttccatcgaaagacctccttgcaaaacagggcgaacaaacttataatatactcacagagttttatttttcggatacaaagaaaggcggaattacgaatgcaggattacaaaaccatctgcgatatgtgcgcagaacaggaagaaaagtttcagttcgagcgcttttcacgccgggatgcgctgaatatcggactcaagctgatcgaaaatgcagagaagcaggcgcagccggtcgcggtcgagatcacggtgaacggccttgtcgtgttccgttatttcatggaaggctccaggccggagagcgagctgtggctcgcgcgcaagcgcaacgcggtcgagctgaccgagggctcgtcgctccgcatgttcgcggagatggaggccgccggtcagacgttcgcagaccgcaagctgtgcggcgacgactatgcggcgggcggcggcttcccgatcgcgctgcgcggcacgggcgcgatcggctcgatctgcgtttccggctttgatgaccatctcgacgatcatcagctcgtgatcaatacgctcgcagagtatctcgcgtgagactgtcgcgaaaccgagagtcggagagaaatctccggctctttttttatgccagccggacccggaaacgctgcgcccagtgctcgagctggatgatataggcgcagatctgcggcacgcgcatcagctgaccgaaccacggctcaggcaggctgtcgggatcaaggatgagccgctcgacggcttcgcggtcgaacagagcggcggcgaacgaattcctgtccgcaaggatgcggcgcgcgccctcggcgcaaagacgggcgtaaaccgggtgaaaggttttcggatagggacttttccggcgggaaatgatcgcttcgggcagctcatcggcaaacgcgcggcggacgatgcccttttcgcggccgtccagcgccttgaacgcccacggcatattgtaggcgtactcgacgatgcggtggtcgcagaacggcacgcggacctcgagtccggaatacatgctcatgcggtccttgcggtcgagaagggtcgccatgaaccagtcgaggttgagcacgaacatttcgcgcatgcgcgcgtccttcggactgtccgaggggagcctgggcgcacggcggcaggtcgaaagatagtgctcgcggacgaattccgcgccgtttttcacgacgccctcgcgcagcaggccgagccgcagcgagaccgaccgcgaccacggaaaggtgtcctcgaacaggatctcctcgcggtggtaccagggatatccgccgaacagttcatccgcgcattcgcccgacaggcagaccgtcgtgccgccctgcttgacggctgcacagaacagcagcagagaggagtcaacgtccgccatgccgggcagtccgcgtgcctcggcggcagggcggagcgcagcgcagaccgcctccgggtcgagtacgacgcggtgatgatgcgtgccgagaaaatccgtcatcagcgccgcaaaatcgcggtcatcggtcggctggaagctatttttgacgaaataccgctggttttcgcggtaatcgaccgaccaggtgtgaagcgtctcatttcgggccgcataagcgcgtgcggcgacggcggacaggatggacgagtcgaggccgcccgacagaaagcaggcgagcgggacgtcgctgacgagttgccgctgcgcagcatcggtgatgaggtcgtgggtgcgctgaacggtcgcgtcgaggtcgtcctcatgctcgtgcgcctccagacgccagtaggcggtcctgcggaagccttcgggtgtcagcacggcaaagctgccgggcaggagcgaggatatgccgcggaatacgccgctttcgggcggccgcgcagggccgagcagcagcacggtgcgcagaccgtcctcatcgagcaccggctcggcttccgggtggcagagcacggtgtcgatggtcgagccgaacacaaggccgctgcgcgtcggacagcagaacagcggcttgacgcccagacggtcgcgcacgaggacgagccgccgctcggccttctgccagagcgcgaaggcaaaaatgccgtcgagccgcgcgaaggcgtccgtatcccattcgagaaaggcgtgcagcacgacctcggtatccgagcggctgcggaaaacatggccgagggcggcgagcgaatcccgcacctcgtctgtgttgtacagctcgccgttgtagacgagcacggtgttcccgtcgggcgagagcatgggctgcgcgccgccctcggggtcgatgacgatcagcctgcggtgcacgagcgccgcgtcggggtcggtatagacgccggacgcatccggcccgcgcggccggagcctgcggtccatcgcgctgagcaccgggccgccgcgccgcgcgtcgcggtcgaaatcgacaaagcctccaattccgcacatgaaaaatttcctcctgtaaaatttattttgccgggacttaacatttgtattccaaagcaaccagtaatatgcaaagagttcaccaagagtttgccaaaaaaatcacaaatgcaacaaatgcgtgcatttatatatagcgcacgcacatttttatagaagatatgcataaaaatggggggaggtttttatggaaaaaaagaatgttaaatccttgacaaatgacttccggacagtataatagagaatagacatgctccaaagtagggtgtcagcacctgaaaagtgtcctgcggcagagaggctgatggacactgtatttttgtgttttacccacgatttatatttttgggaggtttatggcatggattttaggcttacaaaagaagaagcactgttccagaagatgtgccgtcagttcgctctgaatgaagtagagccgatcgcggcagagatcgacgagcaggagcgttatccggaagagaccgttcagaagctgatgaagtacggtctgatgggcattcagttcccgaaggaagtcggcggctcgggcggcaactacgtctgctacaccatcgcgatcgaagagatgagccgcgtatgtgcgaccaccggcgcgatcatttccgcacacggcactctgggcgcttggccgatctacgcgttcggtaccccggagcagaaggaaaagtggctgcgtccgctgatcaccgccaaggaaggcgctaagctcggcgcattcggtctgaccgagccgaacgcaggcaccgactccgctgcacagcagaccgttgctgtcaagcaggaggacggctcctacatcatgaacggctccaaggtattcatcaccggcggcggccgcgctgatacctatgtcgtattcgctatgaccgacaagagcaagggcaaccacggcatttccgccttcatcgtcgacaaggacgatccgggcttctccatcggcaagatcgagcacaagatgggcatccgcggttctcagacctctgagctgatcttcgaggacgtacatcttccggcagaccgcctgctcggcaaggagaacggcggcttcaagatcgctatgatgaccctggacggcggccgtatcggcatcgctgctcaggcactcggcatcgcgcagggcgcactggacaaggctgttcagtacatgaaggagcgcgtacagttcggcaagaccctcgacaagttccagggcctgcagtggatggtagcagacatggctacccagatcgacgcagcacgcctgctcgttcgccgcgctgcattcaaccacgacgttggcctgccgttcaccaaggaagctgctatggccaagctgtacgcttccgaggtcgcaatggacgtcaccaccaagtgcgtacagatctacggcggctacggctacatccgtgagtacccgatggagcgcatgatgcgcgacgctaagatcaccgagatctacgagggcacttctcaggttcagagaatggtcatcgccggtcaggtactgcgctaagaaaaggaggaaaactgaactatgaaggcaattgtttgtgtaaagcaggttccggatacctccggcaaggtagcagtcaatcccgacggcaccctgaaccgtgcatctatggcaaccattatcaacccggacgaccttaacgctgttgaggccgctctcaagctcaaggacgcaagcggctgcaaggtcgttgtcgttaccatgggtcctcccccggcagagggcatgctgcgtgagctgatcgctatgggcgctgacgaaggcgttctggtttccggccgtgagttcggcggttccgataccttcgcaacctctcagatcctcgcagctgcgatcaagaacatcggcgttgaggctgatgacattgtattctgcggccgccaggcaatcgacggcgataccgctcaggtaggctctcagatcgctgagaagctgaacatcccgcagatttcctacgcagcagacgtcaaggtcgacggcaccaccgttaccgttaagcgtatgctcgaggacggccatatgaccatcgagacccagaccccgtgcctgctgacctgcatcaaggagctcaacacgccgcgttatatgtctctcggcggcatcatggactgctactccaagccggtttccgtactcgactacaacgcactcaaggacgatccgctgatcgacccgaccaccatcggtctgaagggttctccgaccaacatcttcaagtcgttcactcctccccagaagggtcagggcaagatgctcgagggcgctgacaaggctacctgcgagactctcgcagctgaactgctgaagaagcacattatctgatcgaaaggagaacacttacaatggctgatttcaataacaccaacctcgccgatttttccggcgtatgggtattctgtgagcagcgtcag

SEQ ID NO: 12906 - DNA, 837 bp, Unknown
  gut microbiota DNA sequence
ttatcgtcgacacgctctcggcaagctacgacaccgccgcgacgagcttttacaagaacaatcagcaggtcatcgacgccagacgcaatcaggcgacgctcgacgagacgctcgcgaaggtcggcgacacgtccgcgaacgtgaaaaaccggctgtgggagctcgccggtgcggcggacgacggctcggtccgcgccgggtcggcgctcgactggatgcagacaaaggccgacgccttcggggcgtgggtggaggggctggacctgtccgccttccaggcgcaggtcgaccagaaattccgccagtcgctgcataaggccggagaggcgctgcagtgggtgcgcgacaactcggacacgctgatcggcgtgctgaaaaagctcgcggtcgcgtggggtgccggcaaggtactcgccttcgcgagcgcggccatcacgacgatacagactatcggcggatttatcaagacgctgcgtgcgctcgacggcatcggcaagctcagaggctttgcagacggcacgatgaggctggtcacaaatgcagtcgagtggacggtagacaccggtgcaatcattggcaacaaggtcgcgctgctcgcgcacaaggcggtcggcggcgtagtatggctcgcaaagcagatcgcgtcgctcggcgcggcaagcgcggcgtggatacacaacaccgtcgtcatcggcgcgaacaaggtcgcgctgctggcgcacaaggcggccggcggcgtggtatggctcgcaaagcaggtcgtggcgctcggcacggcaagcgcggcgtggattcacaacaccgcagtcatcgtcgcgaacaaggtcagccttgttg

SEQ ID NO: 12907 - DNA, 3108 bp, Unknown
  gut microbiota DNA sequence
atctgaccggtccgcgccgtctcgttggcggactctacgaggccctcgatcggcagcgagtcgccgaacgtgccgtgcacgccggccgcgatgcgcgcccacttagtcacttcttcctcgtctttcgccatgttcgcgagcagctggcttgcctcggtggcggtgtccgtatcaccgaggatcgcgtagaaattgcgatagctcttgcgcgcagtttcggcctcaaagcccgccgcctgaaagccggcgttcagcttgccctgtgcgacgcggtattcctcggtcgcgccgtcgagcgccacaaaggccgccgcgaggccgctcaccgccgcgcccaccgccacgacgctctttttcgaccagctctgcaaggccttgagcgagtcgttcttgaatttaacgacttttcgcgtcgcgctcatcatgctgtcgtcgatctgcgcgccgctcttcttcgcgttcttcgcggcctgaatgaggccgcccgacatgttatcgcgcaggttcagaactgtgttgataactttgtttttagccatcctcattctcctcctcttcctgcggcgtgaatgcggccgcgactccggccgccgtcatccaccgcatttcctcataaaagcgcgcccggccgacgcgcagcaccgccctgtccgcgagggacatcgcgcgcaccgcgtccggcggaatgccccgcggcgcgtaaaacgccgcaaggtcgagcaccgggtcgcgcattacgagttttttgcggcttcctccgtccgtgcctcggccttctcgccgatgaggccgagccatttgtacagctttccgccgagctggtcgatctcgtacggctccatcagcttccagacagtgtcgtacgggtcggtcacgccgagcgccgcgtgcagctccggctcctgaagcgccggacagcagtcgtaaataacgttcgcgcacgagcgcagcagcgccgcggtgtcgcccgagttcagcgcctcggcgtagctgagctttacgtccacgcccggctgcacaaagtcgagctcctcgcccgccacataaaatttcgcgcccttgcgctttgcctcgtcgcgctgctctgcgcgggcagagagcgcctctaagagtttcttatccattcacttaaatctcctttaccacgggcagcaaaagcccgtaatctcgctgtacgagcgcttcacgcgcccgacgccgccgctgtagttaccctcgaccgtctcgcacgagctcgcgccgcccgacagcacgataccgatgtggctgctgccgatgatcatgaggtcgccggccttcggcctgtacccgctcgcgactgtcttgaacttgccgcggcgctcgaagtagctgcgcatctcgctgaccgccgtgtaggtcgtcgggatgggcgccgatgcgtgctttgcgcaccagcacacgaagatcacgcaccacgcgacgccgtcgcagcccatctcggcgccgtacttcgtgcggttgccgcttccctcgcggtagccgacttcgccgagcgcggtgttcacgaagctctgagccgagccgccgcccgacgtgccgccgaggatggccgtgccggtcttgcgtccccacgagttgcactccgcgttcgtccgcatcagcaggtcgaagtgataaacgccgttctcgatctggatcgcgccgccgcggtcgttgaccgtataggtctcgccgtcgaggcttgtccccgtgccctgtaccgtcaccttcgtgccgaagggcaccgagggcggcgcggcgcacgttttcttcgacgggtcgagcttgttgccctgcgcatccagaaagccgccctcgagggcgttcgccgccgggtagtacgcggtgaataacgctttgaccgtcgtgccgccggacgcgccgccgccgagatcgggcagaccccataccttgacgctgtccgcactcgccgccttgacggcctcggcgctgctctttcctgccgccgccgcgcgcggctcatcgagcgccgagatctcgaggctcatcacgtgtccggcgccgccgtactgatgcgtcacgctcgtcacccggtgccgcccggaaatgccgaaggcgggcgagttgaagtccagcaccacgccgctcctcacctcgtcgcacccccagatctccgagatctggcgctttcgcccgacgcggtccgcgcccgcgagcaggttgcgcacccgctgaccgagcgccgccgtgcccgggttttccgtcacagtctcgaccttctgcaaaaagccgtaccgcgcgatggacgccgcatttgacgcctgcgcgccgcggtacgcccggccgtcgctttcggccgcgatgacgactgcgttgtacgtgtccgagatgctgtcctcgcccgagacttccccgagcgcccacgtgatgtcgaagcccggcaggttctccgccggccggtgcatcgccttgatggcgctcgtcggcagcggcgctaccacgagcccgcgctcggcgacgtaataataatagttcttacccgtctccgcctcggccgtctcgagcacctcgtcgaagatgtccgccggggtctttccggtccagagctgcgtgatcttcgtcggcagactgcacacgctcgccacgctgacgcccgccttcgcgctcgcctgccggatgacctggtcggccgcgaggttgttcacctgcaagatgatttcgctcttgttgaggtaccagcctctgtcgtacgccgtcactgtcccgtccagcgtcaccgtcacgacaacgcccgagaacaccgtattcccgtggtttacgatgcggatcttgtcgcccggcgcgaggttcagcgcaggcgtgtacttgtcccacacggacttgaaaatatggaaggtaacctcgacgctgagtgcgtcgaggtcgtcctttgccgtcaggtcgccgcagaaagcggtgatgtcgcgcgccgccgcgccgtcccggtacaggatgacgcggtggtcgtccacatatccggccgccatgacttaaatgctctccagcaggtcgaatttgccgaacttaaacggcacctcctcttctactttggccttcttctcgaacttcgcgaggtaaaactcgtcgatggtaacgtccgaaagagcg

SEQ ID NO: 12908 - DNA, 26544 bp, Unknown
  gut microbiota DNA sequence
tgcagggcgtttgctttccgctgcgaaaagctccgcttccatcaagggtgtacccttggagcaccaaacgcccctgtgggcccctcgcatttagacgcgcgaccgaagggagtcgcgtcctaaggaagatgagggggagttaagagggggataagaaaccatttggtgtcttatccccctcttgcccccgccggtgggcaccggcaatccctcggccgtggaatacggcctctctcgcctccagcggcgcaccgctgtatcagcggaaaattttgcgtctgctgacggtatagcagaaaagggcgctcatcgcctgcggcggcaagccgccggaacggcggaaccgcttaccctctgctgagaggaaagaaagaacggcatctcagctgagattagagaattctctctatccctcccctctctattatgatataataataaaaagaaatcccggcggcggcagccgccctgcaacaggaggtaacacactatgccatggtgcccgaaatgcggcgcggaataccgcgacggctttacccgctgcgcgtcctgtgatgtgccgctcgtcgaccgcctcaccgacgaacagtcaaaacaggcaaacaagtcggagaccgagcgtgaatgtgataaaatggtgctccccgagggcatgagcagtccgatcgcggtctacaccgcaaaaaaccgtctggaggccgagtccattgaggaaatgctgcgcgacaacgatattccggtatttgaccgtccggcagcgttccgccagattcagtcctacagcggcgcggacgcgcgcttcggcgtagagctggtcgtcgatgcctcccagacctcgcgcgcccgtcagctcatcgagcagatgcaggctgcgcttgccgaaaacgagctttccgaggacgaccttgcccgtctggctgaggaacaggccgagcaggagcccccggcagaggtgcaggacaatgcgtccttccgcctgctgcccgtcatcgcgggcgttctcgtgctcgcgctcgtcgtgctgtattttgtcacgcgataaggagagatagctatgccctggtgccccaaatgcggctcagaatatcgagacgatatcaaaaaatgcgcggactgcggtctgcggctcatcgaccacaagccagacggaagcgagatttttccggtcgagcaggcgccccgtccgaccggcatccgccgcttctttccgcgcgagcgcgtgctgcgcatcctgcgcgcgctcatcgctgtcctgctcgcgctcgcagcggtctgcaacctgcaggggatgatgtagactgcgtttttttcaatagaaggaggaactgcatatgaattatgagatcaaaggcacgccgtttccggtcgtgatctgcaagctcgcgaacggcgaacgcatgatcaccgaaaagggtgcgatggtctggatgagtccgaacatggagatgagcacggtcggcggcggtctcggacgaatgttctccaaggcattctccggtgaaagtatgtttcagaacatctacaccgcccgcggtgacggcatgatcacgttcggctcctgctttcccggccgcatcgttcccctcgaaattgcgccgggacgcgaattcgtgctccagaagagcgcgttcctcgcctcgactgacggcgtagagctgtcgatccacttcaacaaaaagctcggcgcgggctttttcggcggcgaaggctttatcatgcagcgtctgtccggcacgggcatggcgttcgtcgagatcgacggcgagctggtcgaatacacgctcgagccgggtcagaagctcatcgtggacaccggcaacgttgccggctttgacacgaccgtcgacatcgacattcagcaggttcccggcctcaagaacaagctgttcggcggtgaaggtctgttcaataccacgctgaccggccccggccgcgtctggctccagaccatgccgatctccggcatcgcgcagtccgtcgcgccgttcctcccgagcagcgggagcaactgattttgtggccgcgctgacataaacgcactttcttccgcgtatgttttcccgaaggagggggcacatgcgcggaagatgtttgtctgcggtgggagcagtgctcgccatcgcgcttttcacgctcgcagcagcaccctgtactgcggtgctgcggacgatttcggagaatacggcgtccgcgacgctcgtcattgacgccgggcacggcggctttgacggcggcgcggtttccgaacgcggtgtcagcgaacaggcgatcaacctgtcagtcgcccagcgagtccgggctctcgcctgctttttcggcgttcaaaccgccatgacgcgcacggacgagggcgcactcgactacgacccgtcgcggtcggtgcgcgaaaacaagatcgcggatattcacgcgcgtgaacgcatcgtgcagagcatcccctcgcctgtttttgtcagcatccatctcaacaaattcagcgatccgcagtaccacggcgcacaggtgttttactccgcgaacagcgcattcggaaagccgctcgccgaggcgctccagtctgcgctcatctccggctgcgatccggaaaaccgcagacaggcaaagcaggccgaaagctccgtctacctcatgcgggcgctcacctgccctgccgtcatcgtcgagtgcggttttctgtccaatccagacgaagagacgcggctcgcagacgaaaattatcacaaaaaactcgctgtctgcatcgtgaccggctatctccggtacgcagacggccatggaggataacatgaaacagaaaaccgtgtttttatgcagcgactgcggctatgagtcaccgaaatggtacggaaaatgcccgtcctgcggcgcatggaacaccatgagcgaattcaagcctgccgccccgtccgccgcgcgcggcacgacgagcttcgtgcgcggcgcatcgcggccgaccctgctcggcgacatcgagaccggcgacgaggcgcgttttctttccggcatcggggagcttgaccgcgttctcggcggcggcgcggtgcacggctcgttcgtgctcgttggcggtgagcccggcatcggcaaatccacgctcctgctccagatgtgtcaggagatgtgccggaacgcccgcgtgctgtatgtttccggcgaggagtcgctccggcagatcaagctccgcgcggcccgtctgcacatctcctcccccgagctgtatatcctctcggagaccgacatggatcagatcatcaacgagaccgagctcatggcgcccgacattctcatcgtggactcgatccagacggtctacaagcgcgatctgaccgccgcgcccggcggcacgacgcagatcaaggaatgcgcgatgagtctgatgcagtatgcgaaaaacaaaaacgtgaccattttcatcgtcggtcacgtgaacaaggagggcacgctcgccggaccgaagatcctcgagcatatggtagactgcgtgctgtatttcgagggcgaatcggccgggccgttccgctgtctgcgtgccgccaaaaaccgcttcggctcgaccaacgagatcggcgtgttcgaaatgagcgagcacggtcttgtagaggtcgcaaacccctccgctgccatgctcgccgggcatccgcagggcgcctccggcaactgcatcgcctgcgtcatggagggcagccgtccgctgctcgcagaagtgcaggcactcgctgccaagacgcagttcggcgtgccgcgccgcacggcggcaggcgtggactacaaccgcatggtgctgctgctcgccattctggaaaagcgctgcggtctgttcctctcctcctccgacgtgtacgtcaatgtcgtcggcggcatgaggctggacgagcctgcggtcgacctgcccatgctgctcgccattgcgtcgagctttcgcgacaaaccgctccccgagggcgtcatgagcttcggcgaggtcggtctgacgggtgagctgcgcgccgtctccaacgccggtcagcgcatcaacgaagcgtaccggctcggttttcatacctgcgtcatgcccgaccaggaggtcgacgaggagcttacaaggaagatgaacctcgtgcgcgtcaaaacggtcggcgacgccatcaaggccgtgctgtaatggaagcagccgtctcaaatccgtccttcggggcggatttttttgttttttccgggcaagctatttcccggaggtgctttgcatggaaagaaaggctcggtgggtctgtctgatctccgccgttatcatcggtatttttgcggctgtattcgccctttccgaaagggaaaaagcgttttccgtgcgaacagcgcaggcgaaaacgcaggacatctacaacagcgtcaccgtgttcggctcggtcgtgccctcgcgcacggtatcgctcgtccccgaaaacaacagcgtcgtgaccgaggttttcgtgcgcgagggggatacggtcgaaaaagggcagccgctctgcacgctgaaagccgctgaggccccgccgctgtccgccgccgatgtgcaggcggctgtctcggcggtgcaggcggacccggatgaaaccgagaccgtgtccggaagcgcggtcacctcgcccttttccggcacagtcctcggtgtgccgcgcgccggtgagaccgtccggggcggctttccctgtgcggttatcgcagatctttcctcgctgcgcgtccgtgcagaaacgcctgagctgtatgcggacgagctgcgtgccggacagaaggccaacatcacccttgcctccgccgaccgtatgtatgccgcgcgtgtcgcgtcgctcgcgcccgtcgcagtgcaggccgtcagccttgccggcgacagcggcagtgttaccgtcgagaccatgctcgacctcgagggcgacatgaccggtctgcgtccgggaagcagcgcaacggtgaaaattttcaccgaccatcgaaaaaatgcggtcgtcgtaccgtatgaggcggtatgccagaggggcgaacaggaatatgttttcaccatcgaaaacggccgcgccgtgcagaatccggtcgtgacaggctatctgctcgagcgcgtaatcgaggtgcgcagcggtctcgagggcggtgagaccgtcatcctctccccctccgacgaactggaaaacggagcaaagctcgaggttcagccatgaaataccgggatgttcttcgcttttccctgcgcggcatccgaacgagtccgctgcgctcggcgctctccgcgctctcggtcgcggtcggcacaggcgcgctgctcatcatcgcctcgctcggtctgttcggccgcacgcagatcgaaaacggtcttgcacgcatcggcgtgagcggcctcgcggtgagcacagacgagggcggcgctggcacgccgctctccgcagccctcgcggagcggatggcgcaggccgtccccggcatcaaagccgcaagccccgtccgtgcggtcggcggcacggtccgcgccggacatcgcacatccggcgtggtgctcctcggcgcagacgaaaatctcggtgaggtcatgcaggtcgagctgctcgccggtgcgctcccctctcaggcacaggtcgaatcccgtgccgcggtcgcggtcgtaggagatgatctcgcggaacgcctgtacgggcgcgtcaatattaccggccgcgaaatccgcatcagccggaacggccgcgagcagatcttcacggtctgcggcgtaatgcgcgcacagaccggcgcgctcggcggcgcactttccgccatcgcccccgagctggtatacgtgccctacggactgctcgcagagagcggagagcgcgccgatcaggttttcgtgtcgtgcgctgcggacgccgatccggatgcggtcggacgcagtatctcgcgctatctcgaaacgcgcggtcaggtcaccggcacggtttatgtacggagcatttcgggcgcggtcgagaccgtgcagcacctcgcgtcactcggtacgctgctcttcttcgctgtcggcggcattgcgctgctcgtttccctgctcggcgtgttcagcagcatgctgtccgccgcgcacgagcgaacgaacgagatcggcattctgctcgccctcggcgcacgaaaacgcgacatccggcggatctttctgagcgaggcggtgctgctctgcgcagccggcggagccgccggtcttgcgctcgcgtggagcgcgctgcggctcggcgctgcgcttctgctgccgggatggcggctgacagtcgcgctcccgctcatcgcagcactctgcggcggtatcgccggactgctccctgcggtacgcgccgcctcgatggaccccatcgaagcaatgagaaaataacccggacaaagcaaaaaagaggaaggctgccatacggtttccttcctctcattttgtcttttcagacggatattcactttttcgcggtaaagaacagacgcgggaagcggaaaatgatctcgccgcttctctgcaccggatagatctcacgaatcccctccaggatttccgcctcgaattcccgcttatcctcgtccgaaagctgcgcaagatacggccgcaggctggttccccggtaccactccaggatgctctcgcaggagggcatacgaagaaaatacgtgatctcccacatacggaaatcgctcgcattttcgcttagaatatcgaaatattcctcctccgtcagctcgttgtacggacggtgcgagaggattctgtctgcccagtgcgcccggtgcgtgacctcgttcagcagcctgtgcatcgggtgttttccctgcgacgggatctgcacagcgagcgtcccgccctcgttcagcaggcccagcatcttcctgatgcgctgctcatggccgggcagccattgcagacaggcattcgagaacacaaggtcgtaccgctcctgcacttttccgaggtcgtgcgccgcatcgagcgtgataaattccagctccggatgtttttcacgcgaatagcgcagcatatccggcgaattgtccgcgccgacaacccgtgcgtgcggaaagtgctccgcgaccacctgtgtgctgttgccgatgccgcagccgatatccagaacggtcttcggctctccctcgaccgcgcgcacgaggtcatagctcgggagcgtgcgctccctctcaaacctgctgtaaagctccgcgttccagtctgccataccggctgtctcctgtcaaaaagatgatattgttgccttaaatgtccagctcgagcagcttgtcgcagtacgggcagcggtcgccgatcttgccgtgaagcggtacatacagctcgctgcgggtaatgcacttgtggttggagcagcggacgcccggctcgtggccgatgtcctgatggcccgcacgctcgaacggcagcctggacagggtcagcagcagcgccatgcggccgaacataccgaagcgcgcctgacggaagtagaccgcacgcgggtcgtcgtcaacatcctgcgcgatctcgtcgacgcgcggcagcggatgcagcacgagcatatcctttttcgcacgcttcatcttctccgcggtcagctgatagctgccctccagattttcatattcctgcgcgctcgtaaaacgctcgcgctgaatacgggtcatgtacagcacatccagctcgggcaggacctcgtcgatgctgttgacctcgcaatagggcatgttatgctccttgaggaagttaatcatgtaatccggcagcttgagcgcatcgggcgcgatcagatagacctgcacattatggaagcgctcaagaaaatgcagcagagagtgtacggtgcggccgtacttcagatcgccgcacagaccgatcttcatgtcatccgccgaaccgcgcatgcgcaggatcgtgaccatgtcggccagcgtctgggtcggatggagatggccgccatcgcccgcattgatgaccggaacggaagaatacaggcttgccgccttggctgcgccctcgcgcggattgcgcatgacgatcatgtccgcgtagcaggataccatgttgattgtgtccttgagcgtctcgcccttggtcgtcgaggaggaacgcggatcggagaagccgacaacgctgccgccgaggcgcatcatcgccgtcgagaacgacagattggttcgggtcgacggctcatagaacagactgccgagcaccttgccgcggcaggcgtctacatagccctcgggccggtcgatgatgttagtggtgagcttgtacagatcgttgaattccttgtcggtcagatcgctcagatcgataatatgacgcatggagaactccatccctttcatgttttctgccttatatcataccacaaccgcgcataaaaagaaagagtccgcgcatgaaaaatacgcggactgagcctgccgtgaagcagtcggccttcgtcaggccgtattcggttttcgcggagcacaggtcgtttaaagccccccgcacggaatgctccgccctccggcccggtttctttctcagttcgtcggggtcagcgcgtaatcataaatattatgaccgctctggagaggcttgccgccgaccgtcagcatgacgctttctgcattccgcgcggacgcgaaggtgttgacgagcgagtagacgagcatttcctcgcctgccgtgccggaagcgcgaaccgcatcggcataaacgtcgttcatgtcgagcgtgagtacgccgtccgcgagcgaggaggaaacgacctccgcgccctccgggagtgccccggccttgatgagcgcatcaacaagcgccttgtccgagtcgtctgcaacgtctgtgccgaccggagtaagcgactcgctccgctcatccggcacatagatcacagcggactcaccgcccgtcggattgggattctccggctgtaccgcaggcgtttcctgctgggtatcatccggtttctccggcttggacggcgtgaccggctcggtctgcgtgttgtcctgagaaggagtgccgaccttgtttttctcgagcacgaagccatagatgcagccgccgatgaccatcagcagaatgaccacgaccgccacaatgatttttgtgtttttcttcatacgaacgcctccctttgcaatgcagcaaggtttctatcctgtatttatattataccacagcggcgcggaaaacgccaacacatgacatccattttagcgccgctgatggtataattgttaaatagtttgtctaatagccgtttcgcggctgttataccacgtatccgcagaaaacgccatcagtccttaaagataaacgccgggataggcgggtcgtttctgcggttcgcccagtcgcagacgagcacgctgtatttgcggtcatcgagcgttttcaggtgcgcaagcagcgcatcgcgctcgccgtagccgttctcgccgccgtaatagattgcgagcgccatcacgccgccgggcttcagcaggcgcagaccggcgtttactgcttcgatggacgagtcagcctgcgtgaagatatgcgggtcgccgcccggcaggcggccgaaattgaaaacgatgcagtccacgctttccggcgcggcatagctttccatatgggcgtggctgtcgaggtgaacctcggcgtgctttccctcccgcgcgagcagttcatttgtctggcggacagcatcctcctgcacatcgaatgcgaggacgcggccgccttcccccgcaagctcgcagagcagcgccgtgtcgcggcccctgccggctgttgcatcgatgcacagactgcccgggcgcactgtccgacgcagaaaatcgtgcacaatggataatgtattcattgaaatcctccgatgattttgctgtctttatcatacggcattcctccatagccgtcaagtcataaaaaggccccgaaaaatccgggcatttcgcctttcctttccgggaccttggagagaagttatctgtttttacgctcttgtgacttttttgacccacttccagctgtgcaggcggatgccgaccgggatagccttgtagagctgatcccatttcagcaggaagaacacggcgaccggagggcacttccaccagaacgccgccatcgcggagaatggcacgatgatgccccacatgctgatgaggttcatcttcgcgctgaagccggtgtcgccgccgccgcgaatgatgccgttatcgcacgccatctgataggaggtgccgaccgtggtaatggcgagcacgagcatgaactgacgggacaggcggtaggcgttttcggtcagggtgccgccgaaggccgcaaggatggggccgcgcagcaggaagatcgcaagtcccgagcacagtccgatggataggaacagcacctggagcgtcgtgacgagcggatgcagcttttcctcgtttccctcgccgatcgtgcggccgaccacaatgcccgccgcgctcgccgcgccgtagcagacgaccgagagcacctgatagacctgtaccgagatcgcgttcgccgccgtaacatcgccgccgagatgacccagaataccggtctggaccatctgcgccacgccccagagcgcctgattgatgagcaccgggagcgaaaccttcatgtaatcgcgcacgtagctcgtgtcgatgtgcagcagcttgcgcaggttgagattgaggacgttttccttgtatttgaggaaccagataacgatgagcagctcgacacagcgtgcgatcagcgttgcgcaggccgcgccgcgcacgcccatctccggaaaaccgaggttgccgtaaatcagcagatagttcaggcatacattgatgacgagcgtcgagccggagatcatgtagccgattttaaccacgccgatcgagcgcagcgacgcgacaaggatattcgtgatcgtgaaaatgacgtaggtgaagcggatgatgctgaaatacttcgcgccctccgcgatgacggccgggtcgttcgagagcaggctcaggatctggttaggccagccgaatacgaggataaacagcagcactgcgagcgcgccgccgaagcgcagcgccacaccgatgatgtgcggaatgggctcgagctttttcctgccccagtactgcgagcccataacgaccgcgccctcgcccgcgccgacgaccagcatctggagcaggaactggatctggttacacagactgacgccgcccatcgcgttctggctgtaccgtccgagcatgagcgtatccatcatattgacgccgtaggtcagcagattctgcagcgccagagacagcgccaaaatcataaacgacttataaaacgtcttttcctttatcatatggtactcccccaaatcatccggcggaagagcaagttttgcaggattttttcttactgtacccctcgtattctccttcggatgtttctttactaagatattaccgaaaattcatgctcttggcaataacaaaacactgcaatctatttatattttgtgctataatgacagcagtcacaaaaaggaggctgccgtcatgaaggtcacagaggaagccggggtgctcgcgcgttcagagcgcttctttgccacccccggcacggtcgcgcgcggactgttctactacatcacgcgcgccgggcattattactatgatgaaaattatgatttccgcgacaactgcgagatcgcgcatctcgaaagccaccgcaacttctatctgctctatgtgcgcgccgggacgatgtgcgtccacaccgatcacgaattttcggtcgagcgcggacaggctgcgctcgtggactgccgcagaccgcaccgctttttcacgcacggtgacgcagaagcgctttggctgcacttcgacggggcgaactcgggcgcattttttgaacagatcatcgcctttcatggcggcagacaggtgttcacgcctgccgccgcgctgcatctcgagcaggagcttgcgcagctcatccttggcctgcaaaccggcgaaaccagcgaggtcgagcgctcgcaggccctgtaccgcatcctgtgcggcctgctcctgccgcagcgcgcgcacagtcccgcggaaaacgatgcagtcgcgcaggcggtgcgcttcatcgacagccatctgaccgaggagctcccggtccgcagcatcgccgcgcacgtcaacctcagtacatcgcatttttctcgtattttccgcgcctcgaccggcttttcgccgcatgaatatatcatgctccaccgtatcgacgaggcgaaatcactgctgcactcgaccggcctttcggtcagcgagatcgcgttccgcgcaggatttcggagcgaggtcaattttatcgcggcattccgctcgaaaaccggccagtcccccacccagtttcgaaacaatctgctgtaaactgcaaaagaaagggagagcacagctatttccgtgctctccctttcgtttgatcgtctcagtcctcgttctcctcagccatgccgacaagctggcacagcgtcataaggctgtccgacagatgtacattctcgaccggaacaccgagtccctccagatgcagatcctcgcccgtgaagttccacaggccgcggatgccgcgctcgaccagactgcgcgcgatcgccggcgcgttgccgcgcgggatggtcagcaccgcaacatccgggtggagctcgtcgatatagcgttcaagttcttttgcgtccctcacctcatagccgccaaaactgcggccgatcagctccggactggcgtcgaatgcacacagcagctcaaagccgcttgcagagaaattgaagttgttgagcagggcgcggccgaggttgccgacgcccagaaggatcgccgtgcgtcctgcgcgcagacccaggatcgcgccgagctcctcctgcagcttttcgatattgtagccgtatccctgctgaccgaagccgccgaagcagttgaaatcctgccggatctgtgacgccgtcagtcccatccgctcggccagtgcgcgcgaggagatgcgctgcgcgccttcggctttcagctcgcagatgttgcgataatatcgcggtaaacgctgaattaccgctttagatacctcttgcctgtgttccaccgactctcccctctctccgtcattttcttcctttgcttccgagaatgcgcacgtgccctgcaaactccctccgcaaggcacgcaccgctgttatcaatttggattaaagctttgcgatcgtctcgagaacgtaatccgtgaactcctgtgcggttgcgccggtgtcacggccggtcacaacgaccttgcgttcctcaaccatgcagatgtcgagcgcacggtcgagctttttcgccagctcgatttcgccgatgtgctcgagcagcatgacggctgcacgcagcacggaggacgggtcggcatactttgcgcggccttccttgaccatgcgcggtgcagagccgtggatggcctcgaacattgcgtagcgcttgccgatattcgccgagcctgcggtaccgacgccgccctggatctcagctgcctcatcggtgatgatgtcgccgtacaggttgggcaggacaacgaccttgaagtcgcggcggcgcttgtcgtcgagcagctttgcggtcatgatgtcgatgtaccagtcgtcaaaaacgacctccgggtactctgcggcaaccttctggcaggtatcgaggaacttgccgtcggtggtcttgatgatgttcgccttggtgacgcaggaaacgcggttcttgccggtcttgcgtgcgtaatcaaaggccagacgcgcgatgcgctcgcagccctgcgaggtcgcaacggtgaagtcgatgaacagatcgtcgtcgatctgcacgccctgcgagccgacagcgtagccgccctcggtgttctcgcggtagaacgtccagtcgatgccgagctccggaacctttaccggacggacgttcgcaaacaggtcgagagccttgcgcatggcaacgttcgcggactcaacgttcggccacggatcgcccttgcgcggggtcgtggtggggcccttcaggataacatggcactgcttgagctgctccatgacgtcgggcgggatcgcacagccgagctcggcgcggcgctcgatggtcagaccgtcgatgacgcggaactcgaccttgccggcctttaccttgtctgcgagcagaacctcaagtgcgtgctgcgccatgccggtgatcatcgggccgatgccgtcgccgccgcacacgccgatgatgagcttgtcgagcttggaataatcaataaaatcgtcctgcgccttcatatccatgatacgcttgcgctggctctctactactgcttcaaatttatccagaacagactggtcgatagacattgggttgtcctcctgtcgcattgatattattttaacaaattaacgtcattctgtcaaggcggagcggacaggcatctctcccctgtccgccgccccgttttcagctcttacttgttagcctgctgacgtgcgtagagcagcgtgccgcccgcgagcagcgcatggcgctgacgctcggagacctcgcagtctgccttgaaggtcttgccgccgcagacgaccgtgacctgctcgccgttcttgacctcttcgaggacgttcggcagcgaaatgtcgtcgagcagcttgatggcgtcgtaatccgccggatctgcgaaggtcagcggaatgatgccggagttgaccagatttgccttgtggatgcgtgcgaaggacttgcacaggacagccttgacgcccagatacagcggaacgagcgccgcatgctcacgggacgagccctgaccgtagtttgcgccgccgacgatgatgccgccgccctgctccttgcagcgggacgggaaatccttgtccacgttgatgaagcagtagttggagtagaacggaacgttcgagcggtacgggagaagcttcgcgccggccggaaggatatggtcggtggtgatgttgtcctcggtcttgagcacgaccttgccggtgtaggacgcctcgagcgccttgccgagcgggaacggcttgatgttcgggccgcggacgacctcgacctcagccggattttccgccggctttacgatcatgttgtcgttgatgacaaaatgctcaggcatctcgatctccggcatctcgccgagcgtgcgcggatcgaccagatggcctgccagagcggacgccgccgcgacctccggggagacgaggtagatcttcgcgtcctgcgtgccggagcggccctcaaagttgcggttgaaggtacgcagggaaacgcctgcggactccggggactgacccatgccgatgcaggggccgcaggcacactcgagaatgcgcgcaccggcggaaatgatgtcggaaagcgcgccgttctgcgcgagcatgttgaatacctgcttggagcccgggctgatggtcagggaaacgttcgggtcgacggtcttgcccttgaggattgccgcgaccttcatcatatcataataggaagagttggtgcacgagccgatgcagcactggttgatcgggatctcaccgatctccgtgaccttctttacgttgtccggcatatgcggcatcgctgcgagcggctcgagtgcggacagatcgacggtgtactcctcgtcgtactctgcgtccgggtcggaagccagcggcacccatacgtcgccgcggccctgcgcctcgaggaacttcttggtggcctcgtcggacgggaagatcgaggtggtagcgcccagctcggcgcccatgttggtgatagtcgcgcgctccggcacagacagggtcttaacgccctcgcccgcatactcaacgatcttgccgacgccgcccttgacggtcatctggcgcagaacctccaggataacgtccttcgcggagacccacggagacagcttgccggtcaaggttacgcggaccatcttcggcatcgggatgtaatatgcgccgccgcccatcgcgaccgcaacatccagaccgcccgcgccgaaggcgagcatgccgatgccgccgccggtcggggtgtggctgtccgagccgatcagcgtcttgcccggcgcgccgaagcgctccagatgaacctgatggcagatgccgttgcctgccttggaataataaatgccgtgctttctggcgacagaaccgatgtatttgtggtcatccgcattctcgaagccggactgcagggtattgtggtcaatgtaggcgaccgaacgctcggtcttgacctgatcgacgcccatcgcctcaaactggagataagccatcgtaccggtcgcatcctgcgtgagcgtctggtcgatcctgagaccaatctcctgccccacgaccatctcgccgtctaccagatgcgcctttaagattttctgcgcgattgtcatacccatgtgtactattgctcctttttgtcccgacgcagcgcgaaacctcgctctgcgccccgccctctcatctcagggcagtcgttgcggcttccacagccttctccacggagaacgaaacaattctccgtgcccagtagttaaaaacagaagtggtcacgcccgcacgagaatgcacggggacagcaaccacttctattttacatcatttcgtaaattttgcaaactatattttacgagcgtatttcacaaaagcacaaggctttcgctttatttttttaacgtgctgacacaagataaatatttcgttgtgttttcgccttgttttccacgttttgtgcctttccaacccgttagaaaatagttttctctctcggcgcccgtgcggcagcacgcattaaatcgaatttgcgaagcaaattcataatttccgggagcatgtatcacggaaattatacaagagacgaaaaaatgtgcccgaaggacgcggtttttcgtcagcctcgattgaaactgtagtttcaatcgaaaagccgtcaggctttgtcgcagatattgcggccaatgtcggcggtcggataggcgttctgaagcgtgtggccgaggtggccggcgagatactcatagtacgcctgcgcaccgatcatggcggcgttgtcgccgcagagcttgagcggcggcaggaacagccgcgtgtgcgtgcgcttcgccatgtcgctgagcgctgcgcgcaggaaggaattcgccgcgacgccgcctgcgcagaccacattgcgcgcatgcgtctgatgcaccgcctcctcgaggcgcggcacgagcgtatgcacgactgccgcgcagaacgaggccgcaaggccctcccggtcgagcgtttcgcccttctgctcggcgttgtgcgcgaggttgatgaccgccgtcttgagcccggagaaggaaaaatcgagcggcgcatccttgatgcggctgtcgggcagcttatagcgcttcgggtcgccgttttgcgcgagcgcgtcgatcttcgggccgccgggatagccgacgcccagcacacgcgccaccttgtcgaacgcctcgcccgcagcgtcgtcgcgcgtgccgccgaggatctcgaactcggtatagtccttgaccatgacgatctcgctgtggccgccggacgcgatgagcgtcaggaacggcggcttgagctcgggatacgccagataggtcgcggcgatgtgtccccggatgtgatgcaccgggatgaacggcttgttcatcgcgaacgcgagcgactttccgaagtttgcgccgacgagcagcgcgccgatcagtcccggcgcacaggtcgccgcgaccgcatccacctcatgcttatccatctccgcgtccgcgagcgcctgctcggtcacgcggacgaccgcctccatgtggcggcgcgaggcgatctcgggcacgacgccgccgtagagcgcgtgcgtcgcgatctgcgtgtcgacaacgttcgacagcattttccgtccgtcctcgatgatggctgccgccgtctcgtcgcacgaggactcgattgcaagtattctcaaggttttcactccagtttacaggtttttctcaaagcagaggcagttttcagcgcctgccgggctgccgtaatagtcgatcacatgatagccgttttttgtgtagagcgctgcgctgtccgcagtcgtgcgcgcggtctccagaatggcgtgcgtgaagccgttcgcccgcgcgtcctgttcgagcgccgcaatgatcgcgctcgcgacaccctgccgccggaactccggcgcgatgtaaatgcgcttgacctcgaaggtcgtctcatcgatctgcttccacgcgccgcagcccgcaggcgcaccgtcctggtatgcaacgatgcggcagttaaacagatgcggcaggttgtatttggcgtagcgcttctccacatcaccgacaagcatgaaataatactcgtccagcgcagcggtcaggtcgtgaaaatccttgttttccgcgtcaacaaagcgaagctccagcatggcaaaatcctccttcaagtcagtgaaatcgtcattaaaaccgcgttttctgtgggattgctgtaaaaattattccgttttccgaccggcgcaaatccggctccggtgtagagcgctatcgccggtgcattgctctcgcgcacctcgagcgtcacaaacgccagcttgttttcctcggctttcgctgtcagctcggcgatcagcgcccgcgcgatgccctgccgccggaagtcgggcgacacggcaacattggtaatatatccttcgtcgagcacggtctggcagccgacgtagcccgccgttttgccgtcctgctccgccacgaggaagatgcccttgcccagctcctcgcgcagcatattctcgctccacggcgcgtgaaagcacgcgcgctcgatctccgccagcgccgcgagatggcgctcctgcatcacgacaatattcatcggctgaggctctcgatgacggcctgcacgcccttgtcgatctcggcggcagaccggcggtaggtggcgagatcaccgccgaacgggtcggaaatgtcctcgggcaacagcgtaaaaatcttgtccgcgcagtccgggaacagctcgcacagccggtcgtagtgcgcgccggtcatgcagaccagatacttcgcgtgttcggccgtctcggcggtcagctgacgcgagcggtgcgccgaaagatccgcgccgcgttctccggctgcggcaaccgcgttcgcggaagccggaaggccgttttcggtatataatccggcagaagccgccgtcaaaccggtcttttcctcgccgcccagcgcgcggaagaacccttccgccatcggggaacggcaggtgttgcccgtgcagataaaaacgatcttatccatattacttaccttctaaatgtttgttcgttgttatttcgcgtcgtaccagctcatgccgcttttggcttccgccacgagcggcgcgttcatctgaaaggcgttctccatctcctcggtgaggatgcgcgcggcgatgtccttctccttgagcggcgcctcgataatcagctcgtcgtgtacctgcaagatcaggcggctttccagcccttcgcgcctcaggcggtcgcgcacacgcaccatcgcgatcttgatgatgtccgcagccgtgccctgaatgggcgtgttcatcgcgatccgctcggcagccgagcggacgttgaagtttttgctgttgatgtcaggcagcgcacggcggcggccgaacagcgtcgttacatagccctgctcgcgggccgtctccttgatggtttccatatagttctccacgcccggatagctgtccagatacgagcggatgaaggccgcagcctcctttcggctcacgccgatgtcctgcgcgagcgagaaatccgaaatgccgtagacgatgccgaagttgaccgccttgcaggacgagcgcatcgtgctcgtgatctcttcgatcggcagatgatagaccttggacgcggtcgcggcatgaatgtcctgtcccgtgcggaacgcgccgatcatgtgcttgtcgcccgagatatgcgcgagcacgcgcagctcgatctgcgaatagtcggcgtcgatgaggatatgctccttgtccggtgcgacgaacatgcggcgcagctctcgtccgagctcggtgcgcaccggaatgttctgcaggttcgggtcggtcgaggacaggcggccggtcgccgtgaccatctgctgaaaatgcgtgtggatgcggttgtccttcgggtccgcaacggcaagcagaccgtccacataagtgctcttgagcttggtcaggcggcggtattccagaatgtgtgcgatgatgggatggtcgttgcgcaggcgctcgagcacctctgcgctcgtcgaatagccggtcttggtctttttcggagcaggcaggccgagccgctcaaacaggatttcgcccagctgacgggtgctgttcaggttgaactccgcgccggcatccagatagatctgctccacaaggtcgcggatgcgcgtttccagacgttcgccgaacgtgcgcagcgcatcgggcgcgacagcgcagcctgcgttctccatctccgcgagcacccgctcgagcggcagctcgatttcgtaatacagccggcgcatgccgagctgctcgatcttatcgttcatctcgcggaagatctcgcgcatcgcggcgagatactgcgccgcagagcggccggtctcctcgcgtccgccgagcggcgaaagcgccgccggatcgtccagatcgagcacgggaagcatttcgttcacgcaggcgagcgcgagccgcggcaggtcgtagcccgactgcgccgggtcgatgaggtaggccgcgagggcggtgtcgaacgtgatgccgcgcggatcgatgccgcggagcagcagatttttgatgatgtccttcgcgtcgtgcagcgcgaggttcacgctgccgtcaaacagacgtgcgagcacatcgttccatgcgtcccccatatcgtccgcatacaggaaatacgccgtgtcgccggaaagcaggcagagcgcgccgagcgttttccctgcaaggacaaaaacgcggtccgcctcggtcagcgagtcgatgagaccgaacgcctcgaacgccgatgcgatggtgcagcgctccagcgcaggcaggcgcggcgcggcggcctccccgccctccgtcagaccaagctttcggatgaactggtcgaactccagccttgtcagcaggctgtacagcgcctcgcggtcgatcttctgctcgggcagatgcgcaacgtccagctcgagcggtacattccggtcgatggtggcgagccagtagctgtcgcgcgctccctgttcgtccgcctgtaatttggtgcgcacgcccttcttgatccgctcgtcatcaatatgctcatagatgccgtcgagcgtgccgaagtccgcgagcagctgtctggcgcccttctcgcccacgcccttgacgccggggatgttgtccgacgagtctcccatgagcgccttgaagtcgatgaggcggatggggtcaaagccgtattcctcgcggaatttctcgggcgtgtagctcgtatacgtcgttttgccgagggcgctcttgaccaggcgcacgaccgttccgccgccgaccagctggagcgagtcacggtcgccagtgaggatgacgcattcgtcgccgttttcgtttgcgcggcggctgatcgtgccgagcagatcgtccgcctcatagcccgccagctcgcagcgcacgatgccgagcgcgtcgagcacctccttgacgatgggcatctgcacggcaagctcctcgtccatcggcttgcgcgtcgccttgtaggtatcgaatttcagatggcggaaggtcttttcctttacgtcgaagcatacgaccgtgcggtcgggccgttcctcgtcctgctgcttgaagagcgtcgagagaaaaccgtagaccgcgttggtcggcgtgccctcatgattggagagcggccggatgccgtggtaggcacggttgattatgctgtttccgtctatcaccatgattttcatgcgtttaagtcctcacgtttccgagttcaccgcaggcgatccccttcggctgttatcctttattataccgcattccggtgaaaaagaaaaccccctgccttcgtcaggaaagcagggggaaaatttcgcctttcagcggaaccggatcagtcctcgtcgtcgatctcgaggtactcagccaggtccttgaacagagccttgactgctgccgggtcctcgtcgtcctcgagaacgatctgaagcggctcgttcaggctgagcaggaacatgccgagcaggctcttggcgtctaccatgccgctcttgccgtgaatccagatgtcgaagccgtacttggtaacgatcttgttgatcttctgaatgtcgtccgtattctttacgcgaatgcctctggtcattgtaatttcctcctgaatgtaaatctgggaagttctttcacagactgccataccgcagtcccctttttgctgattacattatagcataaaaccggagaaagaaaagtggtttttcgaaaatccgtgtattttcagcatttccgaaccgaaatcttttctctctccgattttattatgcactttctacaaacaggtttcttccagtttggttactctgacgaagtatcagccgagagagtccgagcgcgtcaccatggtgtcgccgtctgcggtcgcggcgttcgcgtaggggtcggccgccagcttctccgccgccgggcggtacttctcaacgatgctcgtcgggaagctgtcgtacgggtaggatatctcatagtagttatagccgtcctccactgccggggtgacgtttacgcgggcgttgtccttgaaggaagtcaggtcgtagaagtcgctgctaccatacatccgcatcgtaccggtcgctaccgcgtccttgaggagcgccgcgatgtccgcgcggtcggtcacgttgaggccgacccacgtatcctcggcaggaacgtagaagtccagttcgacctgcgacacggtatccggggcgatggactgcggctcaaggccgaaatacttcttgatgagcgcaagcgtcttgacgtcgcggtcggtcacaatgccgttcgcgtagttgttcgcttcggcgtcggtcgtaatgttgaacgacatgaccggcttggcaggctcggtgtaggtcaggcgctcctcgcgcagcgtctttacgatttcggcggccttttcgccgtcggtgatggtctcgctgttgtacttcagctgattgacgcagaaggtcatgtcgatggcatgggcgttatcgaggtcgaggtcgtacagcgagctggatttgagcttgtactcggacgagccgtagaccttgttcagcaggctgcgtacctcttcgcttaccggcagcttgtagctgcgcgtcttgaccgtgccgttctgcatggcaaactgcagcgaatggctctccagaaatacggttccggtatcgttcgagtccgcgttcagcgtcgcctcgcggccgatttccgccagacgacagagcgccgcgatattttccttttcggtcagctccgccgcggagttgccgtagtcgatcagaccggcggacgcgaccttgctctcgtccgggagccagcggtcgtagccgagaacgtccttctgcatgccgaccatgagcagcgccgtcaccgcaaggatggtgagcatctgcaccggatgcttgacgagcgcacggaggtcgaacgcatagatgacctcgatgatgcagtggaacagcaccgtgccgaacaccagtcccggccacagccagaacttgccgccgataagacggaagccgagggcgaacgccgtgcccataacgatgcacatgaacgtcttgaccggcagacggagcggacggaacgccagcgccgtgcccgcgcgttcgctctttctgcggcggaaggcaaagacgccgagcgcaatgataaagagcgccgccgcggcgtactccgcgagcagcatatacgcaggcttaccggcgcggatgaagttatccgcaagaccggagccgtagtgcgcgccgttgaccataaaataggtggcggccgggctgagacgcagatgattgaacaggtcgctgtagctcatgctggcgtaggtcttgcagtacaggctcagcagaccctcgtgcatcatctgaatcgcgagcggcgcgagatagacccacagctgaaacagcagcgcgataatcgtgttgccgcagaggatggtcgaaagcgcgctcatcgcgtacagcagcaggaaaaagaggatgtcgcagagtatgacaccgaggtacgtgccgacagaaaccgcttctccgaagcccatcgcgtgcgcacacacgagcgtcagcacacggagcaccagatacggcgcgataacgcacaccgcaccggttacgaaattcacaagatacagcttttcgcgcgaaaccggcaggctgtggtaaaagtccaccttacgcttgtcgtgcagataggcgaacatcgccgtgccggccacaacggcaagcaggataacggcgagctttacgagcgcgttctcgccgccgatgtaaatcgctgcgtccgccagactgtgtttccagctctgcgcaagctcagacgctctcgcgccatcgacaatcatacccttgcggtcctccagcgcctgctgcatattcatcagcgagggcaggagcatggaaaccacgaatgcgagcgtcgagagaacgaccgcccacaggctgcggcgcacgccgtcgcgcaccagtcccttagaagaggagcttcttgacatcatagcctgccacctccgtttcattgataaagatttcctcgagcgtcagcggcagaagctcgcagaacgtcgggttcatcttgttgatcttcgccatcagctcgtcgcgttcgccgcgtgcggtaatggtgtagagcgagccgcgctgctcctttttgagcaggtcgaagccgttccatgcgtcctcgggcagcggtgcgccgaagatgcactgtaccttatacataccgagcttcatctcgtcgaggtcgcgcgagaacaggatgccgccgcgatgcagcagacccacatggtcgcagatgtcctccagctcgcgcaggttgtggctcgcgatgaccggcgtcagaccgcgctccgcgacgtcctccgcgaacaggctcttgaccgcctgacgcacgaccgggtcgagtccgtcgaacgtttcgtcgcagaacaggtagtccgcgccgctgcacacgccgcagatgaccgacacctgctttttcatgcccttggagaacgtgcgtatcttgcgcatctcgtccagaccgaaggcgctcatcagcttgaaatagcgctgttcgtcgaacttttcgtagaaccggcggtaatagtttttcatgtcctgcggcgtgctgttcgggaaaaagaactgctcatccgagataaagaagcagcggctcttgaccgccgtgttctcaaagatcttttccccgtcgatccagacctcgccctcgtccggctccagaatgccggcgagcatgcgcaggaatgtcgatttgcccgcgccgttcgagccgataaggccgtagaccgagccgttctgcacctcggcgcagatatgatcgaccgccgtaatatcctcgaaacacttggtcgcgttttcggctttaatcattttccatcctctcctttctgcgtcacccacgcagtcagctgcgcgtcgtccgcaccgagcgagcgggccttgccggcgagagccgtcatttcggccctcacctcgcgcagccgctcctcgcgtctgtcccccacgtctgagacgaagtttccccgtcccttggcggcgtagatcacgccgcgccgttcgagctctccatatgcgcgctggatcgtattcgggttgatcgaaagctccatcgcaaactgccgcacactgggcacctgcgtttctgccggcaaagccccacgcaatgccagctcttcgatgccgtccgccacctgttcgtagataggccgtccgtcccgatagtcgatttttaccattctgcgcgcctccttcctttcatcgccgaagcggtgtattaactgtactgtgtgtcttagtacagttagaatatatcatacaccgcgcctcctgtcaagcaaaacttaaaatttttcaccctctgccgagagtaaacggttccgccgatacagcggcgcagccggtggaggcgactttacgctcgaggtgagcgtgcacaatggccgccttcggcggcgggggatgccggtgttcaccggcaggaacaaaaggggcagggacaccaaggtttccctgcccctcttgactcccctgaccttcctttgcgctgacacatcggagatgtgcagcgaaacgggggtacgggggactcggttccgtgcgtcgggcagattttggaacgctgttatgccctgaatttactttgcgtgagttgccgcgcataacagtgcgcggccagacagtgcagggcgttagattggcgctgcgaaaagctccgcttccatcaaggatatacccttggagcaccgaacgcccctgtgagcccctcgcattttgccgcgcaaccgaagggcgtcgcggcttaaaggagggtttgggggagtcaagagggggcaagggaaccatacggtgcccttgcccccttt

SEQ ID NO: 12909 - DNA, 9750 bp, Unknown
  gut microbiota DNA sequence
cgccgtgggcacggcgtcccccggccgccgaaggcggccactgtgcacgctcactttgagcgtaaagtcgcctccagcggcgcaccgctgtatcggcggaaggtctaccgtctgctgacggtatcgtaaaagggcgctttgcggcggtctttcttgacaagcaatgttttccgctttatcatgaaagcaaagacaaagagcaggagatatttttactatggttcattttaacaacgactgggacgagatcctcgccggtgaattcgatcaggaatactacaagcacatccgctatttcctcaagcaggaatacgccgagcagaccgtctatcccccgatggaatacatctttaacgcactgcgtctgaccccctactcctcggtcaaggcggtcattctcggccaggacccctaccacggccccggtcaggcgcacggtctgtgcttttccgttcagccgggcgtcaaggttccgcccagtctccagaacatctacaaggagctcaagagcgacctcggcatcgagccgccaaaggacggcacgctcaccaagtgggcgaagcagggcgttctgatgctcaacaccacgctcaccgtccgcgccggacaggcgaacagccacaaaaatctcggctggacgacgttcaccgaccatgtcatcgaaaagctgaacgatcacgaaaagccgatcgttttcctgctctggggcggcaacgcacgcagcaaggccaggctcatcaccgcgccgcagcatcttgtgctcgaggcggcgcacccctcccctctctccgcgtacaacggctttttcggctgtcatcacttctccatgtgcaacgactatctgaaaagctgcggtctcacgcccatcgactgggatctcaacacgccgtgatcagcggtcgaacgcacccgctcgatcgagcacaacaagcacgcgcagcatttcctcgctgagggcgagcttcccgtctgtaccgcgcagaagatcgcccgaaagcagcttatccaccgtccctctgccccatttgggcacgctttccgcggtatcgtaaaccgttttcgcctgtgcgatcagctgttttacctgtttttcggtcatattttcctcccttgtgagctgaatcaagcctgccttgaacgactgccatgctgccgcgtcctcgacgaacggcgcagggcagtttttgtgtgtcacgtcataatgccgtacgacgttcgcaaggggaatatcgtactttttcatgagaaaacgcacaaaattccgcgcatttttcacggtctcaggggtaaaataatacttttcgccctgcttccggctgcaaagctcgatgccgaggctgttcgcgttgcggcagtacggatggaaatacatccctctcgtgccgcagtgccacgcaacatccttttcgcgcaccgactgccagatctctttctcatccacgaaaaagtgtgcggacacgcccggcgcttcccttgcgaagtaatccgcgttgtttttcgcggtatcgccgtcgttcgccgtaaaatgaatgacgagatagcggatatccgccgccgagcggtcggaaacacggtaattttccacccgtgccgccttgaactgtgtattcatgcttccgttccttcctttccgcaggaaaatacccctgcatatataggccggttcggggcgaaaattgacctcaaacggtcaagcggaatgaaaaattttcagttttcggctctgtttctgacgccggattttggttttttctgttgacaatacgaaatttcagtgtcataatagatatgcaatatcgaaaatgctatgaggaaacgagttttccatccgccgttccatagagagaggacattcggtgcaagtccttgtccggcgcggaaagcagccacttccgagcagccggcgctgagccggccgtctgatccccgataccggatcgctgagatgcacgcggtgctgctgcgcgcagatcaaggtggtaccgtggaagtatgctttcgcccttgacattcgggcggaggcttttttgtttttcatacattttcagtttcgttaattcatttttggaggaataaatcctatgcagtacagaggcttaaatgagctgcgcgagatgtacctcagtttcttcgagaccaagggtcatcttcgcctgccgagcttttcgctcatcccgcagaacgacccgtcgcttctgctcatcaactccggcatggcgccgatgaagccgttcttcaccggcgagcaggagccgccgcgccaccgcgtcaccacctgccagaagtgcatccgcaccggcgacatcgagaacgtcggcaagaccgcacgccacggcaccttcttcgagatgctcggcaacttctccttcggcgattacttcaagcgcgaggccattcactggagctgggaattcctgaccagcccggactgggtcggtatcgaccccgaccgcctgtacccgtccatctatgtggatgatgacgaggcgttcaaaatctggaacgaggagatcggcatcgcgcccgagcgcatcttccgcttcggcaaggaggacaacttctgggagcacggctccggtccgtgcggtccgtgctctgagatctactatgaccgcggccccgagttcggctgcggcaagccgggctgcaccgtcggctgcgactgtgaccgctacatggaggtctggaacaacgtattctcccagttcgacaacgacggcaacggcaactacaccgagctgaagcagaagaacattgataccggcatgggcctcgagcgtctggcctgcgtggtacagggcgtcggctccctgttcgatgttgacaccgtgcgcaacatcaccaacaaggtctccgagatcgccggcaagcactacggcgagagcgacaagaccgatatttccctgcgcgttatcaccgatcacatccgctccaccgttatgatgatctgcgacggcgttatcccgtccaacgagggccgcggctacgttctgcgccgcctgctgcgccgcgccgttcgtcacggcaagctgctcggcattgacaagccgtttatgtccgacgtcgcttccaccgttatcaaggagtccggcggcgcttaccccgagctggttgaaaagcagaagtatatccacaaggtcatcgagaacgaggaagcaagcttcaacaagaccatcgacagcggccttgctatcctgaacgacaagatcgcggcttccgacggcaaggagctgtccgccgccgacgcattccagctgtacgacacctacggcttcccgatcgacctgacgctcgaggttctcgaggagcagggcatgaccaccagccgtgaggaattcgaccgcctgatgaacgagcagcgcgagcgtgcccgtgaggaccgcaagaagatgggcgacctcggctggcagagcgaggagctcggcctcgacaagtccatcaagaccgcattcgacggctacaccaccctcgaggagtccgcaaagatccttgctatcgtaaacgagggcgaggtttccggcgcggccgccaagggcgagaagatcactgttgtgctcgaccgcactccgttctatgcggaaatgggcggccagatcggtgaccacggcgttatcaccggcaagaacggcgctatgaccgtttccgacgttcagaagaccaaggacggcaagtatatgcacatcggtgttgtcaccgagggcgagctgtccgttgaggacgaggtgaccgcttctgtcgacgcggcttaccgccaggcgatctgccgtgcgcacacctccacccacctgcttcagaaggcgctccgcaaggttctgggtgaccacgttgagcaggcaggctcctacaccgcaaacgatcacatccgttttgacttcactcactttgccgcactgactcccgaggagctggcgaaggtcgaggagctggtaaacgatgctattctggcaggcagcccggtcattaccgaggaaatgagcattgacgatgccaagaagaagggcgctatggcgctgttcggcgagaagtacggccagaccgtccgcgtggtacaggccggcgactccatcgagctgtgcggcggtactcacctcgacaacacggcaaaggccggctcgctcaagatcatcggcgaggcttccgttgcagccggcgtccgccgtatcgaggccgttaccggcaaggctgtcctccagatgatgaacgagcgtcaggctgttctgaacgaggcggctgctgccctcaagaccaacccgaacgagcttgtcgtcaaggtcgagcagcagatcaacgatatgcgcgccctgaacaagaagctcgagaagatgggtgcaaaggtcgctgcaatgcagatggtcgatctgttcaacgtttcgcgcgacgtcaagggcgttgaagtcgttgcgaccaagctcgacgatgccactccggagatgctgcgcacgatgggcgacgacatcaagagcaagaaggagaacatggttgctgttctgtccgcagtcaacggcgacaaggtcagcctgctctgcgtctgcggcgctgaggccatcaagaagggcgcacacgccggcaagatcatcaaggaagtcgcgaagatcgttggcggcggcggcggcggccgtccggacaacgcaactgccggcggcaagaatccggcaaagctcgaggaagcactcgaggcggtcaacaacatcgttgacgcgctgctctaaggcataaatcagcaggcattgccgcaggcttttctgcggctctgccgaactttcagaaaggagcgatcatctatggaggattgtctgttctgtaaaatcgcagccggcgagatcccgtcgagcaaggtgtatgaggatgatatctgctacgccttcaacgacattgatccgcaggcgccgacccactttctcgtgatcccgaagcagcacatcaagtccgctgctgcggtagacgagaccaacagcgccatcgttgcgcactgcttcgaggtcatcgccaaggtcgcaaaggaaaagggcatggacagcttccgcgtggtctccaacatcggagaacaggcgggtcagagcgtattccacctgcattttcacgtgctctccggccgtgatatgacctggccgccgggctaaaaacgtaagcaaaaggcacacccgatcgggtgtgccttttcttatgccatagcagctcaaataataatcccctcgcagtgatcgatttcatgctggatgatctgcgcggtccagccggtgaaggtcttgagccgtatctgcattttctcgttctgatactgcaccttgatcgactgccagcggcgggtctttcgcgtgcctgtgagcgacaggcagccctcctccgcctcgtatgcgcccgattttttgacgatctcggggttgaacatcaccatatagcttccctcattatcgaacgcgatgatgcgccgacgcacgccgatcatattcgccgccatgccgacgcagcctgccttgtgcgcttcgagcgtctccagcagatcgcgcgcggtgtccgcgtcctccgccgtcgccttttccgacgcctccgcgaggaacgcctcgtccttcatgatttctcgtaccatattcgttctcctttgcagtgctgcctttattatagcggctcagagagaggagtgcaaggctttccggcggggggaccggttcattccccataaaaacaaaaccgagggcgtaaaaccctcggcttttttcattccggcgtatcttttttctctttttcgggcatatcattgtcctccggctcattcagaaccacgggaatgaacgcggcggcaaccttgcccttgccgcgacgcttgacatagaaaaatccgatcacggaaaacgcgatcgcgccgatgcagttgacctgaagatccttcatcgtgtcgatcagaccgatgtcgagatagccgtcaatctcctcggtccagtcctcgccgttgacgatcacgctctcgatcggcacatgaatcggtgtattcagaccgtccggattgagcgagaccgaattgatctcatggacgacatagtccttctgcatatcggtgtgcatcacctgatcgcaggtgaactcgaagaactcccacagcacgccgaccgtcatggaaaagcagaacgcgacaagcgccaggaaaagcggcgacagacggaaggtgaagcgttcgcttcggttgaacagatcgaccagacaaaagccgaccgctgcgaccagaaagccgttgatcgtatgcagcatggtgtcccagccgggaatgatcgtgtaaaaggagttgatctcaccgaggatctccgccgcgtagatgaagcagtagataatgccctccatgaggggcgggatgtcgatggcgagctgtttttcgatgatcgacggcagcgcgagcagtatgagcgcgagtacgcagacgaaaatgttctcgaagcggtgcatgaacgccgcgcgtatcatagtcagcacgacaaaaaacgccagtacgccgcgcagcgtcatccgacggcgcacacgctgccgaagctcagcctgtgtcggcggtgtttttcttttagatttatgaaacatattttacctttctcagctataaaacaaagtcagtttacgccctgaaccgccagtctctcgatcacatcctgtcccttggcggtaagggcaagacttccccttcgaaaacagacttcatagccctcataggcaaagcctgcgagcggaatatcgtaatcgacgcggataaagccgcgcttttcaagcacagagagcgccagcggcacgattttctcatccatgtccggaaattccagacagaacggttcgccggtccgcgagttcaggccgacgggcaggaacggacagaccgccagctcgcgcaggatgtcgatctcggccggatggagcgtgattgcgccgccctttcctgcgcagccggagcagccgccgcccgggcagccggcgcagttaccgccgcagcagctcatcggcagacctcctcatccttcggcacgccgcagatcgtgccgccgccaacgaccgtatcaccgtcgtacagcactgctgcctgaccgatcgccggcccgcgctgcggctcatcgaacgtcagcaggatgcggccgccgtccagcggcgaggccacggccggctgctccttctgccggtagcgcagctttgccttgacgcgcatttcgcccgtcagctcgggaacagaaatccagttcatgtcgcggacgatgacgcgcttcgcgaacagcgactccaccggcccgacggtcacggtattcttttccatgtccttcgcgcagacgtaaacgcggtcgcccatcggcagacccagaccgcggcgctgaccgatggtgtagcgcaccgcgccggcgtgcgtaccgatcttttttccgctttcgtcaataaaatcgccggacggatagcgttttccggtgtactgctccatgaagccgacgtaatcgccgtcgggcacgaagcagatgtcctgactgtcgtgcttgcgcgcgttgcagaagctctgctgttccgccatctcgcgtatctgtgtcttgctgtacgcgccgagcggaaagatcgtgtgtgcgagctgatgctgcgtgaggttataaaggacataactctgatccttgccctcgtccacgccttttttcaagagataccggccggtgttctcatcgcgctcaatgcgcgcatagtgtccggtcacgatatagtttaacccgtgcgcgaacgcaaaatcgagcagcttgtcgaatttcatgaagcggttgcagtcgatgcagggattgggcgtgccgccctcctcataggtacggatgaacttttcgatgatcttatcctgaaaatccgcagtaaaatcaagcacctcatacggaatgtcgagctgaaacgcaacctcgctcgcgtcctcgatgtccttctccgaacagcaggtacggaaattgcacgcaccaagatcctcgttgcggtaaagacgcatggtcgtgcccatgcattcgtagccctgctctcgcatgagaaaagccgcgcacgaactgtcgacgccgccgctcattgcgatgagcgcactcttttccttcataatttatccctcccgggagtctggtaattctattattttaacatacagacggtaaaattacaactatttttgccattatgctttctcctcctcagtccacttcttccccgcgttcgattgcttcccggcgtctctttctgatctccgccttctgcgcaagccacgcctgctcccagtccgcgagcggccgttccgccgggggttcgaccggggcaggttcgggcttcgccgccgttgcggcaaggtctgcggctgttaacacgccgtcacgctcgtacccctgcaagatcgtgcggaagtatgccgccggattgcgcggtctgcgctcgcccgtcttatgaaccgcatctaaaaacacctctcgctgcataccggccttgctcagccttgtcagctccaaacagaaattcctgtcgaatttacaatccatcagctcctccagctcagtcaccagtgcgctcgccgcactcctctgctctgctgtcctctgctgtactgtactgtcctctactgtcctgttttctgctctgctgtactgtcctctgctctgtgtactttccggctgagaaatatccgtttcttgccgggaaatatgtttttcttgccaagaaataaaggattgcagcacaaaagacttgccgctcgggttcttttcccgcatttcctcctcgctcggcagccatagatcgaagtttacctgcacaccgctgcgcccaagcgtcgcgatgaagtaacacatctgcattcttttcgacgtgataaaccctcgcttgtacaggtcgccgctgaaaagttcacactccaccaagcggtctatcacgttcgcgattgtttccgccggcacggcgtaccgcccggcgacgtattccgaaagctgccacagcacgtcctcgcgtccgcggccggaataactgatgtagtagcccttgtcgccatatgcaatgtcgagaaggcactcgtagatgtagggaccgagaacgccgaactcctgccgcacgcttcgcagcttggggtcacggaacaggccgatgtcgcgcggccaccattccagtccgattttgtgatttctgcccgtagtatcacctccggttttcagggcaggtccggagcagaaaaccgccccgtttgccttacttccggccgtgtttgttgtacagccgcataaaaaaactcccttcacttataggccggaatccccgaaaaattgaccgcgaatggtcaatctcgccggaaatttcttcgaaaaattttattcggggggcagattttgatggcaattccggggagctcccgctcgaacctcgcctgccactgctccgccgaaacgggagccagctttgaggtctttgcaggcgactacctctgcatcgcaggggctggaattcgtcctcgcgggcgagcatagctatcctgccgactatcccgaactgggaacagaaatcacggtcgttggcacattccagacctacgaagaaaacagatatatggactgccatctggtcgatgcagagataaccgagtaagaaaatcgtatccggcaaaaaaacaggcagctttccaccgaagccgcatttctgcgcagcggttgacgaaagctgtctgttttgctatattatgcctgtccgtacagaatatatccgatgcgtggctcattgagagtgccggaaaatagc

SEQ ID NO: 12910 - DNA, 694 bp, Unknown
  gut microbiota DNA sequence
gcagtccgatatgctgtgatgtgctgatggtactttgcatgagaattgccgaccgcttgcatcctatttttcaaacagatacagcagatatccgtagccctcggcttccattttttcataggggacgaagcgcagggccgcactgttgatgcagtagcgcacgccgttgggcgactccggatcgtcggtgaacacatgaccaaggtgagaatctccggcacggcttctgacctccgtgcggcgcatgccgtggctcagatcctcccgttccaccacggcagggccctcgatgggctttgtgaaggccggccagccgcagccgctttcgtacttatccgtggaggaaaagagcggctcgccggtgacgacatccacatagatgcccttttcaaacttgtcccagaactcgcccgtgaaggcacgctccgtgccgctctcctgcgtaacacggtactgctcctccgtcagcttgtcccggatggactccgctgcgggcttctgatagtcgcccgggtcgatgcgcagtttggagaagagctccatctccgcgcgcgggatgtggcagtagccgtccggattcttttcgaggtagttctggtggtactcctcggcgggatagtagttcttgagcgggccgatctccacaaagaatttctcgctgcggccgcgctcgatctccgcgatgcgcttcacc

SEQ ID NO: 12911 - DNA, 840 bp, Unknown
  gut microbiota DNA sequence
cttgaacagcagaaaaccctcgactttgacagcctgaaatctatggctgaaaaggtcgaggggtctttcgtctttacggtactcgataaagataactccatctggttcgtagttggagataatccgttgtgcgtgatgttctatgatggcttcttaatttacgcttccacgcaggaaatcctctgcaagacgctgaaaaagctgcggttaaaagcgcccatcgacattctcgaaccacaggagggcgagattatgaaaatcaaccgcaacggccgtatcactaccgggaccttcacgccgcacacaacattcgaacactggtggcgaaaatatccgttctaccgcagctactacgaggacacaccggccagttatgacgacctgttcagcgtggcgaaggcattcggcgtaaccgctgacgaagtgcaggcgctcttggactacggctgctcggaggaagaaatcgaagaaatgctgtacgatccggaactctttcatgagatgaccggcgagctgctttatgcgtactgattgaaaggaggcgatgcgcatgattgcactcggcccgatcttccaagctatcggcgcagtggttgacctcatcatcgaagccgtcgagtactttccagatgactgaaacgaggtgaaagtttgaacccaggcaaaatcattctcggcgtgctgaccgttatcggcctgctcgccgacatcatcgatgatgattgaacgaaaaaataccgactcatcaagagccggtattttttgagcgtgtcattaggctatacccatatgaaataacaagaaagtatgtcaatagggtcgttttccgacttttgcaat

SEQ ID NO: 12912 - DNA, 26828 bp, Unknown
  gut microbiota DNA sequence
aagggtaaaagctgaagcaagagattacgtccggacaacttctcaaactgcggttccccgaaaaagcacgttcagtgctcgataaagggccgcgcagctccaactggcagaaaagaaaaataaaaaaggactgagcaaaaaccatgggcaaatccagcaacccgactttcgcgggtgataaggaatttgagaagatccatctcaaagaaaagttttcctacggcctcggcgacgttgcctgcaacgttgtctacgccctgacaacctcgctgctgatttacttctacaccaacgtagtcggcatctccgcagcaatgatcggtaccatcatgctgttctcgcgtttcttcgatggtatttccgacgtactgatcggtcacctggttgaccgcacgcattccaagcacggcaaatcccgtgcatggatcctctggatgatgattccgtacggcatcgcagcaatcctgctgttcaccgttccgcctgctacgccgatcgtaaagggcatttacgttttcattacttataacttctgcaccaccgttgtctacaccgcactcaaccttccgtatgcaacgctggctaccctgatgacccgcgacaccgaccagcgcgccgttgtcaacctgttccgtaccggtatgtccgccctcggcaacatggtcatcaccgccattaccttcccgctcgtcacccgtctgggcgacacccagcaggcatggattgaggtttccattctctacgccatcgtctcgatcatcatgctgttcatctgcttcaagaactgccacgagcgcgtcaaggaagaaaccaaaaccaaggacggcaagaacgttccgctctggatgggcatcaagctgtgcgtgacgaacaagtatttcatcatgttcttcatgctcgccgtgttcctctccttctatgaagccgtcaccggtacctgcaacgcttattacgcgcagtacatcctcggcaaccgcgacctgctcggcgcactcgcgtccttcgaatccattccgcagatcgtcaccgttcttgtcctctccccgttcatcgccaagtttggcaagcgcaatgtcgctctcatcggcgcaatcgtcgccgttatcggcacggtttccctgttcatcaacccgagcgccctcaatcttgcgctgttcgcctgcgtcatgcgcggcatcggcaagggctgcttccgcggcgtaaaatactccatgctggctgacgttatcgaatacggcgcatggaagagcggcatccgcgtacagggcctgatggtttccgcaaccaccgccggccagaagttcggctccggcatgacgagcgcgatcttcggcgccctgatgagcctcgtaggcttcgccggcaccgtaaccatcaatgccgcacagtctcagatgctcatcgccatctacatcatcggcaacatcatcgcctggggcggcatcggcgtactgcttctgttctacaagctcgataagatctatccgcgcattatcaccgagatgaagcagcgcgaggctgctgaggcagaaaaggccgctgcaaacgcataactccgacagactctgacactcactaatcatctttttcttcccttatatggcaacagccggcggagtcatgtattctgccggctgccccttatttcgcatggccctatcccggcgcataacaaacttgaaaggcgtgtaacaaacaaatggaaactatgtcctatgaaaaccgtatcgccctcggcaatctggtaccgacgctcggtcagttcaaggtaatggataaaattccgcagtaccagcagtgcgaggtgcacaatctggtcgaggcaccggctgaggtgcccgaggtgctgcgccatgtcgtgttcaacatcgaacgcggccagacgcttcacgaaaccatcgactttctcaatatgtgccccgacctcaaaaacatggacatcatctacgccaacgagctggatgacggcgcggtccgttcgggcaactgcaacgtggcgtatgagatcgccaagtccatcggcatgaactatgcctatggtctggagttcatcgagctggtcaacccgaacgacaacaagggtttccacggcaacgccctgttctcccgctggcccatccgctgggcgaaggtcgttcatatgcccgagcagtacaactggtactacgaccgccagaagcgcatcggcgcacgtgtcgccatcgtctgctcgctcgacatcggcggacgcgaggtcggcgcggtcagcgttcatctggagaaccgtgcggacagcgagggccgcgcggcgcagatggcagtcgtatatgatgagatccgccgttcgttcgcgccggacacgccggtcatgatcggcggcgacctgaacaccaacaccttcgacggcaacgatattccgggcttcaccgcgctgttcaacgacccggagcgcctcgcgaagcacatggcggcggtcgagaaatacgagcgcgtcctgccgcaggccgaggaaaacggcttctcctaccgcgagttcagcagcatcgagggcacgcgccgcaagccgatgccgggcggcaagagcatgctgctcaagctggactggctgatggcgcgcggcatggaatgcgtcgatcacggcacgatttcgaccgaaacgaaggactgcacctgggccgagccgggcagcgcgctggcgaagttcaccggtcccgagctgtccgaccacaacgcctgctgggcagactgtcgattcgcaaagtaaatactgaaatctattgtagaaagctgcacacgctgcatacatattggcagcgtgtgcactttttatcgagtgaggagaacctacatcaaatgagtggaatgatacaatacctgcgcgaacttcatttcgcctcggtcgtagtgcggctcgcccttgcgatgctgctcggcggctgcatcggtctggagcgcggacgcaagcgccgtccggccggtttccgcacctatatgctcgtctgtcttggcgcggcgctgaccgtgctgctcagcctgtacgaatttaccatggtgacagggccgtggtcggatatttgcgcagagatcggcataaaaaccgacgtttcgcgtttcggcgcacaggtcatcaacggcatcggctttctgggcgcaggaaccattctcgttaccggccgccagcaggtcaagggcctgaccactgccgctggtctgtgggcgtcggcctgcaccggccttgcggtcggcgcaggattttacgagtgcgtgttcatcgcattcgcgatgatatttctcagcatccgcctgttcccaattgtggatgcgtacatacaggagaacgcgcgtgacatcaatctgtacatggagttctattcgctcggggacatcagtaccatcatcaatcagctgaaagcgcagaacgtgcagatctacgacatcgatatcgagcggaacaaaagtggcgaggcgctgcacccaagtgcgatcttctcgatccgcctcaatgaaaaaataccgcacacgcagcttctctccgatctggcggagctggactgcctttgcgtgatcgaagagctgtaaggagtggactgctatgttatctgtttttgacggcctgcgcgatgtgacgacactttccgtgttcgtgcgtctggcctgcgcgctcatctgcggcggcattatcggtatcgagcgctcgtacaagcgccgcccggccggcttccgcacgcacatcctcatctgcatcggcgcggccatcaccacgctgacgagtcagtatctgtatctgaatatgcattatttcaccgatatggcgcgtctgggcgcgcaggtcgttgccggaatcggcttcatcggtgcgggcaccatcatcgttaccaagcggcagcgcgtcaagggtctgaccacggcggctggtctctggacctcggccatcatcggcctcacctttggcggcggcttctacgagggcggcattctcgcgaccgtgttcatcatgctcgccgagcttgtgttctcgcgtatcgagtaccgcgtgctcgaaaatgtgccggagatcaatctgtatatggaatacgagggcaagcactgtctggacgatgtgcttcagctctaccgcagctgcaatattaaggtgctgaacatccagattacgcgctcggcagaaaacggtgagcataacgcctgcgctatctttacgctgcgcctgccgcgcagctgcggcgtagaaaagttgctgacacttgtcggcaagcgcgagggaattgtgtcggtggaagagctgtaaaccacaccggatttcaaaaaacagaaaaccaaagcggtgatgcgcctcgaatttggaggctgcattgctgctttctttcgtttttacccgatgtgccgtcgcgtaagatgaagaaaaatatcgagtcgctgcaaaaagacagtaagggtcatagagatttttccctgcggggctggatttgaacaatcaaatccgttgcttgttacaacatcttctacgcaaaaaacgcaatattggcaccatcaaaacaaaccggagcgcacagctgaatttcaggctgtacgctccggtttttgctgttcagattggcgttcataaaaatttctaaaaggttttgtcagttcttgagggcaaaggttgtagttgattagcagagggacaaatccagcaaaattcagaagagaggagcagcggatgatggtccgccggggcggtatccagcagctttcctgccatgcgcagagccggtccgtcccggttccaggcggcggcaaagtaattgaagaactttctctctgcgttttttcgctgaaatcccccggtatccgcgcagaccgcccgcttactgccgcagaaaatacaccagacacggccggccgccggtgaggtagtccatttcgctgccgatgatctgccggtcggtcagataattcatgtaccggcgcacggttacgaccgacagaccgacgtgcgaggcgatttcatcgctcgtgtgccgctcgtccggcgcggcgcgcagataggtctcgattcgcgcaagagtctggctttgcaggcccttcgggggagcagcagacggcgccggcgccgtctgccggaacagcgtgtgatcgagcgcatcctgactgaagctgtcgcgctgcacgctttccctgcggcggcagaacacctcgagcgcctgctgaaaccgctcataggcaaagggcttgaccagataatccacggcgcccagccgcaccgcgtcattgaccgttttggcatcgtttgcagacgttaccatgatcacgtctgcgtccacgcccttcgcgcggagctgcagcagcagctcggtgccgctcatctgcggcatgtaaacgtccaggatgatcaggtcgatcggattgtgctgaagccagaacagagccggatgcgccgccgaaaaggtctgtacgacggcaaaacggctgtcctgctccacataacggcggttcagccgcgtgatcatcggatcatcttcaataatgaccactgtatacattgcagatcgttcctccttaggtctgtgcgcggctttccgcgtcggaaagtgtgatgatgaatgagctgccgatgcccggctcggactccacgcggatcgtgccgccgaaggcatctacggtctccttgacgagcgaaagtcctgtgccgcgtccctcgcccttggtcgagaagccgcgctcaaaaatacggtcgagctgcggcgctgccatgcctgtgccgctgtcatccacgctgaggagcatgccgtgctcaccctcgcggatgctgaccgtcacttccttctgcgcattctccggtgcgctgcgcagggcgtcgaacgcattttccgtcagattgccgaggatggtgatcaggctgctggccggcaggtactgtccgtccccgcgcagctcgctggccgggtcgaggacgaaccgaatgcccagctcggcggcgcggtatgacttgccaattaggagagccgcgaccgacggctcctgaatgcgctcggagatatagctgatcgagtgtgcgcgcgtcttcgtcagacgcagaacgtattcctcggcctgcctgttttccccgagctggagcagaccgagaatgacatgcagcttgttggtgaattcgtgcgtatacgcccgcagcgcctccacgatatgctgcacgccggtcagatcctgtgccagccttgtgacctcggtgcggttgcggaaaatagcgatcgcgccctcgatctccccgtcgcgccagagcggcatgcggtcggatatgaccgaaacgtgcttaatggattccagactgatgttgtactcgctttttccggtctgcatgacgcgcgcgatggtcgaacgcggatagatcgccctgagcggctgtccgagcgcatcgctcgtgcggatgttgagaatgtccgccgccgcacggttgatataggtgatcgtgctgtgcgaatcaatggccagcagaccctcgtcgagcgcatcgaggatatccatacgctgcaaaaacagctgacggaacgcatccggctcatagccgagcagctcctgcttgatatgattagagaagcgcacgctgagcagactgccgacaccgagcgcgagcagggtgatcagacagtagaacagcagcacgtgcagcaccgtccggcgataggagcgcagatacagccccgccatcacaatgccgagcgcctgtccgttttcatcgcgtaccacggcgtaggcgcagcggtcggcgccctccggcatttcatcgctggaaagcagcggtctctgctcgctgtacaggcggcggaccgtatcggcccgcagggtcggcagcacggacgcctctccttcgccggcggcgagatcgtagaataccaaaggtctgccctgtacgtcatatatgccgagcatatccaccgcggcgacgcggcggacggtacgttcgagatactgctgcgcggtatcggtctggatcgtatccgtcaggagcggcgcgtcggccgccatctgcgcggcattggacagcagctgatcgcgtgcgtacacatcctgatacaggccgatgccgagcccgaccgacgtcgccagaagcacgaccacggcaatgcacaggatcagcatccggcgcacacgccggtgcagcgagccggatgagtgtgcatttgtcaatttcatttccccctttggaaaagctattttatatcatagcacactggtcaaagttcatcaaatcgctttcggaaattttatgaaacccgtcaaattgcgcgggtttattttttttattttcgtaagcttgcgcagaacccgtcggatttctacaataggaacgcaaagcaaaacaaacgaggtgatgccctttgggagaaatcaaagcggaattgaatgccgagctgcaaacccacattgcgttcgagattccgctgtttggcggtataccggtaccggaatccgccgtggtaagctgggtcatcatagcggtgctgaccctgctcgccgtctggctgacgcacgggctgcgaaaacggccgggacgccggcagacagccgccgaaatgctggtgggcttcatcaacggcttctgccgcgacacgctgggcgacaaatactggcgcctgttcgcgccgtatctcggcacggtcggtctgtatctcgcgctggcgaacatggccggactgttcggcgttaccccgccgaccaaggacctgaacgtgaccgccggtctggcgatcatgagcgccctgctgatctacggcgcgcagttccgcgtccacggtttgcgcggcggtctgaaaaagttcagtgagccggtcgcggtcgtcacgccgctcaacatcatggagatcggcattcggccgctgtcgctctgtatgcggctgttcggcaacatcttcgccggcttcgtcattatggagctggtcaagatggccgttccggtcgttgtgcccatcccgctgagcctgtatttcgatgtgttcgacggcatgatacaggcagtcgtattcgtctttctgacgacgcttttcctgtcggaatcgcttgagtaaccactgttttatttgagaaaggactacaaaaaatgagtattgcaattggtgcggctatcgcagttctgaccggcatcggcgccggtctcggtatcggctacgcgaccgcgaaatcctcggaggccatcgcccgtcagccggaggcctcgggccagatcagcaagaacctgatcctcggctgtgcgctggcagaggcaaccgccatctacggcttcctgatcgctatcctgctcatcttcatgaattgatcggggtgagatcgaatgatcctcaatctaaatgcacagatcatctgggtgtttgttgacctgctgatcctgttcgtgctgatgaagaaattcctgttcgggccgatcaccagaatgctggacgaccgcgcacaggaggtgtcggacacgctcgatcaggcggacaggcgtctggccgaggccgagcagcagcagaccgcgcatgcggcgcagctcgcctctgcgaaggcggaggccgcgcagatcatagaggacgcccgcgcacgcggtcaacaggaatacgaccgcctggtcgcggaggcccgcaccgccgtgcagcgtctggaggagcagtcggcgcagcgccgtgaatccgagcgggcgcagatgctccgcgaggcgaaaaaggagctcgccgctctcgttctgctgaccaccgcaaaggtatcccggcagacgctcgacagcgacaccgaccgcgccatgatcgacgatttcctgcgcgaagaaacggaggctgcacgatgaattcgaccgccgtacagtatgccggggcgctgcgccatgccgggtgcacgctgagcgagctgcggcgcactgccgactgcctgaccggctgcgcggagctgtgggacgccctgtgctcgcccgccgtgtcggcacgggagaaaaaggccgtgctggcccggctgcccgatttttacgcgcggggagcgctgcggcatttctatctgctgctggcggataaaaaccgctttgcgctcctgcccgagatcgtccggcagttccgtctgctcgagctgcgcgaaaacggcgagggtctgtgcgtattccgcagtgcccgtgagccggaggagcagtcgctcggcgcactggcccgcctgctgtgcgcacggcacggataccgcgcggttacgttcgagatcgtgacggacgaaacgctgctcggcggctttaccgccgagatcgacggcgtaacatacgataaaagcgtgcgcggacagcttcgcgcactggcgcatgacctgtaaggggtgaaaaccattgaaccattcagacgagattttatccattctccgcgaggagatcgaacagtatgacagccgaacgcgctgcgacgagaccggcacggtcatcgaggtcggtgacggcatcgccaccgtatacggactgaaccgcgccgtctacggcgaactggtgcagttcgacaccggcgtgcgcggcattgtgctcgacctcaaacgcgacagcgcgggcgtggtgctgctcggcagcgaggacggcctgcatgaaggctcgaccgtttcccgcaccggacgcgcggctgacgttccggtcggtgaggcgctgatcggccgcacggtcaacgccctcggcgagccgatcgacggactcggcccgatcgaaacgaccgagcgccgcccgatcgaacgcgaggcttcgggcgtggtatcgcgcgagccggtcaaccagcctatgcagaccggcatccttgccatcgatgcgatggtgccgatcggacgcggtcagcgcgagctgatcatcggcgaccgccagaccggcaagacctccatcgccatcgacaccatcctgaaccagaagggacaggacatgatctgcatttacgttgccatcggtcagaaggcatccacagtggcgcgtctgcgcggcacgctcgagaaatacggcgcgctcgattacagcatcatcgtttctgccaccgcagcagacggtgcgccgcagcagtatatcgcgccgtatgccggcgcggcgatcggcgagtatttcatgagcaggggacgcgatgtgctcatcgtctacgacgatctgtccaagcacgcagtcgcctaccgcacgctgtcgctgctgctgcgccgctctcccggccgcgaggcatatccgggcgacgtgttttatctgcattcccgcctgctcgagcgcgcgtgccggctgacgccggagtacggcggcggctcgatgaccgccctgccgatcattgaaacgctcgcgggcgatgtctccgcctacatcccgaccaacgttatttccatcaccgacggccagatctatctggaaaacgacctgttcttcgccggtcagcgcccggcgatcaacgtcggtctgtcggtatcgcgtgtcggcggcgccgctcagaccaaggctatcaaaaagaccgccggtacgctgcgcatcgatcttgcccgcttccgcgagctggaggtattcacccagttcagctctgatctggacagggacacccagcaggcgctcgagcacggcaaacggctgatggagatcctcaagcagccgctgtgtcatccgatgccggtatggcggcaggcggtcattctgtatgcggccaccaacggcctgctccgcgatgtgccgcttgaccgcgtgcgcggctttgtgcaggacttcgcggacagcctgccggatgcgctgctgaccgagatccagtccaccggcaccctgaccggcacggccgccgagcagatccgggaggcactcgaggcctataaagaacaggtgagcgcagtatggcaggcataaaggagatccgaacccgtattgacagcgtgcagcagacgctcaagatcacgaacgcgatgtatctgatctcgtcctccaagctgcgccgggcgcggcagcagctgaacagcgtgcagccgtattttatgaagatcagctccacgatcgcggatatcctgcaccattctcccgagatcgagcatatttacttcgataagcgccccgagcggaaacaccgcagggcaggctatatcgtgatcacgggcgacaagggtctggccggcgcgtacaaccacaatgtccttcggctggccgaggagcagctggcgcaggaggacgaccccacgctgttcctgatcggtcagatgggacgcgcctactttgccgagcgcgacatccgcgtggacggcgagttcatgttcacggtgcaggacccgacgatcgcccgcgcccgtgatatcgcggatattttcatccgcctgttccgcgaggaccggctcgatgacgtttatgtcatctacacggaaatggtaacgcccatgcggctcgagccgcgcgtgcagaagctgctcccgctggacgtcgatgcgttcccgtgggagctgcgtccgggcgagaacggcccctatcatcagacggtgcagtatatgccctcggctgaccgggtgctcgagcatctggtgccgggctacgtcaagggcgagctgttcggcgcgctggtcgagtcgttctgcgccgagcagaatgcccgcatgacggctatggatgccgcgacggacaacgcgcgtgatatgctcaaatcgctttcgctgcattacaaccgcgcacggcagtccgccatcacgcaggagatcaccgagatcgtcggcggcacgcagggcagcgcgacagagacgccgcagccgcgccgttcgattccgacgcgaaccgtccgttttctggcggacggcagccgcgcatagaaagtgaggaaaaaaactatgaaacgcaaaggtaccgtagtgcaggtgaccggcccggtcgtagatgttgcctttgagggcggcggtctgccggagatcaacgaggccctgtctgttgcaccggacgggcaggtgcgcatgatggaggtcgcacagcatatcggcggtgacacggtgcgctgcattatgctctccccgagtgaagggatcggccgcggcgacgaggtgctgtccaccggccgcaccatcgaagcgccggtcggcgaagcgacactgggacgaatgttcaatgtgctggggcagcccatcgacgaaaagggaacggtcgaggcgcaggaaaagtggtcgatccaccgcgctccgccggtatttgcccagcagaacccgacgaccgagatcctcgagaccggcatcaaggtcatcgacctgctcgcgccgtatgccagaggcggcaagatcggcctgttcggcggcgcgggtgtcggcaagaccgtgctcattcaggagctgatccacaatatcgccaccgagcacggcggctactcgatcttcaccggcgtcggcgagcgtacccgtgagggcaacgatctgtggcgcgagatggcggaatccggcgtgctgagcaagaccgcgctggtgttcggccagatgaacgagcctcccggagcgcgtatgcgcgtggcgctgaccggtctgaccatggcggaatacttccgcgatgtgaaaaagcagaacgtgctgctgtttattgataatatcttccgttatgtacaggccggctcggagatctctgcgctgatgggccgcatgccctcggcagtcggctatcagccgacgctagccgatgaagtcggcgcgctgcaggagcgtatcgcctccacaaaggacggcgcgatcacgtcggttcaggcggtctatgtcccggcggacgacctgaccgacccggctccggccacgaccttcacgcatctggacgcaaagaccgtcctctcccgcaagatcgtcgagcagggcatctacccggcggtagatccgctggattccacctcgcgcattctggagccggacattgtcggcgagcggcattacaaggtcgcacgcggcgcacaggagcttttgcagcgctatcgtgagcttcaggacatcatcgccatcctcggcatggaggagctgggagcggacgaccgacgcatcgtcgaccgcgcccgccggatgcagcagtatttctcgcagccgttctcggtagcggagcagttcaccggccttgagggccgctatgtgaccctggaggacacgatcagcggctttgaagccctgctcggcggagaactggatcagtatccggaggctgccttctccatggtcggtacagtggacgaggttcgccggaaagcgcaggatatgggggcgctttgatggaaaacaccttctatctggagatcatcacgccggaccgtcagttttataccggcccggcagacagtctggtcatgcctgcgctcgacggtgaatacggcgtgcagccggggcatgaaccggtcgttaccgcacttcgtccgggcaccgtccggtttcacgccgagggtatccggcacgaggtggtcgtcagcgacggctttgccgagatcatgccggactatgtcatcctgctggtatccagcgcagagcggcccgaggagatcgaccgtgcccgtgccgagcgcgcccgcgagcgcgccgaggagcgtctgcgccagaagcagagtattcgtgaatatcatctatccaaggcggcgctggctcgtgccatggcacgactgaaggcgacccgctgacctctctcccagcgcctgccccggtgtcatcagatggaacatcggagcaggcgcttttttgataaaaacaagcaggggctgactcggaatgattgcatgaaatcacctgagtcagcccctttaaggcaaccggagcttaatggtgcggtgttgccttaactgtgctctgtcttatttttgatcggcggcgagggcggcgtcgatgtttttctgaagctgcgccagattatcggcgttgtcgatgccgccgagcagcggctcaccgactgcatttccgttccggtcgaacacataggtcgtcgggaaggccatgatgccgagggcgaacgtgccggcgtcgctcgaggaatcgaaatagatattgcggtaggtcgcgcccttggtttgcaggatatcctttgcggtggcgatggcatcggcgttgccgtcgagcgtttcggtattgatgccgatcacctcgccgccctgctgcttcgcggtctggttcagcttgtccagctcgcccagctcagcgacacagggcttgcagccgctgaaccagaagttcacgaccgtgtaggcgttgttcgcgaacaggctgctgtcgaccgcattcccgtcgagatccttgcccgtaaactccggaaacgcactggccgcggccgtttcgctctggccggcgctgtcgtcggcgggcagggccgcgatctgctcttcgatcgagcggatgctctcggcatcgcttttcagcgtctgataatcctcgtcggagagcttgtccttgcagttctccagcgcgctcagcaggacatcgccgtagttttccgccgttgcgggagaggatttgtccatggaggcgaaaacctgatcccacagctcctgatgtgtgccgaggatggcgttttcctcctcgagcagctccgcagaggtcttgctgtcggtatcggcagcttcagagccggacttgccgcacgcagcggcgcccagcagcaggctcaggctgagggcaagggcggttgcacgtttgatattcatttatgagttctcctttgttttttcgttgccgaagccgtaccggtagcagatcgcctctgccgggcaggccttaaggaccggcgtcattgttttgctgtgtagcatagtttctctatcctttcctgtgatggggaaagtatataccatctaaaaggagattgaaaggagaaaaaacgaaatttttgtaaactttattcatcgccgcctgcgcgctgcgggagtttcctccttttacaggaaaaacggttgacaaagctgcctgcaatggggtacactttagataggaaagaccagacagcgctgacgcgggactttttgtccgtccgtgcagcgaagttcggtatgcgcccttcgcatatcgtcttaaacagcagacctcaactgaaaatctgtgcatgactctcgggaacgggtgcaggtacagataaaggcacagccggtgaaagccggtgccgcaaagccagatgggcctaaacggagcttgtcctccgcatggcagccggctgccaacgatactttgtaccctccttgcagagctgtgcgcactgtaaggggggattttatttggaagctgaatcgtctctgtactgtccaaaacggttccatgaaaaacacaatcatctgtgctactcattaaggagtaagttgtgcagacaagggcacgatcggtgaaagccggtttcgcaaagccaggggcctaaacggaagagcgtcttccgcagggcagccggtttcctgatgcagcttcttcatagtagtctattgctactgaaggagggattttcatgatgaaaacaggaaagaacaagcgattattagccagtattctggcggcgtccatgctgctggcaatgtctccgttcgcgttagcgttagcggacgggccggaaggtacgacagggcaggaacagagtacgagtcagcctgccgaggttaaaaccgaaaacggcggcggcggcagcagcgagagcagcggcggcagcgagagcaccggcagcggcaccgagagcggcagcggcaccaccacgggcaccaccgagagcaccgacaccaccacgggcggcggcggcaccacgggcggcaacaccgagagtggcggcaccggcacgggcggtggcaccgagagtggcggcaccggcacgggcggcggcagcaccaccgagccggaaaaaccggaagcaccgaaaagcgctgcaaagatcatcgacaagaacgagtacgcgtctatcgctgatgcacttgctgaggcacagccgggcgacaccattgagctgctccgtgatgttacggaaaatatcaagattaacaagtctctgacgctcgacctcggcgggcatacgctgtcgggtgatggtaagaaaacggttgtctccatttcgggcaaaggtaatgatatagacgtaaccgtcaagcacggcactatcaccggcggctatgaaatcaatggcggcggttttgacatccagagcggtaatattaagattgagaactgcatcatcgagaagaatacggctaaatcggctggcggtggtgtaaatatcggtggttccgcaaatgttacaattaccggctcagaaatcagaaataatacagctattggttccagtggcggcgctatttatctggcatcgggttgggcatacgatggatactataattgtgtttgcgaggttgttgacacgaagctcaacggaaactcggcagttgtcggtggtgctgttggcatgggtgcatcccttttccatgatggcattgataatgcctatggcgagaagggcgtaactgctacttttattatggatggcgagtctattatagacggcaatacggcatcttatcgcggcggtgcagtttatctgaccggtaatggttctcgttttctgatgaagaacggtactatcaccaataacacagtaacgggttatgaaggtggcgcaatttgggcaactaattacggcggtgttaccatcgaaaagggtacaatcagcaataataccgctaaaacctatggcggtgccatctatatgaaggccaacattggagagaccaataaggctgcaaaacttgctattgcaacaggtgtgcgcgacgttctgaatctgggagaggtgctgataaccaacaactccgcaaagcagggcggcggtatttatattgattcctatgcctctgcgtatggtattaaagctgacctaaaacaggcgtcgatttacaacaaccatgccagtgtccgggctgatgacatttattccactggcgtaggcacggaaggctgcacggttcagttaggcgaaactgctgacagctggaaactggattgcggtgatactgttgacaactggtatattgacagcgatcaaatgggcgaaggaactgcacgctggaacgcgcatccgggaaatggtgatgcctatgtggttccgtacacgcagcgcgagaacctgaagggtgttttgacgctcaaggcagcgcatccgctgatgtacacgctgacgtatgatgttaccggcgacctgccggcaggctataccgctccggcaaagcagacgctggttaagggcagcaaatacaccgttgcagccgttccggccagtgtgtccggctcgaaggacggcgtaaacggtatattctccttcaacggctggaaaaagaaagacggtacggttctgaccggcgagcagaagctgaccgaaaaccttacgctgtacggcgtctggacctttacgaagaaatcctccggcggcaccgaccctattaagtgggacgtttcccgatccaagaccgcaacgaagctggatacgaacacctggacctccaatgtgaccctgtctctgcccagcgcggaggaaaaactggcctccgatgtggtgttcgtgctggataagtccacgagcgcagagaaggaagaacaggcgctgggtatgcttactgcgctgaaagagcagacggcaaaaacgggagcaaaggtcaaggtcggcgttgtgatcttcaacaagcaggcaaacgtgaccgctccgcttacggatcttgcaaccggttccgaaaccattgaagacgcaattaagcaagagattaaaagcggaacgaatacccacgccggaatgcttgcgggcaagcagctgctggacgaggataccgaggttgccgcaaatcggaaatacctgatttttgtaagtgatggtattacctatatgtataatgcggagcctactgttaccgcatggagtttttttgctgatgcctggaaacactgggctggccccgataactgggactctaaatatggcaacaataatcctcctgctgactggtctgcatggatgaccgagattggtaaacaggttgagactcagggcacagaatatgaatatccttacgatggaacagcggaaaaatggactcctgaggatgattcttctaagaattatgcgaactccattgataaggctctgtatttgacctatcaggtttatcaggaagcacaggaggcgggatacaactgctacgcagttgcgaatgaagtcgagcacaactatctctggggcccggcctttatgcgctacctggccaatggccaaagggtagacttcggcacaatccagaatgacatcctctacgccgtcagcgccggttccacggtgaccgacaccatcggcgagaagtttacattcggtggtgtagacagctttaccttgaaggtcggcacaaaggaaatcaagggcgtcaaggacgcttcggatgagaatacggtaaactttggcgagaagaagaaggacggtaaatatccgtacaccgttacttacaccccggctaccaagacgttcgtctggaccatcaacgagaacgtctccaacttcgcgccggtgcagctgacctataccgtcaagctgaccaagcccgaaaccgaccccggcacctacggcacggaggacctgaagggcgaaaagaatgttccttccgacaaggcactgttcaccaataagcgcgccgttctgaacgccatcaacagcgccggtgcgccgctcaatcctctggacttcccgaagccttcggtgtcttataccgtgaaaaaatcctcctccggcggtggcggtggcggccgcaagcctaccgttaccattccggatgacgtaccgaccggtctgaacggtgacgatcattatgcttacatcgtcggctacccgaacggcaacgttgagccgaacggcaacatcacccgcgcagaagtggcaaccatcttcttccgtctgctgaccgaggaagtccgcaccgcaaattccacccagtccaacagcctgtccgatgtgacgcgcggtcagtggtttaaccatgctgtctccacgctgtcctcgatgggcattgtgaagggtcataacgatggcacgttcgcgccgaatgcgccgatcacccgtgcggaatttgccgcaatcgccgctcgcttcgacgataagaacagggatacgtcctcgaagttcacggatattgcatctcactgggcaaagaatgagatcggtatcgctgcaaacaagggctggatcaacggctatccggatggtacgttccgtccgaaccagtatatcacccgcgcagaggcgatgacgcttgtcaaccgcgtactcaaccgtctgcccgagaacagcagcgatctgctcgacagcatgatcaagtggccggataattccgatgcttccgcatggtactatctcgctgtgcaggaggccaccaacagccactactacaagaccaaggagaacaagttcgagaagtggaccgagcttcgcaagacccgcgactggaccgaactggaaaagtaaattttcactgcatcccccggcgaaagccgggggatttttttgttatttggttccgggcgcataaacagacgcggtttacacgcttcgcgccgtccggccgtgcagcatgtccatttctctgtgttttgcggttttcgccatgatttgtgcgtctcccttgtgcggtttaccagaactatcttaccatgtgcggaggagatgcgcaaggcggtgtttttgcggttttcatgtatgaaaagcacccggctccgctgtttggcaaagccggcccgcatggatacaatataggaaaagggacgctgttacagcagcgcccctcaagtcaccaaagtttatttatgatgaccgttcgtgtgtcagacgagcggtcgtcgcgctttttacgccggaacagcagtcgcgcggcagcgcgcattcaaaagcgtttgctgcgcaaacgcatccgagggcgctgctgttcttattcgccgagcagcttttttgcgttgttgtagaacacatcctgcatggcggcttcgtccagtccgcaggtaaggaccttctggatctccaccgaaggatggtggaacggataatctgtgccgaacatgatgcggtcgtgaccgacctcttcgtaggcctgacggatctttacgcccatcggcatgccggacatctcaagataaatgttcgggaagcgctttgccatcttgagcgcggcgtcgatgtaaacgccgtgtccgtgacccatgtggatcattacggtcttgacctcgggaaagcgctccgcgagcaacgcgatgctccacggcagcgaatacggaggatggccggagtgaatgaacacaggaagatgacggctgcgcgccatctccattaccggatcgaccgcggtatcgtccgctacgaacgcatggcgcagcggattcatcttgatgccgcggaagccctttccgtcgacataggtctcgaccttttcgcggcagatgtccgcgccctcgagcgggttaaggtacacgagcgggataaagcggcccggataacgggcggccgcctccgcgacaccctcgtttcctgtgtgatccttcgcgcagagcacggtctgctcgatttcatattcatccatgaacgcgatcagctgctcgggggagccgtctacgccggcccagctgccgaagtcaccgatatgtgcatgtgcatcgatctttttcatattgccgctcctctcagctgcgcttgaggcgctcgatcaggttggaggactgcatgatcgtgatcacgaccgaggcgataacgatacctgcaatcgtctgcatggtgatggtgggaatggtggcgattgccgccgcagggctgatgagcacgatcttgacgagctgatagccgacgatctggcagacgccgcccagaacctcgccgatgagccagccgtatctgtgctccggcatgagcttttccacggccagacccatgataagcgccataatgcccttgatgatgaaggtcggcaggacccacagcatcgcgccgctcagcaggtcggagagggctgcacccagcgctgccgcaagtgcgccgtcctttcggccgagcagcataacgccgacaaagatcgcgcagtcacccagatgcgtatagccgccggtgatggcgatcggtattttgaaggtgtacgttccggcgaaaatgagcgccgccatcatggcgatgcgcacgattcgtttcaaatccataactgttttctctcgctttccatattcgtcttttatccattatatcagaccgtgaactgtttgatagcgtcagttcgcggatttttattaaggtcagatggagcgggatgaacagctgcgagagcacatttatctgcataacatccgttccgtgggaaacactatccgaaaaaggagcgtgttttcatgtcagaaatgttttgctttcagtgtcagcagacggcaggcggaaagtgctgcgtcagcacaggtgtgtgcggcaagcagccggagacagcgcatttacaggacgaactggtacgcgagctgatcggtctggcggaggcggcgacagcggccggacagcgcacgccgacggccgaccggctgttggcggacggtctgtttaccacactgaccaacgtcaattttgacaatcgtgcgatcgcggaatttaccgcgcgcgtgcgcgcagaacgcgacagcttcggcggcgcgccgtgcaaggtcgtggagctctggaagggcgacacggatacggtctctctgcggtcgacgctgctgttcggcatgaagggcatggcggcgtatgcgcatcacgcgatgaacctcggctacgtggacgacgaggtgagcgcgtggttttataagggactgtgtgcggtcaaccggccgcattctgtggaggaatggcttgcgctcatcgtcgaattcggacagatgaatttccgctgcatggagctgctcgaccgtgccaacaccggcaccttcggtacgccgcagccgacaaaggtgccgaccgacatcaaaaaaggcccgttcatcgtggtttcgggtcatgatctggccgatcttgcgcagctgctcgagcagaccgagggcaggggcatcaatatctatacgcacagcgaaatgctgcctgcgcacggctatccgggactgaaaaagtatccacagcttgtgggtaacttcggcacggcgtggcagagccagcagcgcgagttcgagaacatcccggcgcctatcctgttcacgacgaactgcctgatgccgcagcggccgagctatcgggaccgtgtgtacaccacatcggtggtcggctatgagggtctgcgccacattgaggcggatgcctgcggacgcaaggacttttcgccgcttatcgagcaggcgcttgcgctcggcggttacgagcatgaccacagcatgagcggcatcaacggcggccatatgctcatgaccggctttgcgcacggagccgtgctctcgcacgcggaggagatcatttcgctcatcaagagcggaaaggtgcgtcatatctttctggtcggcggctgcgacggcgcgcaccccggcagaaactactacaccgagttcgtcaagcagacgccgatggatacgcttgttctgacgctcgcgtgcggaaaataccgtttcaatgatctggatctcggcgagatcggcggtctgccgcgcattctcgacatgggacagtgcaacgacgcatacagcgccatcaaggtcgcgctcgcgctggcggatgccttcggctgcacggtgaacgacctgccgctcacactcgtgctctcgtggtacgagcagaaggccgtgtgcatcctgctgacgctgcttgcgctcggcgtgaagaatatctatctcgggccgacgctgccggcgttcctgtcggaaaacgtggtgaaaatgctggtagagacttacgatctgcacccgaccaccgcgcccgagcaggatatggacgccattctgggaagaggataaccgctcacgcgccgcacagatttgcctgcaaatattcgagcagcgtccgcgccgtgaccgagcttgcggtgcgcgcgaacgcgagaccgatggtgcggaagctctccggcacgagcgggcggatctccacattgtttgcgaacgcctgcatggcaagctcctgcgagatcgtgacgccgaggccgtgcttgacgaaggcaacgatcagcgtatcgtcgcggaagctgtacacggtctgcggcttgtgcggatatttttccagcagatgcagaatgtcgttgtcgcagccgggcgtttcgatgatgaacgggtactggagcagctcctccggggtgacgctgctgcgctgcgcgagcggatgctcccgcggcagcacggcgcagagcgcatcctgatgcagcggataaaaggtcagatcttccgccagaatggacgagagaaagccgcagtccacctgcccgcggatgatccagtcatggatctcgtcgtagttgccgtcgaagatctgcacctcgacctgcggatagttctctttgaaaaaatacacgacgtgcggcagccacatcgccgtcacgctcgaaaagctgccgatgcgcagtctgccctcgaccttgttgttgatgttgaaggccgcctgacgcagcttttccttctggtttaccatttcgcggatgtaggggatgagccgctgcccgttgtcggtcaggacgacccccttctttgcccgggcgaacagctgcacaccgagctcctcctcgagccccgccatcatctggctgatgccggactgcgtgtagttcagcgcctcggcggcctttgtgaagttgccggtctcgcagaccttaagaaagatttcatagcgatcgcgcacctcgcgcataggtattcctccttttcgatattcggtacagcatgatgcttgtaaagcaattgacggatgccgccttgcttttgtatagcatacattaccggatgtaatgtatagcagtaaaaacatttattttacttatattctatcatgtggtatgttagctgtacaggaattttggggtaaggagaaaaatttcacaatggaaaaaaagcaaaatcacttttcgggacagctggggtttgtccttgccgcggcaggaagcgcggtcggtgtgggaaatctgtggcgtttcccgtatctggcggccaaggacggcggcggtctgttcctcatcatctactttattctggtgctgacgttcggcttcacgctgctgacatcggacatcgccatcggccgccgcacgcataagagcgcgatcggcgcgtatgagcagatgcgcccgaagtggaagggtctgggcatcctgaccttcctcgtgcccgtgctcatcatgacgtactacgcggtcatcggcggctggatcacaaaatatgcggtcgtttacgtctccggtcaggcgagtgctgcggcggcggacgattacttcacctcgttcatcacctcgccggtgtcgccggtggtgttcgcgctgctgttcatgggcgttaccgcgctcatcgtctacaacggcgtgcagaacggcattgaaaaggtatcgcgctggatgatgccggtgctgctcgtgctggtcgttgtcatcgcgtgctattcgctgacgctcagtcacacgaacgcggacggacaggtcgtaaccggctggcagggctttctgtactatctgacgccgaacctcgagggactgaccgtgcagcgctttctccagatccttctggatgcgatgagtcagctgttcttctcgctgagcgtttccatgggcatcatgatcacctacggctcgtatgtgcacccggaggtcgacctcaaccgcgcggtcaaccagatcgagatctttgatactggtgttgcgttcctcgcgggcatgatgatcattccggcggtctatgtgttctcgggcaccgagggcatgggcgcaggcccgagcctgatgttcatctcgctgcccaaggtctttgccgcgatgggcagagcgggcacggcggtcggcattctgttcttcgtcaccgcgatcttcgcgacgctgtcctcctgcatttcggttctggagtccattacggccaactgcatggagatcttccacacgagccgcaaaaagacggtcctggtgctgtcggtcatctatctggcggcgtctgccgttatcgcgctcggctacagtgtattctatgtagaggtgctgctgccgaacggctcggtcggccagctgctcgacatcatggactacgtcagcaacagcgtcatgatgccgttcatcgcgctgctgtccaccgttctgatcggctgggtgatgacgccggattacgtcatcgacgagatggagcgcaacggcgagaccttccgccgcaaaaagctctattgcgttatgatccgctatgtcgcgccggtgatgatgttcgtgctgttccttcagtcgaccggcatcctgtcgaagatcggataaaataatgaaaaccgctgcatggggagaggatttctccgtcatgcagcggctttttatgtgctgactgtttcggcgtcaggaattgaccgcaggcagcaatcaatcgtacctttattttccgataccagaccaccaattgtggtctccggaaataaaaatgtccggcatttcgcaagaaaatgaaagacagcgcggcgtctatctattataatagaaacagcaagacagccgcaggctgctgtatggagggaaaagcaatgaaaaagcttcgtgtcggcgtcatcggcatcggtgacatcagcaatgtatatctgaacaatctgaaaaaatatgatgcggtggaggtcgtggcgtgcgcgtcgcgcggtctggaaaaggcgcagcgcaagaccgcggagcacggtatcccgaaggcctatgcgtcgggcatggagctgatcgcggacccggacatcgacctcgtgctcaacctgaccacgccgcaggcgcattatgagtacaatctcgccgcgctcaaggccggcaagcatgtctacacggaaaagcccctcgccatgacgttcgcggagggcaaagagctggtcgagctcgcgaaggaaaagggcctgctcatcggctgcgccccggataccttcctcggcggccgccttcagaacatccgcgagctgatcgacagcggcaagctcggcaggatcacgggcggcggcgcgtggttcgtcggtcacggccacgagttccatcacccggcccccgcgttcttctatcagccgggcgcaggcccgctttacgacatggggccgtattatgtgaccgcgctgctcagcctgctgggcccggtgcgccgggtctgcgcgatggcgacccgtgccgcgcagacgcgcaccgtgccgtccggcccggcaaagggaacggtgctgccggtcgatgtggacacgcatatcaacgctattcttgagttttgctcgggtgcgcaggtgacgctgacgtgcagctttgacgtctgggacagcgagctgccgcgcatggagctttacggcaccgagggtacggtgctcatcgacgaaaaggacccgatcgcaggcccgaacctgttcggcggcgacacgctgatgcgcacgccgggcgaataccgctgggcagacccggaacgccgcccggagaatgtagatacgccgtggccggtcgtaccgaactgtcatccgttcaactcggtcagccatgcggaaaacccgcgcggcatcggtctggtcgatctggcatatgcgcttcagaacggccgcatgccgcgcgcctcgggtgacatggcgctgcattcgctcgaggtgatggagtgcatcctgaggagtgcccgcgagcacgttttctgcgagaccacgaccacgttcgagcagccgaaggcgctgccgctgcattttccggaagaaaactgatacgcatataaagaaagagagccgatcagccgcaggcgtaagcctgcggttttcccccgcttgcacccttaaa

SEQ ID NO: 12913 - DNA, 663 bp, Unknown
  gut microbiota DNA sequence
cgccaccggttgcaaaactcagcgtcataagttataatagaggtatcaaaacctatattcaaaactcttagtgtcaaaaccgggaaaacgggggaatttacatgatattcggctacgcgagagtctcgaccaagacgcaggcgcgcgacggcaacagtctggacgcgcagcaggcggcgctgacggcggcgggcgcggaaaaaatctatacggacaccttcaccggcacgaagatcgagcgcccggaattcgacaggctgcgggcgcagctgcggcgcggcgatgtgctcatcgtgaccaagctcgaccgcctcgcgcggtcggtgtcgcaggcgtccggcctgatcaccgagatgatcgacgagggcatcaccatcaacgtattgaacctcggcatcctgtccaacgactcggtgaacacgctgctgcgcaacgtgctgctgtcgttcgcgcagttcgagcgcgacatgatcgtgcagcgcacgcaggagggcaaggcggtcgcgcgcgccaccgacccgaatttccgtgagggccgcccgcccaaattcgatgccgagcagcttgaccacgcgatgacgctgctcgcggaccattcctacgcgcaggttgttaagctgaccggcatcagcaagtcaacgctcatccgggagaggaagcgcc

SEQ ID NO: 12914 - DNA, 41277 bp, Unknown
  gut microbiota DNA sequence
gttaagagggggataagaaaccattcggtgtcttatccccctcttgcccccgccgccgggcggcggcatccctctccgccgtgggtacggcgttctccttctccgccgggagaccccggcaatccccgccgccgggcggcggcaatgcccggcctgcccatcggcagtcagtctcgcctccagcggcgcaccgctgtatcggcggaaatcaaccctctgctgagggtaaagaaaaaagaacgcaccgctgcatctgcggaaggcttgccgtccactgacggtaaaaagaaaaagcaccggctttcgccggtgcggagcggtgttacgcaaacaccgtttgaatcaggaccatataggccgccgtggcgacgccgatggagagcaggttgttgtgcttccagacgtgcagcactgcggtcagcacgatgcacagcagctcgggaacaccgtgcgtgtcggtcacccagccgacattcttgagacagtacaccacgagcagcgcgatgaccgccggaggcagcgtcgcacccagataacggatgatcggcggaatcggctttttgccgttaaaaagcagaaatggtgcaacacgggtggcaaacgtgcacaccgccgcgactgcgatcatcgcgagagcatatccgatcgacatttatgccgcctcctttgcaagctgccggcgcagtgccacgagcatcacgcagatggcaagcatggcgggcaggatgaaattctgagggccgagaagtgcgagcgagagtgccgccgcgccgagaccgaggaacgccgggacatggcttttcgacgcctgccactgctcgacgaaaatgaccgtgaacatgctggtcattgcaaagtcgatgcccgtcgtgtcgaacggcagcacaccgccgatgaacgcgccgatgatcgagccgatgatccagtaggcgtggtcgagaatggcgaccagaaagcgcatcgcgtccgggtcgacgtcagagggcgttttcaacgagcagagcagcgagtaggtctcatcggtcagcgagaagatcatgtaccacttgcgcgcgcccatgctgtggaatgtctcgagaaaggacagaccgtagaaaatgtgacggcagttgagcagcagcgtcatcaccgcgaccgtcacgagcgacgccttcgccgcgagcagcgagacgagcaggtactgtcccgagccggcgtagatggtcagactgcacagaaacgcccacggggtggtgaagccgatgtcgcgcagcatgacgccgaacgcgaaaccgatgaacagatagccgcagagcacgggaatagtcgccgtgaatgcgggacgtaatgccttgcgcatggaaaatcaccttaacatactacagaaataatgggcagaaaaaaagcaccctgacgtgcagagtgctttcagcatattcaacgtcacgccgaaaatcagatagcgcgggttaccttgccggaacggaggcaccgagtacatacgttgatatggcggggagtaccttcgaccagagcctttacacgacgtacattcggcttccaggttcgattggaacgacgatgagagtgagagacctgaataccaaaggtcacgcccttgccgcaaatatcgcactttgccatttttcctgcacctccttctttgtttcttgcatagcagatattatattaccacagcataggagaaaatgcaagattttttttgaaattttttcgataatttaagttttgccggaggcgagtcgggaataagttgaaattctgcataaaaaggggtataataagtaagaaatattgcggaagggagaacccatatgcagcttaaagaatttggcgtgagcctgggagacttgatccacgaatttaattttgaggtagtatacggcccggagggctttgaaaagatcgaaatcacaaaggacgacgtaaaccgtcccggtcttcagcttgccggcttttttgattattttgaccccaaccgcattcaggtgatgggcaaggtcgaatcgagctatgtggaacagatggagtcggaggagcggcgcgcctgcttcgaccggctgtttgaaacgcgcatcccggtgctgctcatcacgcgcaacatcgagctgttcccggagtgcgtcgcggcggcgcagcagtacggcgtgcccatcctgcgcacgaacgacttcacctccacgaccattaacgccctcgttgcgtccctgcgcgtgcagctcgcgccgcgcgtcacgctccacggcgttctcatcgagatctacggcgagggcgttctcttgctcggtgactcgggcgtcggcaagtctgagaccgcgatcgagctggtcaagcgcggtcatcgcctgatcgcggacgacgcggtcgagatcaagcgcgtatccgacaagactctcgtcggtactgcgccggaggtcatccgccactttatcgagctgcgcggcatcggcatcgtcgacgtccgccgcatcttcggcgtcggcgcgatcaagatgaccgagaaggtcgagctggtcatcaacctcgagccgtgggaggacggcaagcagtacgaccgtctgggcatggacggtcagacgacctccatcctcgacatcgcagtcccgagccttaccatcccggtaaagcccggccgtaacctcgccgttatcatcgaggtcgcagcgatgaacgaccgccagaagaagatgggcttcaacgcggccaaggagctgcaggagcgcatgctcaagcagtacggcaactaagctgtcgccaaacttcgtttggccgacaagcggtgttctgacagcgcggggcgccgcaaaacacggacggaaaaaaagttcctgttcagaaacttttttctctctcaagggataaaaagtcaggtacacgccccgactttttatgaacctgctccgcaggttctattatatgcacgctgccgcgcgggggtgcgggaaatcttgcttacgaatttccggacagataagcagtgcacacgacagataacagataaattatatggcagcatcacagactgcacaggaggaacagaggtaaaatgcaaatcattgcggatcttcatacacataccaacgtcaccgaccatgcgttcagcacgctgaccgaaatggtgcaggcggcacatgacatgggcctcaaggccatcgcgatcaccaaccacggccccaccaacccggacggcccgcatgaatggcatttttccaatctgaatctcgtcccgcgaaagatgaacggcgtgaccgtcatccgcggcatcgagttcgacatcaccgccccttcgggcggcatcaacgtcatggcgaacaagagtctgaagcacatcgactgggcgctcgcctccttccatgaatgcctgttcccgccagcggacaggagcatccacacggcggcgctcgagtccatcctctacaacccgtatgtcaacgccttcggccacctcggcaacccgaattttgatttcgaccatgaatacatcatcagccgctgcaacgagcgcggcaaggtcgtcgagatcaacaacgcctcgctgaacgtgcgcgccggaagcaaaaagaactgcgcggacatcgcgcgcatgtgcatgaaatacgaggtgccgatcgttgtggacagcgacagccacatctgcttccgcgtcggccatgtcgagggtgcgctcgaaatgctcgaggagatcggattccccgaggagctcatcatcaacagcagcatggcgcgtctggacgcttacttcaagggccgcggcatggatctgttcagcggcgaagaataagaggggtacttatgcggatcggtattgatttaggcggaacgagcgtcaaggcggcgctctgcgcggatgacggcgcaattctcatcaagcagagcgtaccgacgaaaacgggagacccggacggtctgcgcgcggacatgaagcagcttgcgctcgcgctgtgcgtctcgggcggcgtacagccggacgaggtcgagagcatcggcatcggcgtgcccggctcgtatgacaagccctcctgcacgctcagattcggcacgaacctcggcatgaacgacgtctgctttgcagagacctttcagccggagttcggctgcgcggtgcagctcgacaacgacgcgaactgtgcggcgctcggcgaggcgaccgcaggagcaggcaaaaacgtgaagaatatgctgatgatcacgctcggaacgggcgtcggcggcggcattatcatcgacggaaagctgtataccggctgcaacagccttgcgggcgagctgggacatatcgtcatccggcagggcggcgagccgtgcggctgcggccggcgcggctgtctggaggcctacagctcggcagcggcgctcgtgaagttcgcgcaccgggcactcgatgccggacgggagagcagcctgcgcgaaaacggctctggcctcaacgcgaagcacatctgcgacgcggtagacgccggcgacgctctcgcgtgcgagctgttcgaaacctactgcgacgatctcgcgtgcggtctttcgagctttatcaatatctttcagccggagtgcatcgtgctcggcggcggtcttgcaggctatggcgaaaagttgctcgcgccgctgcgcaagcgcatcgagaaggagaccttccgcggcgacacgaataccgagctggtcctggcctcgctcggcaatgatgccggtctggtcggcgctgcgatgctctgaatatacaataagaaaaaccgctgtatcggaacaaatacagcggttttgttttacctgttctgctttttaccggtcgagcatcttctcgaccagcgcgcacgcatcctcgatgcagccggggcaggagcggcggacattgccgtcggcgacacccttgagctcgcagcagaggtaggtaccgttcttctccttgaaggcattcgccatctcgcgggtctgctgataggtctgcgccttggtcgtgccgggcgctttgatgccggccgagcccttgacgccggcgagcatgaacgcgccgctcagcgcaccgcacatatccatcacgcccatgccgaggccgaagccctcggccatcttataggcggtctgctcgtcgagaccgacgaggtcgcagtaggcgcagacgaccgactgcgcacagttgtaacccttcccgtgcagttcctgtgcacgctgctgtctttctgtcataacaaattcctccttatgctgtgtcgatcaatactccacctgtgtgaagtagtacatgatcgcgttgtactgtgcgcgcgcctcggcctgaaggtcctcctcgctgtcgatgaactgctgatcctctgcgttgtcaataaagcagaattcgctcgtgagcgccgggatgtaaagcgaagctgccgcgcggttggtgtagtagtagtcgccgtggctgccctcgcggaacacgaccgaacggatcggcacgccgagcgccctgtattcctcgagcagcttttccgcaaggagcttcgtcgggccgccgtttttgtcggctacctgcgcgagcgcttccgcaccgcgcgccgtcgtgttcgcggcgttgtgatggacgctgaagaacaggtcggcggtgtcctgataacgctccatgacctcgccgcgcagcgtcagatcgctgccctcctcgagcgtatcgcgcaccatgattacgttcacaccggcgctctccagatagctttgcagatatttcgcaactgaaaggttgatgtgcttctcatcgtataccttgtcgacgctcgtcgcgccgacgtcgctgccgccgtgaccggggtcgatgatgaccgtcatcctgccgtcgatctgcgaggtgcggggcggctcgaccggatcgtccggctcgccctcggatgcggagtagtcacgcacgcggacgagatagttcgcgctgacgtagcggccggttcccttggaggtgtccatgaggtgcgcccagccgttcgcaaggctgtccacgacgacctctgcgttcgcggagagctgaccgacctttttcgcggtcgaggacgcggaagcgcgcaccgcgagcttgctctcgacgtttacgcggtaccagccggtcgtgaacggctcgtctggctcggtcttgccgtcataatcgctcagacgcttgagataagccgcgctgacatagcggctcgtgcccgccgaggtgtccatcagatgcgcccagccgttcgcaaggctgtctacgacgaccttgtcgcccttcgacagctggccgacggacggataggtggtagccggtccggagcgcacggtgagcgaggacgaaacattcacctcgtacagaccggtcgtaaaaacaggttccggcgtcggggcgggcgtcggcgtggccggcgtcgtgctgccgttgttattgctgttattattgttgctgctgttattgttatccggctgctcggggtccggggcgggcgtcgtgagcttgacggtgcgcgtggcattgtcccatccggcctcaaagccgatcgcgtccgcgatatccgcgatgctgtaatagttgttgtcgttgatcaggtagccgcggaaggagaccgcactgccgttgagcaggaccttgaaggtggacgcggagaccttgagcgaggagagggtcgaggcggaaagctcgccgccgaccttctggtatttctgaccggagatcaagttgatgaccgagctctggctgggagtccaggtgacgttgaagggcgcggtggtgtcgctgagaagatacgcgacgtcgcgcagtttgaagtagttatagccgtcaacattataggcctgcggcgtgacagccttgccgtttaccatgaatttatggtcggagaccgcgaccttgggggaagcggctgccgcgctggcgagcgtgacgctcagcacggcacacagagccgcagcgattttgcgaaaatgcataaaaacctccgtttccgcatacagggaaaaagcgaacggaacgtccgttctgcacgaaatgtcaaatcaaatatacagtcataatagcacgatgaagggcggatttcaatgctttgcggcggaatgacgcataactgtaatataagcgaaggggagagaggaacgcaggatgcttgaagatgagtattgtgttctcgagcgaaaaatgataatataaaggtgaaaaatacatcggaggtaactattatgcagttccgttttgcgcacaataacttcaacgtccgcgaccttgagcgttcgctcaaattttatgatgaggcactcggcctcaaggaggtccgccgcatcaatgccaaggacggcagcttcaccatcgtctatttgtcggacggctcgacgccgcaccagctcgagctgacctggctgcgcgactgggacaagccgtacaatctcggcgacaatgagttccatctcgccctttcggttgacgatttcggcgcggcgcatcacaggcatcagcagatgggctgcatctgctttgaaaatccggcaatgggcatttattttatctccgatccggacggctactgggtcgagatcattccgtctaaaatgtgacggaaaaggagatcctatcattgaatccttatcttgatctgttcctgacctttgcgcagataggcgtgtgcaccttcggcggcggctacgccatgctgccgatcctgcagcgcgaggtcgtagaaaagcgcggctgggcgactgaggacgagctgatggactattacgccatcggccagtgcacgccgggcgtcatcgcggtcaatacctcgacgttcatcggctaccgcctgcgcggcgttcccggcgcgatcaccgcgaccgcaggcatggttttcccctcgctcgtcatcatcacgatcatcgctgcgttcattcagcagttcgcgcatctcgccgtgctgcagcacgcctttgccggcatccgcgtcgcggtctgcgcgctcgtgctgcaaagcgtgtggaaaatggcgaaaaagggtgtcgttgacctcccgaccggtgtgattctggtcgcaaccttcgccgctgtcgcctttttcggcgtttctcccgtcctcatggtcattattgcgaccgccgcaggcattctcatcaatgttgtgagggggaggagagcatgatctttctacagctgttctgggagttcctcaagaccggtctgttcgcagtcggcggcggtctggcaacgcttcccttcctcaaggcgatcacacacaagtacccgtggttcacggcgaacgatctgatggatatgatcgcggtctccgagtccacgcccggcccgatgggtgtcaattccgcgacctacgcaggcttccatgccgccgggctgcccggcgcgctcacggcgacgttttcgctcgtgctgccgtcggtcatcatcatcattctggtctcgcgtgcgcttgaccgcttccgctcgtcctcgctcgtgcagaacggtttttacggtctgcgaccggcgtccgccggtctgatcttcggcgcgatgttcacggtgtttgccggttcgctgctgcatcttgacctgtggagcggtccggagagcctgctttccgtactgaattaccgcgcgattttgctgttccttgtgctttcggtcgcgatccggaagctgccgaaggtgcatcctatcgtgttcatcggcgtgggcgccctcgcgggcatcgtattccagttctaaagagagccgaaaggctctctttttgcttacgataccgtcagcagacggtaaaaaaagaaagaagagaacggtttatctttacattgcggctggaaaatgctataatcatgctgtatatttgcgtccaaaagggggacgggaatttgaaaaagaaaattcagacggctcttcgacccggccgagcggcattttatgtgctgtttttactgtttgcagcctgcggcctgtatttttcaaagccgtatggcttcatcggcatggccatcgtcatcattctgcgcatggtcgcgatccgcagcgacgcggagcggcggcagcgggtgtatgatctgatggaaaatatcgagatcgagggcggagaaatccgcccggcggtcacgaaatcgccgctgccgaccgttgtcgcgctcgcgacgaccggacagatcatctgggcgaacgaggccttcgcggacatgaccggccatttcgcacatgcgccgcacatgcgtctgaccgagctcgcgccgacgttcgagacgcgctggctcatcgagggcaagaccgccttcccgggcgagctgcgcatgggacgcggcatctaccatgtattcggcagcatgatccagtcgggcgcaggtcagatgatgatgctccatttcatcgactgtacggaatttgttcatctgcgcgatgattccgagacgcgccggccggccattgcggtgatcgccatcgacaactatgaggagctcgtcaagaatacgaccgactcggagaagtccagcatcctcgccggcatcgacaggcgtctgtcctcgtgggtcaaggattcaagtgccgtcatgcgaaaatatgaccgcgacaagtacatctttatcatcgagaacgccgagctggacaagctggcggcgaaaaagttctcggtgcttcaggaagtgcgcgatattcagaaccatgagggcgttgttgcgacgctttccatcggtatcggccgcgacggcgagacgctcgcggagagctacaagtacgccggtcttgccatcgacatggcgctctcgcgcggcggcgatcaggccgtcatcaagaaccgttacagcttcgagttcttcggcggtctgagcgaggaggtcgaaaagcgcaccaaggtcaagagccgcgtagtcgccaatgcgctcagccagctgatccgcgattcgtcgcaggtgctcgtcatgggtcacaagaacagcgacatggacgccatcggcgctgcggcaggcatggtctgcgccgcgcgcgtcaagaacaagccggtacatatcgttgtagaccgtgagcacaccatggcgagcgatctgatcgagcgtctggagacgcagagcgagtacaagggcgtgttcgtcagcgcggagaacgcgatgatcatgtgcgacttcaacacgctgctcatcgtcgtggacgtcaaccgtccgggctatgtcgagagcgaggcactgctccagtccatcaacaaaatcgcggtcatcgaccaccaccgccgtgcggcggattatatcgagaacgcggtcgtcagtctgcacgagccgtatgcctcgtccgcatccgagcttgtcagcgagctgcttcagtacctcgtgccgacgagcagcatcctgacggcggaggctgaggccatgctttcgggcatctacctcgataccaagggcttttccacgcgcaccggcgtgcgcacgtttgaggcggcggcgtatcttcgccgcgcgggcgcggaggcgagcgacgtcaagcgcctgttccagtcgagcttcgatcagtatatggagcgccagaagatcatttcttccgcgcgcaactgcggccagggcgtgatcttcgccatcaccgccgagcaggtggaccgcatcgcggcggcgcaggctgccgacgagctgctttccatcatcggcaccacggcatccgtcgttgccttccgcagcggcgagaacgatatggcggtctccgcacgcgcggcaggccaggtcaacgttcagctgctcatggagcgtctgggcggcggcggcaatcattctgcggcgggcgcacagctcaggaatacaacgcctgaggaggcggaccgactgatcaccgaagcgatccgcggttatctcgaggatcagcgcgcggagaagcagaacgaacactgagcacatttcgctgccggaaaacgggcagaacaggcataaaacaagcaatataaaattaaggagagacttatcatgaaagtaattctgacagcagacgtaaagggcaagggcaagaagggcgatctcatcgaggtcagcgagggctacggccgcaacttcctcatgccgcgcggtctggcagagctggctaccgccgacaacctcaacgtaaagaaggcgcaggacgaggcgcacgcacgcaaggttgccctcgagcagcaggcagcgcgcgatgcggcggaaaagctcaaggagagcccggtcaaggttccggccaagggcggtgcaggcggccgtctgttcggcgcagtcacctccaaggagatcgcggaggagctcaaccgccagtacggtctgagcgttccgaagcagaagatcgtgctcgaggagccgatcaagaccttcggcgtacatcgcgtcaaggcgaagctgtatcaggacatcgcaggcgagatcctcgtacaggtagtagaggcctaaagccgcttgcgcggcttatagggggcttcagaagccccctatatacgaaggacggttcccttgaaaccgcccttcgatacccgaatgtcgcgccccacgggcgctgggtcggggtacaaaaagacccggcagagctgggcctttttgtgtgctgcgaagcagcacgattgcatgccgtgcgctttcgcgcacggtcgcctgcgggcgggccgagatgctcgccgacgcctttacggcgcggctgcatctaaggttggccgctgcaagcagcggcatcattattatggcggacgtaagtccgcaagtatcgaggtgtatttgttggatgagcttttaatgcggcaggtgccgcaggatctgactgcggagcagtcgcttctcggcgcgatgctggtcgatccgaactgtatcccggaggtcatcgagcaggtgcgctcggatgacttctacgccgatgagaacaagcggatctttgaggtcatttattcgatgttcaacggcgcgaagcgcatcgacccggtaaccgtgctcgacgagctgacgagcgcgggctattacgacgaggccggcggccgcgcctatctgtttcagctcatggacatcacgcccggctcgcggaacgtggcggaatatgtgcgcatcgtgcgcgacaagagcctgctgcggcagctggcggacgccggaagcgaaatccagcagaacgccatttccgggcagggcgatgcctcgggcattgctgagcttgccgagcagcgtatctacaacatccggcagggacgcgagatcaagggcctttccaagctcgaaaacgtcatcgcggatctctataccgagctgaacgagcgcatgcagtcggatagcgacatcccgggtatgtccaccggcttccacgcgctcgacaaggcgctgaccggtctgaacaagtccgacctgatcctgatcgcggcccgacccggcatgggcaagaccgccttcgcgctcaatattgcgctgaacgcggccaaggcgagtatccagaacaagccgaagggctacaagaagggcacgggcgtgtgcgtgttccagctcgagatgggcaaggaacagcttgcaagccgctttctgtccagtcaggcgctgctcgagtcgcagaagctcaagaccggcgatctgacgatggacgactgggacaagatcgcgcgcggcgcgggcgtgctgtcgagtctggatatttatgttgacgacaacccggccatcaccgtgcccgagatcaaggcgaaatgccgccgtctgggcgatgagctcggtctgatcgtcatcgactatcttcagctgatgcacgtcggcggacggcacatggacaaccgtgtgcaggaggtcgcggagatctcgcgttcgctcaagatcatggcgaaggagctcaatgtgccggtcgtgtgtctatcgcagctttcccgtgcgtccgagcagcgctcggacaagcgtccgatgctgagcgacctgcgtgagtcgggcgcgatcgagcaggacgcggacatcgtcatgttcatttaccgcgacgattattatgatgaggagagcgagaacaaaaatatcgcggagatcatcatcgcgaaaaaccgccacggcgcgacgggaaccgtcgagcttcagtgggtcggtcagtacacgaccttctccaacccggaccgcatccatgaggaataacgggcttcttcggtcggcggccgacaccattcgccggtatgacatgctgaggccgggggagcgcgtgctcgtcgccctgtcgggcggcgcggactcggtgtcgctcctgctcgtactgcaggcgctcgggtacgaggtgcgcgcgtttcatctgaaccactgcctgcgcggcgcggagtccgacagggacgaggcattctgccgtgcgctgtgcgctgagcgcggcgtgccgctgcatgtcgggcgctgcgacattgccgccctctcgcagggaaaggcggtcgaggagaccgcacggcgcgagcgctaccgcctgctcgagcgggcggcggagggggataaggtcgcgaccgcgcacaccgcggacgacaatctggagaccgtgctgttccatctggtgcgcggcagcggcgcgaagggtgtttccggcattccgcctgtgcgcggcgcggtcatccggccgctcctgttcgcagagcggcgcgagatcgaggcgttcctgcgcgaaaatgggcaggattacgtcacggacagctccaacctcagcgacgattacacgcgaaaccgtctgcggcacagcgtgctgcccgtgctgcgcggcattaacgagcaggccgcacaggcggcgctccggctcggcgagcagctgcggcaggatgaggcctgcctcggcgggcaggcggaacgctgtctgcaaattgcacttcgtgcggacggcgcctatctgaccgcgccgtttctcgcgtgccatcctgccgtgcagggaagggcactccgcgaggcggcgagacgcgccggaatgcccatgcgcgacctcgcgcagacgcacatcgaggcgctggagcgcctgctttcgagtgcagacccgtccgcgcggctcgacctgccgcacggctttacggcacgacgcgagtacgaggccttccgcatcgcgccgcgtgcgcgcggggtgcagccggaggcgctgccgctcaccgttccgtttgacggcctgtggacggacagaacgagagtcaaactcagaaaattagaaaaatccgaagttttttacaaaacagtcaatactttttgcgcagattgtggtacaatagattttgcatcgctgtgtgttcgtgcgcggcagacgggagaccgtctgcgcctgaccgaaaaggggggcagccggacgctgaaaaagctgatgatcgaccggaagatcccggcggcggagcgagacgccctcgccgtcatcgcagaccggtccggcgtcatcgcggtgcaggatatcggcatggatctcagccgaaggccgggaaacggcgcgcggctggaaataaagattgagaggaactgacgaaatggcttataacatgcgagacgatattaaggaagtatatttcaccgaagagcagctgcgagacaaggtccgcgagcttggcgcgcgcatcactgaagattaccgcggcaagaatccgctgatcgtcagcgtcctcaagggctcgtacatcttcatgtccgacctgacccgcgcgatcgatacgccgtgcaacgtggatttcatggtcgtgtccagctacggcaacggcaccaagacctcgggcgaggtccagatcatcaaggacatcgcgcagccgatcgacggacgcgacctgctgatcgtcgaggacatcctcgactcgggcgtaacgctgcactacctcatgcagatcctcgccgcacgcggcgcgaactccatccgtctgtgcacgctcctgtccaagccggagcgccgcaagatcgacgtcaacgtcgattatctgggctttgagatcccggacgagttcgttgtcggctacggtctggactacgcggaaaagtaccgcaatctgccgtacatcggtattctcaagccgcacgtttacggcggcgagggcgaataatctctcccatacggaaaggggcgttaaaccaatttgaaaggcaaaatgaagggcttcggcctttacctgctcatactggtctgcctgctcgccggcgtaagctacgtcgtcagtcagacgcagaaaaccgagtcgatctcctactcggatgtgtacagctactttgagcagggcgacgtagaccgctacactctcgagggcggcacgctgaccatgcatctgaagaacgaaaaccgcgcggtcagctacgagatcggcgactatacctcggtatggtggtcgcagctcggctcggtcatcgaccagcagatgaaggacggtacgctgaccaaggtagactacatcaccacgacgatcccgtggtgggcgcagttcctgccgtatctcatcctcgtggtgctgatcggcgcgttctggtatttcatgatgaacaagcagtccggcggcggcgcgggtccgatgcagttcggcaaggcgcgtgcaaagctggcgcaggacggcaagaacaaggtgacgttcaacgatgtcgcaggcgcggacgaggaaaaggccgagcttcaggaaatcgttgaattcctgaaaaatccgcagaagttcgtgcagatcggcgcgcgcatccccaagggcgtgctgctcgtcggccctccgggcaccggtaaaacgctgatcgcgaaggcggtcgcaggcgaggcaggcgttccgttcctgtccatctccggctcggacttcgttgagctgtatgtcggcgtcggcgcgtcccgcgtgcgcgacctgttcgagcaggcaaagaagaacgcgccggccatcgtgttcatcgacgagatcgacgcggtcggccgtcagcgcggcgcaggcctcggcggcggtcatgatgagcgcgagcagacgctcaaccagctgctcgtcgagatggacggcttcggcgcgaacgagggcgttatcgtcatcgccgcgaccaaccgcaaggatatcctggacaatgcgctgctgcgtccgggccgcttcgaccgtcaggtctatgtcggcgctccggatgtcaagggccgcgaggcgatcctcaaggtccatgcgcgcaacaagcagtttgacccggatgtcaagttctccgatatcgcgaaaacgaccgccggcttcaccggcgcagacctcgaaaacctgctcaacgaggcagctctgcttgcggcgcgccgcaacaagaagctgatttcgcaggaggagatcgaggagtcgctgctcaaggtcgtcatgggcgtggagaagaagagccacatcatcactgagcatgacaagcgcctgaccgcttaccatgaggccggtcacgcgatctgcttcgaggtgctgccgacgcaggacccggtacaccacgttaccatcatcccgcgctcgtcgggcgcaggcggcttcaccatgccgctgcccgaggaggatcaggcgtaccgcaccaagaagtatatggaggaatacatcgtcgtctgcctcggcggccgtgtggctgagaagctgacgatggaggatatttcgaccggcgcttacggcgacatcaagcaggccacccagatggcgcgcgcgatggtcacgagctacggcatgagcgacaagatcggccccatcgactacggttctgagggcggcgagatcttcctcggccgcgacttcgccgcaggcaagggctactccgaggtcaaggcggcggagatcgacgatgagatccaccgcatcatcgagaccgcttaccatcagtgcgagaagctgctgagcgagcacatggacgcgatgacgcgcgtcgcggagtacctcatccgcaacgagaccatggacggcgaaacattcaagaaggtctttaacggcgaggaggtccccgacaaggtggtcggtgcggacctcatgagcgagctccagaaggatctgaacgagaagatcggcgagccggcaaaggctgagtctgctgaacccgaacagtccgaaaacaagtaaaaaattatcccacagggaaagcagctttgctccctgtgggatttttttgcctgtttaatcgggggacgccgtgaaaacgcggccataggcgtccgtgatttcaaccgttacggtaaagtcgctcatgcgtccctcgaacgtgccaaggcgtacttcggtatcgtaaatgttggcgccgtactcgccgccctggctgcggtattcgagcggctgctccgcgatttctttgccattctgatagagaatgatgcgcccggtgaacgaattgtcctccagcgcgtcgtggaagtccacataggtggaaagcgttcccgtgaacgtgttcttaccaaagctgaacgtcgggccgccgctcgaccagtaagcctgaacgtcaatcgagaagcggttttcgatgtcggattcgcttgcgatgagcagattgcgtgtgccgccgttctggtcggtgagaacgagataaaccgagtattcgtccaccatcgggattgtcagactgccgcgatagccgcctccggcgtcgccttccgcctcgcattcccacgactgctcgccgcctcggagcaggaatttcgcggtttcgccgtcgcttgccacgcgcggcacggcggagaacgtcacgataagctgctcggtgttctccgggtcgagcgtcatgtgctcgctcgactccgcgaagtcgccggtatccgcgtcggtgcccgggtagtagaccgtattgacatttccggcctgcacgcgcagtgcctgcacttcgcctttcaactgcgcgatttgatacaggcataccgcgttcagcgcgagagatacgcacagaagcgccgcgccgccgatggcgagtattttcccgcgagagagagaaacgcctttgtgcggcgtctcaggagccgcaggagcgtcctcgttttctttccctgcaccgccctccgccgggggagcggggaagggcgcgtccggccgcagcagcgtatcgaccggcacgccgaacagccggctcagctccatcaggttgtccatcgtcgggacggcctggtcggcctcccatttgctcactgcctgccgggagaggccgagcttttcgccgagcgcttcctggctgagcttatggtcgcgccgcagagctgcgattttttcacctgttgtcatcgtgctcacctcctgtaagctcactctatccgaaaacccgttatttcgccaccaaccttgcgtttcctcgtgtcaaccgcaggttgcggcgagaaaaacggtagcaaaagagccccgaacacggcgcttcgaggctctttcaggcaataccgccgcagctttcattgtgcggtgttgccttgggattggggtacggagaaaatcagtcgccgaagaactggtcgtggatggccttgactgccttctcgctgtcctcctcgttgatgaggacggagatcttgatctcagaggtggagatcatgcggatgttgatgccggcgcctgccagagcctcgaacatcttggaagcgacgcctgcggcggacgccatgccggcgccgacgatggagacctttgcgaccttggtgttgatggagacatcctcgtagtcgagcatttcctttgcgtcgcgcaggatacctgcaacgcgctctgcatcgtcctgacggatggtgaaggagatggacttcttgttgtcgcggccgacggactggagaatgatgtcgatgttgacattgtgcttggccatgagcgagaataccttgaaggcggtgcccggggtatcgttcagattgatgatcgcgacgcgcgcgcagttattatcacgggctacacccgaaacgttcagtttttccatgttagaaccctccttgactttcgtacccggattgcgggtaaagctcgaaacgacctcgagatcgacattgtacttctttgccatttcaaccgagcggttgtgcagtacctgagcgccgagcgacgccagctcgagcatttcatcataggtgatggcgtcgagcttgtgcgcattcttgacgatgcgcgggtcggcggtgtagacgccgtcaacgtcggtgtagatctggcacaggtcagcgccgagcgttgcggcgatggcgacagcggtcgtgtccgagccgccgcggccgagggtggtcacgtcgcccatcttgttgatgccctggaagccggcaacgataacgatgcggccgttgtccagctctgccttgaggcggtcgccggagatgcgcttgatgcgcgcgtccgagtagttgctgttggtctccatgccgatctgccagccggtcagggaaacgaccgggaagccgagcttctggatggccatggcgagcagggacatcgagatcatctcgccggtgttgagcagcacatccatctcgcgtctggacggacgctcgttcagctcggcagccttttcgatgaggtcatcggtggtgtcgccctgagcggaaacgacgacaacgacctgattgccggccttagcggtgctggtgacgatgtcagcgacattcttcagtcgttcggtgttggcgaccgaggtgccgccgaacttttgcacaataagactcatagttgtttaatttcctccttatatcacgcgcctgccggagcaggagcgtctccatatgcaaactgtaaaaaagtgtgcattacagacgttttaccgtggtgccgacctcgtcgcagcgcagctgcactgccttccagtgcgggtatttcgcctcgcacagagcctgcgccttttcgatatagtcgcggtcgcccttgtagacgatggcgacgatggacgggcctgcgcccgagatgaacgcgccgagcgcgccgagctccttggcctcgcggacgatgtcctcgccgttttcgatgaggctgaagcggtagggctgatgcaggcagtcgccggtcgcgacgtccagattttccagcttgccggtggtcaggctgcccgcgagcagagccgcacgcgcgaggttgtagaccgcgtcgtggtggtcgatgcgcttcgggagcgccgcacgcgccttttcggtggaaagctggaagtccgggataaagaccacgaagtcgatcgcgccgtggaccggcacgcggacatggctgacatggccgttttcgagcagcgccacgcagaagccgccgaggatggccggagtcgagttatccggatggccctcgatggtcgccgcaagatcaatgaccgcgttgcggtcaagcggctcgccgagcagggcgttcgcgcccatgatgccggcgaccgtgcaggccgaggacgaacccagaccgcgcgtctgcgggatggcgcagtcctcgacgatggtcaggccggagagcggcttgccgcactcgtcgtacacgcgcttggcgcactggtagatgaggttggactcgtccttcgggacgaactgaccgtttttatccgaaatatcgatatgatcgttctcagcaaggtcgatcacgttgtacatttcgagcgcgatgccgatgctgtcgtagcccgagcccatattggcgctcgtagcaggaacggtaacacgaaccattttatgtatgcctccttagagaatgcgcattgccgcgcagaccttgccgacggcgttcagtttttcggctgccgcatccatttcggcagtcgggatcttgctggtctggacgacgaatacgccttcgaccggctcggacaggctctcgaccgggagaatgctctcgatgtcctcgcgcgcgcccttgaagcggacgtaccacgcggagcgcagcgtgtcgagcggacggagcagctttttcgagccatcgccccacatgatgcggcggcggttatccttgtgctcgatggagtcgagcatatcagcgacaacggcggaagcggtcgcgagcttgcctgcgcccttgccgtagaacatgacctcgccggtcgcgttgccgtcgaccatgatggcgttgaatacgtcctcgacggctgcaagcgggctctccttgtggatgaggtgaggagcgacgtaggcataggccgtgccgtcctcgcagcgcaccgagcggccgagcagcttgatgacgcagccgagcttgtcggcgtttgcgacgtcctcgagggtgatcttggtgatgccctcgcaggaaaccgtatccgggtcgaacttgtcgccgtaggcgagatcggacaggatgcagatcttgcggcaggcatcgtgaccctcaatgtcggcggtcgggtccttctcggcgtagccgttgacctgcgcctgacgcagcgcgtcctcgaaggtgacgccgttgtggatcatctgggtcaggatgtagttggtggtgccgttgaggatgccgcagatctggttgaactcgttggcagcgaggcactggagcatcgggcggatgatcgggatgccgccgccgacggacgcctcaaacatgtagttgacgccatgttcctcggcgatcttgagcagctcgtcacccttcgtcgcgacgagctccttgttggaggtgcagacgctcttgccggcctcgaggcagcgcttggtgaactgataggctgcgcccacgccgcccatgacctcggcaacgaccgttacctcagggtcgttctcgatgacggagaagtcggtaacgaatttatgtccgtagggcagagaggaaaaatcgcgcagatcgagcacatacttgacctcgaccggctcgccgaccgtgcgcgcaatcttctcggcgttcatctcgaatacctcgtacacgccggaaccgaccgttccgtgtcccatgattgctacttttaccattgtgataattcctttccgtgggagaatttattgcagtttatcattcggaagcaaggatctcgaccttgttcacgccctcgagctgctctgcacggtgcagcagctcctcgaccgaatatttcatttcgcccgttcgcgcggcgatcgtgaccgatgcctgaccgcgcatggggatggactggttgaccgtcatgaggttcgcacccgacttcgccatcagtccgaggatgctcgagagcatacccggctggtcgtgcagcatgaagtggaacgtcacgatgcggtcggtcgtcgcctcgaaaaagggtcggacgccgtccttgtatttatagtaagcgctgcgcgacaggcctgcgagctttgcggcctcgcttgctgttgcagccttacccgaggcgatcgcctcattggcctcgatcacgcgctgaaagacttcgggcagcagcgttcgttcgaccagatagtatttgggtttaaccatgcgttaatctgtccttcctgaaaagacatatgtctttttcacgctctcctatcataccatatagccgcgtctgacgcaagggagaaatctataaaattcccagaaattcgcgccttcatttgtcgatattgccaaagtcgacagaaaaaagtgcagcagtatactaaaattataaagaaaagacgaaagaaagtaaagaggggggagtgagaaaaccgattcagttcacggcttttgcggccgcgagcacgaaaacacaggcggcgcccatgctgcgcaggacatgcgcggcgtctgcggcggtcgagccggtcgtgatgatatcgtcgatgaccacgacgcgctcgcctgcgagcggaatgcgtccgggcaggagcgagccggcggcattcttccggcgggcggcagcgtcctgctgcacggactgacgggcggtaaacggacgcttgcgcagcgcggaaacgcagggcatcgagagtgattgcgcgatcggacgcgcgagcagctcggcctgattgtagccgcgctcccgtgcgcggagaaagccgagcggcaggtatgtgatgcaggtgggctgccaccggtcgagctgcgcggcgagaaccgccgccatctcggcggcgaaccatgcagcatactgcggtctgccgccgaatttgaagcggtgcagcgcttctttgactgtgccgcgatagcagagcgccgccgccgcgccgtcggcaccgggaacggaaaattcgccgtgataccggtattccgtgcgtacctcgcgcgcacagtccggacacagcgccgcgctgtgcttttcgacgggaaggacccggccgcacaggatgcacgtccggtcgaataaaacgggcatgaggttcacctccggatgaaaaaagagctgtccgcgagggacagctctcagtttgtcgataaaggtcgataaagtccgtgttcacgcaaagcacgagccgcgcggcagcgcgcattcaaatcggtttgaataccttcggatgactcgtgttctgcgttcgtcagaacacagattgccggcgaaacgtcagtttcgcgacggtctaaattttactttgcgagcagtttcttgaggcgctccgcagcctcgagcgtgcgcttctggtcgccgaaggcagtcagacggaagaaaccgtcgccgttcttgccgaagcctgcacccggggtgccgacaacgttcgcgttctcgagcaggtagtcgaagaacgtccaggaatccatgccgttcgggcacttgagccacaggtacgggctgctcttgccgccggtgtaccagatgccgagctcgtcgagcgtctcggagagcaccttggcattctgcttgtagtagccgagggtatccttgatctgcttcatgccttcctcggtgaagcaggcggcggcgcccttctgtacgatatacggaacgccgttgaacttggtggtctggcggcgcagccacatcttgttcagcttgccgtccgcgagcgcggtcggaacgacggtccagccgcagcgcgtgccggtgaagcccgccatcttggagaaggagcagaactcgatcgcgcaggtctttgcgccctcgatctcgtaaatggagcgcggcaggttctcgtcctcgatgaagcactcatacgctgcgtcgtagaggatgacagcgttctgtgcgttcgcgtaatccacccatgccttgagacctgcgcggtcgtaagcggcgccggtcgggttgttcggggagcagatatagatgatgtcgcactttacggatgcgtccggcaggggcaggaagccgtttgcctcgttcgcgtccgcgaaaacgatcttgcggcctgccatgacgttggtatcgacgtagaccgggtagaccgggtccggaaccaggacaacattgtccttgccgaagatgtcgaggatgttgccgaggtcgctcttcgcgccgtcagagatgaagatctcattggttgcaagctctacgccgtgggtcttgtagtagccgacgagcgcctcgtgcaggaagtcatagccctgctcgtcgccgtagccgtggaaggtctcctgcttcgcctgatcctcaaccgccgcgtgcagcgcgtcgatgacagccggaacgagcggacgggtaacgtcgccgatgccgaggcggatgatgtcagcctccgggtgggatgcggagtactcgcggaccttgcgcgcgatggtggagaacagatagctctgctcgagattgtcataattggtgttgatctgcattatttcttgctccttttcagagatgccgcgacgaatgccttgaacaggggatgtgcgcggttcggacgggatttgaactcaggatggaactgaacgccgatatagaacggatgctccggaatctcgacggtctcgacgagctcgccggtcggggaagtgcccgtgatgagcatgcccctgctctcgatctcctcgcggaaggcgttgttgaactcatagcggtggcggtggcgttcggagataagctccgcgccgtaagcggacgccatgatgctgcccggacggaccttgcagggataagcgcccagacgcatggtgccgcccttcttggagatgccgtgctggctctccatcaggtcgatgaccggatgcgaggtgttcgggtcgaactcgccggagtttgcgtcggcgtagccgagcacgttgcgggcgtagctcatgaccgcgatctgcatgccgaggcagatgccgaagtaggggatgccgcgcacgcgcgcgaagtttgccgcgcagatcatgccctcaacgccgcgcgagccgaagccgcccggcaggatgatgccgtcgacctcgccgagcagcttgtcggcggtggagtcgttgatctcctcggagtccacccagtcgatgtcgacaaagcagccgttctcgtagccggcgtgctgaagcgcctcggcgaccgagagataagcgtcgtgcagcttgacgtacttgccgacgagggcgatcttgacatgctccttgcgcgatgcgatgcgctcgagcatttcctgccactcgctcatgtcgcccttgcctgcgccgatggacagctcgcggcagacgatgtcggagaaatggctgtcctcgagcatcatcggcgcctgatacagcacgggaagcgtgcggttctcgataacgcagtcggggggaaccgtgcagaacatcgagatcttgtggcggatgtcctcgtcgagcggctgatcgacgcgggctacgatgatgtcaggggagatgcccagaccgcgcagctccttgaccgagtgctgggtcggcttggacttcggctcgttcgagccggagatgaacggaacgagcgttacgtggatgaacaggcagttgcggcggccgacttcggccgctacctgacggatagcctcgagaaacggctgcgactcgatgtcgccggtggtgccgccgatctcggtgatgacgacgtcagccgaggtctttttgccgaccgagtagatgaacgacttgatctcgttggtgatgtgggggatgacctgaacggtctcgccgaggtattcgccggcgcgttccttgttcagaacgttccagtagaccttaccggtggtgaggttggagaacttgttgaggtcctcgtcgatgaagcgctcgtagtggccgaggtcgaggtcggtctccgcgccgtcgtcggtgacatagacctcgccgtgctggaacgggctcatcgtgccggggtcgacgttgatatacgggtcgagcttctgcgctgcgaccttgaggccgcggctcttgagcagtcggccgagagaggccgcggtaatgcccttgcccagaccggagacaacgccgccggtcacgaaaatgtattttgtcatagctcgatttcccctttgaaaacggtcgcggccgcgcccgtcatgaacacggtctcagtggtgtagcgaatggtgaggtcgccgccgcgcaggtggacggtgatgtccgtgtccggcttgcagaagccgttcaggcaggccgcaacgccggtcgcgcacgcgcccgtgccgcaggcccaggtctcgcccgagccgcgctcccaaacgcgcatcttgaggctgccgtccggcaggacgttcacgaactcggtgttgatgcgttcggggaacagcggatgatgctcgaacttggggccgaggcgcgaaagatcgaggtcgtccacatcgtcctcgttaaagaagatgacgcagtgggggttgcccatcgagacgcaggtcacgtgatagaccttttcgtctacgacgagcggggcgtcgatgacggaactgccggccatgttgaccgggatctttgcaggctcgaggatcgccgcgcccatatcgacgcgcgccgtctgcattttgccgtccctgacgtgcagctcgagcgtttttacgccggaaagcgtgtcgatggtaatggtggtgcgcccgccgaccatgccgttgtcatacagatacttgccgacgcagcggatgccgttgccgcacatcttaccctccgagccgtcggcgttgaagatgcgcatctgcgcatctgcccggtcggacggggaaatgaggataatgccgtcgccgccgatgccgaaatgcggttcggaaagcgcgatggacagcttttcggggtccgtgaccttctggtcgaagcagttgatatagatgtaattgttgccgcagccgtgcattttagtgaacgacagcttcatacggtctccctccagttaacagcagtgtgttccgtgcgcgcggagctccgcgcgcacgcgccggacaaaggcacgcagcgtttgcccagacgacattcagtataacataattttacgaaaaattctctatgcttttgaaaaaaagcacgaaatttttccctgtccgacagggcgattttttgcggtatctcacaaaatcggggatttaatcgcgcttcatggcggaaaattaacacacgtttagcggagattgtggtatactgtaagataccggtgaaatatgccgcatctgcgcgtacattcacggtgttcaaaacgtacaatgcaaaggagagagtgacttgccgctgtcaacgaaaaaaatccgcatcttttccttctcgtggcgcgatcttgcgatattctgcgctctgttcggcagtgcggtgctgctgtgcatcctgctgcacatggccaacagctcggagggcttcgcctactcgatcttcgtcctgaccgtgctgctcatctcgcgctttacgaccggctatctgttcggcacgctcgcagccgtgctgagcgtcgtaggcacgaactacatattcacctacccgtactgggcggtgaacttcacgctgtcgggctatccgctgacctttctgaccatgctcgtggtctcgctcgtgacctgtacgatgacgaccaagatcaagcggcaggaggatctgcgcatcgaggcggcgcgcgaaaaaatgcgcgcgaatctgctgcgttcggtctcgcatgacatccgcacgccgctgacctcgatcatcggctcgacgagcgccatgatcgaaaatccggatctgcccgagcaggaccgtctgctgctgctgaccgacgtacgggatgacgcgcagtggctcatccgcgtcgtggaaaacctgctgagcattacgcgcatgggcgacacgaccacgcgcctggtcaaaaatcccgagccggcggaggagatcctcggcgcggtgacggcgaagttccgcaagcgctatcccgatgtccgcctccgcgtttccgtgccggaggatctgctgttcgtgccgatggacgcggtgctcatctcgcaggtgctgtccaatttgctcgagaacgccgtggtgcatggcggcggccatacgaccgagatacgcctgtccgtgcggcgcgaggggccggaggccgtgttcgccgtcgaggacaacggcgacggcatcgagcagaaggtgctgccgcatctgttcgacggcacgctcgccgcagcggcaggagacacggagaacggcggcaagagaaacatgggactcggcctttcggtctgccaggcgatcatccacgcccacagcggcagcatcgaggcgcataatctgatggaaggcgcggaatttgtgttccgtctgccgctcgaacaagaggaggaaaaagcatgaccatccgcgaaaagatcctgatcgtcgaggacgagaagagcatcgcgcacttcatctcgaccatactcaccacaaacggctacgagaccattctcgcaaagacgggaaccgaggcgatgaccatgctgtcctcgcactgtcccgacctcgttatcctcgacctcggtctgcccgacatggacggcatcgaggtgctgcgcagcctgcgcggctggtcgagcctgccggtcgtcgtggtgtccgcgcgcacgcatgaaaacgacaaggtcgaggcgctcgacctcggcgcggacgattatctgaccaagccgttcggcacagcggagctgctcgcgcgcgtgcgcaccgccatccgtcatacgcgcacaacgtcgccgaccggcgagatcgcgcagcacggtacatacagcgtgggcgaaatggtcatcgattataacaagcatcaggtgctcgtgcgcggggagaatgttcgtctgacgctcagcgagttccgcattgttgccctgctgggcaagttcgccggcaaggtgctgacctatgattatatcatcaaggagctgtggggcccgcgagcgggcggagacaaccagattctgcgcgtgaacatggcgaatatccgccgcaagatcgagaagaacccggcggagccggaatatctgttcaccgaggtcggtgtgggctaccgcatggcggaaaatccctccggagaatgaaaaaaatgctcccttccgggagcagaggccatttttgttttaccctcaaccgaggggaagcggttccgccgttccggcggcttgccgccgcaggcgagagatggctgccgatgggcagaccgggcattgccgccttcggcggccgggagagccgccgtctggcggcggagacaaaagggggcaagggcaccgtatggttcccttgccccctcttgactcccccaaaccctcctttggccgagctcgcctgcggcgactcgtctaaatgcgaggggcctccagatgcgtttggtgcactaaggtctcacgcttgatcgaagcagagcttttcgcagagcaaatccagcgccctgcacagaatggccgcgcactgttatgcgcggcaaatcacgaaagtaatcgtccatggcacgagaaaaaggagagcacaggttcaaatctgtgctctcctttcgtttttagacgcgcgaccggagggagtcgcgcccaaaggaaggtcaggggagtcaagaggggacaggaaaccatatgtctggtgtcctgtcccctcttgcccctgtcggtgggcaccgacacccccgggccgccgaaggcggccaatgtccacgctcacttcgagcgtaaagccactgtatcggcggaaacccaaccgtccgctgacggcaagaagcgttctacggtgaaggcacagccttacagaagcgccagcaccttggcgatctcgccgcgcgtgatcctgccgagcggcaggagcgttccatccgtgtagccgccgatgataccggcggaaacgcaggtcttaacatgctccgccgcccaggacggaattgcggaagcatccttgtagttgaggcttgcggccgcatagccgcgcggcagcaggcggccgatcaccgtcatgacctctgcgcgggtaatatctgcgtcaggattgaaatacatcacgccgccgcgcgactcgccggtcatgaagccggcctttgcgaccgcgtttaccgcaccggccgcccaggacgggatgctgtcgctgtccgcaaaggcggaaacgtcggcagacgaggtgtccagtcccagagtgcgtgccatcgtgaccgcgaattccttgcgcgtcagattgcggtcggggtaaaagtacatgctgccgcccttgccttcgcccttcatgatgccgcgcgtgttcagcagcgaggcgtagccgcgcgcccagtgggaggcagtgtccgcgaaggcgttcgccgcgcttccggccgtgacggtcgcgcagacgcgcgtgcggttgccggcatcgtctgatacgtcgatggtcacggtatgtgtaccggcggcgagtgcgccggtcgtaacggtcaggccggagccgttcatggctgcggcgccgctctgcgtttttccgtcgaccttggccgtgatattcgtcgcgcgaacgggatatttagtgttttccatggtcgcggtgcccgaaatcgtggccttcgcgcctgcatccacggtcacggccgtgctgttcagatgcacggagggacagtcgctgttcgtggccgcatgatgcgcggtgagcacgatctggtcgagcaggagcgcggaatgagacagaccggagctgcttttctcgaaatgcagaccggtgaactggactgcgccctcgggaaccggggcggtcagctgcttccagctgttcaccgtcgcggcggacaggggagcggtcagctcattgccttcggcgtcggtaaagaccgccgtcagcgtgccgtgggtgttctccgaacgcgcccacagggtcagatatttcatgtccgcgacatccgccggggaagcggacagagtgaagccgtccgtgctttcaccgtcccacagcgccttgagcgagccggttccgcgtgcgaccgaggtatagtcggtgacgcgcgagagcgaaacgccttccgaggcggtgaagccgccgagaccgtcctcgaacgtcgagacgaacgaggcatcctgcggatcacccatgccgacgttcaccggaatggacgcgcgcgtgtttccataggagcaggtgagcgtgccgttcgccatcgagctgcccgcggtgaacacgcccttttcatcgaccgagccgatgccgttcgttaccgtccaggtaaaggcggtgtcggtcgaggccattttctgaccgaggtggtagccgagcgcatcgagatcgatcgactggcccggcttgacgctgacagaggagactgacttgccgccggactggagcgcgatggagtgcacgtcacccgtgacgcagacgttcatcgagccggaaaccgagccgttcgaggcggtgacggtcgcgctgccgctcttctgaccggcagtgaaggtctgtccctctaccgtgcccatgtcgttcgagacctcaaggacgagatcggacggggcttctgccgggccgtaggaagcgtccgcgcccttgatcgagaaccaggtggacgcgccggggagaatgtagcggtagctcggggtgagtacggcatgggcagtcacgccgtccgagggggtgttcgcggtaaagaagatgtagttggcgcaggcgcgctgcgagccgtccgagggactcgagatgagcgaggtctcgctcgcgccgggctggcgcagcgccatggcggaggagccgccgccgtcgagacagagtgcgcgcacacagccaagctccttgagttcctcgccgagttccgccgcagtcaggccggtgctgaccgaggactggttgccatcgatctcgtacaggacgaccgtgccgtcgctcttgacgccgatggcgctgcgcgcgcggcgcgaagacgcggcatcgatgccggaggtcgtgaccgtgccgtcgtcgatgagcagcttgccgccaacggcatattcgacctcgccccatgccgggtctgcggcggtgatggagagcgtgacctcctcgccgaccgggaaatcgacccacgaggggacgttcgcgccgtcggatttggtgagtaccatctggttctcaccgatggcgaaggaggacgagccggttcccttgctcacgaccttgagccgaaccgagccgccggccttgacctgggtggagtcctcgcgctcgagcacgatatagctgcccttggcggcgaaatgggtcgcttcgtcgtagttgcggtcgagcaggtacgcaccggcggtcgtgcgcgttttgttgaagtaagagaccgagcaggagccgcttgcgcccgtgatgcggatgcccattgtcgggcggccgatgacggcggtgccgtccttcttgaagccgacggcgtactgccatgcatcggaggagacgagcgttcccttgtcgatgaccagaccgatggggacgccgctcgacatgacgaaaaagtcggcgttcgtgccgccgataacggtcttgccctggttttgcaggtatttgacggcgtttgtgatggtggccttgctgccgtagaccgtgtcgccggcgtagaccatgacgggggagacgccggtgttcggctcgtatgtcagcacgtttgcgcgctgcacaccggcggtgtttttaccctcggtgcgtgtgtaggtcagtccttcgccgaccggataggaccagctgaagccgttggtgaatgcagcagacgccgcagcggtgaccagctgcgtcatggcgagcgttgcagcggcaagccgtaaggtggttttacgtttcattctcatatcatacctcgagtttctgcgtggaaaaaataaaagcggcataccggagaccggtacgccacctattgtaaacgctcatgaagtatttgtccagaagaaggacaaatatttcataattttaacggcaggcagaagcctgtttttttcaccctcagcagagggtgaatggtttcgccgatacagcggcgcagccgctggaggcgactttacgctcgaggtgagcgtgcacattggccgccttcggcagccggggatgccgtgcccacggcggagggcaaaaggggcagggacaccaaggtttccctgcccctcttgactccccaacctttcctttggacgcgactcccttcggtcgcgcgtctaaatgcgaggggcccacaggggtgtttggtgctccaagagtacaccccttgatcgaagcggagcttttcgcagcgccaaacaagcgccctacaccgtctggccgcgcactgttatgcgcggcggtttacgcaagctgacttcagggtctgaaagcgtcccaaaagcgaaccgacgcacggaaccgagcccccgtttcccccgtttagccgcgaatgcttcgctgagcggccagcggaaggtcaaaggggtgtcaagaggggacataggaaaccgcaggtgtcctacgtccccttttgcccccgccgtggacacggcgtctccgccgccagacggcggcaatgcacacgccatgtcatggcgaatacccccggcccgggagggcctatctcgcctgcggcggcaagccgccggaacggcggaaccgcttcccctctgctgagggtaaggaaagaagaggccttgccccgaaggggcaattaaatgctcttgacgaccttgtcgagcacttcactcagcttcggactgcgcaccgatgtgtcggacacgcgatgatagatcgccttgcgtgcgttatacaggcggcgcgtttccgcctgcttgtccggtctgttgagcagcggacggttgttcgaataggaaaggttcttgagaatgcggtagaacggcgtatccagatggatgagcagtccggtctccttgaccgcggcgacattctcagggcgcagcaccgcgccgccgccgagcgagagcacgatgccgtcgcgctgcgacagctcacggatataggcagtctcacggtcgcggaagtacgcttcgcccttctgcgcgaagatgtccgagatcttcatgccctctttttcctccagatacaggtcggcgtccacaaagtccagtccggtcacgcgcgcgagcttgcggccgatggtggtcttgccgctgcccatgaagccgcagagcacgaggtttttcttcccgtacttttcgtgcagacgcttgaccgccattttgccgtaggtgcggcgcagaatggtctcgcaggaggcaggctcgaacgttacgcccgaccagatggtctgtgcgtgcgccgcctgcatgaccagcatgtaaagaccgtcgcgcgtcgcggtcttgcgcggattggccagacgcatggtcgccgtcaccggcggattgtagatcgcgtcgaacacatactcggtcctgtgcggcagatagtgcagcggcgcgagattttccttcggatacatgccgaccggcgtggaattcagtacgatctggatgtcgcgcgggatgtggcggcggctgtatacggagacgcgcgcgtgcggcacagtctcggcgatctgctgctggagcgcggcggccttttccagattgcggccggtgatggtgaggtgcgcgccctcgcgcgcacagtggtacgccatgacggatgccgcgccgccgtagccgagcagcaagacttttttgccgcgcagcgttacaccgtcgcgtacgagcgactcggaaaagccgaggatgtcggtattgtagccgatggcctttccgtcgcggaaagcgaccgtgttgaccgagtgcaggtcgcgcgcggcggtatccaccccgtcgagcagctcgatgaccgcctttttgtgcggaatggtgcagttgatgccggcgagcttttcttttgcgaggtcgaacgcttcggcaagatcatcgggcggaaccgcgacgccgatgtacgccgcgtcctgacccgaggccccgaacagctgcgcgtgcagctcgggactcatcgtatggccgagtggccagccgaacagcgcgtaggttggctttttcggccggaatgcccggaattcctccatggaaagcagcattttcatcagcctcccagtttctcaatcgtaccgaagaagtcggggtaggagatggcgacgacctcaggctcgtcgatgcggctcgcgccctcggcggcaagacccagaaccgcaaggctcatcgcgatgcggtggtccttgtaggtctcgaaggctgcgccgtgcggctttgcgccgccgcggacgatcatgccgtcgtcggtctcctcgacgtcaacgcctgccttggtgagctctgcgaccatggaggcgatacggttggattccttgaccttgagctcctgcgcgtcgcggatgacggtctcgccctcggcgaaggccgccgcgactgcgatgaccggcagctcgtcgatcagacgcggaatgatcgcgccgccgatctcggtgccgtgcagacggctgtgccggacggtcaggtcgcagaccggctccgcgtcgtcgcggaagttcgactcggtgatgtccgcgcccatgctgcgcagcacatccagaatgcccgtgcgcgtcggattgacgccgacgttccggatggtcagctcgctgcccggcacgatggcgccggcgacgaggaagaacgccgcagaggagatatccgccggaacggcgatgtcgactgcgtgcagatcctcgggcggctcgagggtgataacgttgccgttcgtctcgatctcgacgcccagcgcgcggaacatgcgctcggtatggtcgcgggagggcgccggctcgatgacggtcgtctgaccctcggcatacagaccggcgagcaggatggcgctcttgagctgggcagacgcgacggggagacggtactcgatgccgtgcagctcgctcgggtgcatggtcagcggacagaagttgtcgtccctgccctcgatggacgcgcccatctcgcgcagcggcttcatcacgcggcccatcgggcgcttctgaatggaggcgtcgccgttcatggtcgaggtgaagctctgaccggcgaggatgccgctcagcagacgggtagtcgtgccagaattgccggtgtacagctcgctcttcggcgcggtcaggccgtgcaggccgacgccctctacgacgacctccttgtcggaaacgtcgatggaaacgcccattttgcggaagcagtcgatggtggacaggcagtcctcgcccatcagaaagccggtgatatgggtggtgccgctggccagagcgccgagcatgacggcgcggtgggagatggatttatcgcccggcacggtgatctcaccgcgcagcggaccggagggttggatttgcatggaagtgtactccttcttgtcggatagaggtgaaaaacagtggatttacagcttaatcgaccttgtagctgccgatgaccttgatatagggcagctcctcatgcagctgatagagcaggctgcgcacggcgtggtcgctgatgttgccggtgaagtcgacgtagaacacgtagcaccacgggctgtccttgagcggacgggagtggatctcggtcatgtcgatgccgtaatgcgcgatgatgtccagcacggttatcagcgtgcccgcggcgttcggaatatggaacgcgatctcgatgcggttgtcctcgggcaggcaggtgggcgtgcggctgaccgcgatgaagcgcgtctcgttgtgcttcatgtcgttgatgccctcggcgaggatggacaggccgtaccgctcggcggcctcgcgcgagcagatggccgcaaggctcacgtcgcccttgtcgcgcacgttctgcgcggcgatagccgtgttcgcagcctcgatggcggtgaagccgtgcgcggaaatgaaggcggagcactgcggcagggcatggggatgcgagcagacgctccggatgtccgccatggtcgcgcccggaacggccgcgagacagtgcgagatctttttgatgtacgagcggttgatggacaggtcgtagtcgagcagcaggtcatagaccgcgctgaccgtgccggcggtcgtattttcgaccggaacgacgccgacatccgccttgccgtcgcgcaccgactggaagacctcctcccaggtcgggacgttgaccggctcgcactcaggaaagagcgcgcgggcggcaagctcctgatatgcgcccgggacgccctgatagaacacagttttcggcttcagcatctcgctcgacgggtggaacgggaacttttccgggttcagacgcaggatctcgctgtactgatactcgcggctcgcgcggatcatgctctggagcagggcgatgtacttgaggcggacttcctcctccatgccggcggagcgctgttcgatgatctcggcctcacggtcgggcttgtagatcttgtcatccgactgcgccttggtctctgcgacctcgtgggcgagcgacatgcgcagcaggaacagctcgcggatagcggagtcgaccgagttgatatccttgcggatggatgcaagctcacgcatagccgttcgcctccctcagaagatccgccagagcgaccgcacacgcggcctcgatgaccggcgcggcgcgggtgacgatgcaggggtcgtggcggccgtggatggacagcggctcgacctttccggtgcggaggttgagcgtgtcctgcgccatgccgatggacggggtgggcttgatgcaggcgcggacgatgagcggcatgccgctcgtgatgccgccgagcacgccgccgttgttgttggtctcggtcttgatcacgccgttttcctcatagaacgggtcgttggcatgcgagccgcgcagcgctgcgaaggcgaagcctgcgccgaactccacgcccttgaccgccggaacgccgaacaggatggaggccagacggctctccacgctgtcgagcattgggctgccgatgccggccggcaggccgacggccgcgcactcgatgacgccgccgaccgaatcctgctcctcgcgcgcgtcctcgatggccgcgagcatggcgtcgagcgcacgggggttgatgaccgggtattcctgctcgcgcagcgcgtcgagctgtgcgccagtcacctcaacgtcgtcgaacggcatatcctgaatctgcgcgatggactggatgtgcgagccgacggtcacgccctgcccgcgcagccacagcttgcacagtgcgccggcgaacacgagcggggcagtcagacggccggagaaatggccgccgccgcgcgggtcgttgcaggacctgtagcgcagcatgcccgtatagtccgcatgacccggacggggctgcgcggccagctcagcgtagtcgcccgagcgctggttggtgttgcggatgacggcgcagatgggcgtgccggtggtctttccgttatagatgccggactggatctccggcttgtcggcttccttccgcgcggtggactgcctgttgcggcccggtgcgcggcgctccatctcgcgcagcacgaaagcctcgtcatacgccacgccggacggaaaaccgtcgatgaccacgccgatgccggcgccgtgcgactcgccgaaaatggatattttgattgcgtttccccaggtggaacccatgtttcgccctccttacagtttcagaacgtactcgtgcagcttttctgcgccgatcggggtgatctctgcgcggcccggctcacggacgaggatgaagttgaccgtcgcgccgaactttttcttgtcggacagcagcgagcggtaaatgtcctcgcggccgtatttcagctcggtcggcagaccgatatgctcgaggatgccgatgaggcgctcggacagatcctcgttgccgagcatggcggacaggcgcatcgccgcgaccatgccgaccgcgacggcctgaccgtgcgtgaggtcgacataatttccgagcttttctgcggcgtgaccgatggtgtggccgaaattcaggatcatgcgcagaccggtgtcgtgttcgtcgatggtgacgacgtcgcgcttgatcctgacgcattcgcagatgatgcgctcgatgttctttttgtagtcgggcgcggacaccatatcgaggatctccctgttggagatgtagccgtacttgatgacctcggccatgccgtcggcaaaggtctgatcaggcagggtggcgagaaccgctgggtcgatgagcacgagacggggctgatagaatgcgccgacgaggtttttgccctcgggcatatccacgccggtcttgccgccgaccgaggagtcgacctgcgcgagcagggtggtcgggatctggcacagcgagacgccacgcaggaaggtcgccgccgcgaagccggtgatgtcgccgacgacgccgccgccgagcgcgatgatgagatccttgcgcgtcatgccgctcgcgagcaggtcatgatagatgccctcgacggtcgagagacgcttgtgctcctcgccggccgggatgacggtgtgcgtcacgggcagcgtgaactgctgctcgagctgttcgaggtagagcggcgcgacggtcgagtccgagacgatgtggatgcggctcggagaaaaggtctcgccgataacggacgccgcgcgggcgagcagtccgctttcgatatggatttcggacacgccgttcgtgcccttcagagtcagcagttcagacatggtgacagctccttagaaagatttttaagagggggccgggatacccatggtttcctggcccctttcttgccggttagatttcgcggtctaccgcagcagcgactgcgcggagcgcgttcattgtgtgatggaacgaatcgtaggtgagcgactgcgcgccgtcggagagcgcgtgcgccgggtcgttatgcacctcgatcatcagaccgtccgcgcctgctgcgacagcagccttggccagaggctcgaccatccagtagatgccgcctgcgtgagacgggtcgacgatgaccggcagatggctcatgcgcttgagcaccggaacggcggaaatatcgagggtgttgcgggtgtacttctcgtaggtgcgaatgccgcgctcacagaggatgacgttctcgttgccgccggccatgatgtactcggcgctcatcaggaactcctccatggtgttggcgaagccgcgcttgagcaggatgggcttgcgcgtctggccgagctccttgagcagctcgaagttctgcatattgcgagcgccgacctggaagcagtcgcacttgttcatgaagatgtcgatgtgcgccggattggtgatctcggtaacgaccggcagaccggttgcctcgtgcgccttgtgcagcagctccagaccctcagccttcagaccctggaaggagtacggggaagagcgcggcttccatgcgccgccgcggagaacggccgcgccgtcggcctgcacgtgcttggcgacgtcgatgatctgctcctcgctctcgaccgagcacgggcctgccatgacgacgagctttttgccgccgacggcaacgcccggggcgatctcgacgacagagttgtccggatggaacttgcggtttgcgagcttgaacggctcctgaaccttgatgatgttctcgacctgcgggtcgagcatgagcgcatccttgtcgaccgcgccggtatcaccgaccagaccgataacgatggtgccctcgccgtagatcgggttcgcctttacgttccagcgttcgatgtggcgggaaagctcgtcaacgtgctcgtgggtcgtaccctgcttcatgataatgatcattttgtctgtctcctttttgtgtcagtagatggtgagaatgctgtttgtccagcggaaaaaggtataaaaaaagcccttcatccacaaagagggacgaaagacaaacagttccgcggtaccacccacattcggcgcacgttctgcgccgcacttttcagatacagaatatatcctatccctgtaacggaggaaacccgtctgcgcctactcggaattctttcagcgcggcagctcaagagggaacttcatcgtgccggcgtctgcatccgtttccagtcatgacggacgctccctgaaagccgcacttggaacgattactttcctctgtcatcgctttgtgcaatatttgagtacattataatacgaatgtcagaggttgtcaatgccttaccaatgtttttttgtaaaaacctcagcggaggtcttttcctttataccgtcggcagacggtacaccttccgccgatacagcggtgcgccgctggaggcgactgtacgctcaaggtgagcgtacacagtggccgccttcggcggcggagacgccgtgcccacggcgggggaattgccgccttcggcggcagggagagccgccgtctggcggcggagacaaaaggggacaggacaccgtatggtttcctgtcccctcttgactccccttatcttcctttgcgctgacacatcggagatgtgcagcgaaacgggggttacgggggctcggttccgtgcgtcgggca

SEQ ID NO: 12915 - DNA, 333 bp, Unknown
  gut microbiota DNA sequence
cgcgctgacacatcggagatgtgcagcgaaacgggggttacgggggctcggttccgtgcgtcgggcagattttgggacgctgttatgccctgaatttcccttgcgtagttcgccgcgcataacagtgcgcggccagacggtgcagggcgcttgatttgcgctgcgaaaagctccgcttcgatcaagggttgtgccttggagcaccaaacgcccctgtgggcccctcgcttttagacgcgcgaccgaagggagtcgcgtccgaaggaagatgagggggagttaagagggggataagaaaccattcggtgtcttatccccctcttgcccccgccg

SEQ ID NO: 12916 - DNA, 1415 bp, Unknown
  gut microbiota DNA sequence
caataaatggcagatgaacgtttgcgttgaaccgctgtctatagtttcaaactatgaacaatgacgagtttctcgtattttacaaatgggtcatcagcctctatactaatatcataaaataaacgagccactgctcattgcatagatcagaaaggacaacccccatgaaaaatcccgctccttatcgttatgatattgtcggcagcttcctgcgcacgaaggccatccacgaagcacgcagcaagtttgaagccggcgaaatttccgctgaagaactgaccaaggtcgaagatgctgagatcaccggtctggtaaagaaggaagagaatgtcggtctgcacgccgttaccgacggcgagtatcgacgttccttctggcacatggacttcctctggggtctgaccggtacacagaaggtcaagtccgagcacttctccgtcgcattcaagggcttccagccgaaggctgagaccgtaaagatcgtggacaggctggacttcccggacgatcatccgttcctcaggcactttgcgttcctgcagagcgtcgcctccgacctcgtacagcccaagcagtgcattccgtctccgtccatgctgcatctgatctgctgtgttcgttcgaccgactaccagccgatcgagcgctacaaggacgagcaggttctgctggacgatctggctgcggcttaccagaaggcggtaaaggcgttctacgctgccggctgccgttatttacagcttgatgatacctcctggggcgaattctgttcggctgagaagcgaaaagcatatgcagagcgcggcatcgacgtagatgaggtcggccgcaagtatgtttacgtgctcaacaagatcctcgaagcaaagccggaggacatggttatcaccatgcacatctgccgcggcaacttccgctcgacctggtcgtccaccggcggctatgagccggtagcggagatcctgttcggccactgcaacgtggacggcttcttcctcgagtacgacagcgaccgtgcaggcggtttcgagccgctgcgctacatcggcaagcagaaggtcgttctggggctggtaacctccaaggatgctaagctggagaacaaggaggacgttatcgcgcgtatccgcgaggcttccaggtatgtgccgctcgagcagctggcgctcagtccgcagtgcggcttcgcttccaccgaggaaggcaaccttgtcaccgatgcggatcagtggagcaagctggcgctcgtcagggagattgcagaagaagtctgggctgattaaacagtagaacagtataagaatcagggaacacggaaaccggcagatcttaccgccggtgtttggataagaaaagcatttgcgcagatgcaatcccccttgatgccgtcatgggatcaagggggattgtctgtt

SEQ ID NO: 12917 - DNA, 1254 bp, Unknown
  gut microbiota DNA sequence
acaggaatgaccgtggatgggttctgataacatcagatttcatgcaaaacacagcgctcagcgcgcctaaaaatgtatgggtctaaattcacatcttcgggcgccatcgcagcccccatattattggcgtccttgacgccgagctcgatcatctttccgaacagcacgtgggtcatgcggacggaggagccgccttcagcgccgagcacggccgcgccggccgctgtcgcggtccattgcgcagtaggggtgcgctgacctccgtaggcgaggggaaagcggtactgccgctctgccgagcagaaatgcgaggaggcagagacggcaagacgtgcggccgcgcccgactcgacgagcacgccgccgagcgcaagtccctgcgccatggtcgagcacgcgccgtactgaccgaggtaggggacatccgagtgcatggaggcgagaaatgagccgatgcactggttgagcaggtctccggcgaggatcaggtcgaggtcgcagtgccgcagactgcccttgcgcagcgcgaggtcgatggcggtgcgctgaagctcactttccgcaagctcccacgacttctgtcccatgcggtcgttccgcgtgacgaagtcaaaacggctgccgagcgggccttccccctcctttttgccgactgcggcggcgtgcgatagcagatacgggcggttttcgagcgtgagcgtgcgttttccggcgtgtgcgatcatccggcgccgcctcccttcagcacgagcagcacaaggccgtagaggacgctcgcggtgatgccgtagacgagaaccggcccggcgatgacgaacagctttgcgccgagaccgaggataagaccctcgcttttgtactcgatggcaggcgagacgatggcgttcgcgaagccggtgatggggacgatcgtgccggcgccggcgtgctttgcgagcttgtcgtacaggtgcagacaggtcagcagcgcgccgaggaacaccatggtgatggcggtcgcggcggcggtgccgtcggtatccagaccgcgcgacagccagaacatgcgcacgccctcgccgaccgtgcagatcgcgccgccgaacacaaacgccagcaggcagtcgcgcgcgagcggagacggcggacttttccgcgccagcagcgccgcatattttcgtttatccggttgcataactttccctcccagaggtttttgaatgtattttttgcagaaaaggctgatttatgcaatgtaaattgtctcgtgaaaac

SEQ ID NO: 12918 - DNA, 1116 bp, Unknown
  gut microbiota DNA sequence
cgcccctcgccgcacaaaatctgaatacggcgggtggagataccccagcgttcggcggtttgcgtgatagataaatacttcatgggcagtactcctgttgcagttctgttctgcgtctgcttataaaatcacagtataattataatcgccaaagcgaataaaagcaagggcttttcggaaaagttcaggaagtattttcaattcagacatgaaaggggtgtggggcttccccaacaatagaatgagcagatcaggcgcaaagctgaactgcccatttttccggtgtgtacggacaccggatgtgcttgctattctttcaaatctcatatccgcagatacaaagcgctcccgctttcgcaaaagcaggggcgcatattttttgagaatttctcatttcgatacctacgttttgaattaaaaatgtccgttgtaaagtgaggggcaacgaatcgccaatgccctcgtcttcaaaattttcttttcgtcactaccaagtttttgagaaaaaatgtccgttgtattgtgaaaggagtgtttcaatatgccagaccgcacacgacccatccgcaaagaaatctgcctgaatgagcaggaattgagcgtagttcgccacaagatgaatcaacttggtacccgcaatttcggcgcatacgcccggaaaatgctgattgacgggtacatcatcaaggtcgattacacagagcagaaaaagttagctgccgccgtcagccgcgtcgcctcgaacatcaatcagatttgccgccgcatcaacagcactgggcatttttacgatgccgacgttgccgagctgaaagagcaaatggctgacgtatgggaactgttgaaagtgcagcagagaaacgaattgtaattcgggaaaggagtacagatatgccgcgcatgagcaaatcaaaaaagctggaatggtcgtttttcctgaatgaccggggacgcaaggcgtacaacacgctctgccgccgctgcgtccacgattgcaagcagagcttccgggcggttgtcgttatttgcccacattatcggtccaagagggcaaaaaagggtggtacatctgcgtactcccctcgcggacctgacagaaaaccgccatagcagccg

SEQ ID NO: 12919 - DNA, 1477 bp, Unknown
  gut microbiota DNA sequence
aatgctgaacaagatcggcgaaatttctgatacgacaattctcaaatatctgtatgatagcgtggggaatggtacatgggaaagagaaagaacaacgctgatcaagaggaaatgccatgaatacgatgaagaatggcgtatgataactgcttgcccaatgaagccgccagttatgatggaatgggttccaagcgggattatcctgggtttaagaatgggagtaaaggaagaaaatcttgttgtcagcatggcaagagaagctggaatcaaagatatttataaatcgatcattgattcaaaaaacaggctaaatgccgtaccagtgacacttaagtagtgcaaaggcgcgtataacaattacccttactaaccttattgacacagagaaaatcgcccgaatccgttgcgctgcaatagattcgggcgattcgtttccatgattcatccctctcggatacctacggtcgccattcttattttcgtcattatgtactacccccacccctgcctcttagccaaatcatccatcgccgcacagaaccgctcccaccgtgccaatgttatctgtgacggatcgacattgtggatgcccacgatatcaccgcactgcggaacgatatagctgttgcccgcggtcagcagacgaagccgcgcacgcatggcgccttcttcgccgatggcctgcaggtaatctccgtcgtccagaatacggaaaagcggtgcgaacttatgcttttgcaggcggaatcgtccggactttacgatgttgtctcaaaatgtatgcccgcccatagttttaggctgtttctgagaaccaaacgggtttctatctgttcatgccatttatgctctgatgctccttattaccatgatacggtcgatggaccgtcctgtcacccacccgaatttccgtgaagactgtccgcccaatttcaacaccggacagcttgaccatacaataattctgcttatggaccattcgcatacacaaatcgtcaaactgtccagtatcagcaagtccgcgctcatccacaagaaaaaacggagaggcactttgatttacaaacgacaaaggtcaactattattattgtcgatattctgcaacgtcagcatttataaacattgaccagaataacatttgctgttaaatcgagcgtgtgagaaaaactctgtgaataagattcttctatgataattaagggcgatgagcttatggattaggcttgtcgctcttgtcttatacataacagttgtatgcagatatgtcaagagcaggcggtttcccgcctgtcttcttaaccggtcttccaattattcaggtaaacgtccttcgtacatatacacctacacaaataatgtaccctgacctgaacgactgaactgtatccaaacctagtcgctgcctaaagattacgaatataatttgtaatcgcggtgtcctcgcgactgtggccgagcgcgatgctgatgatgccg

SEQ ID NO: 12920 - DNA, 149 bp, Unknown
  gut microbiota DNA sequence
ataacggcgcggcataaaatttcataaccgcgcatctgcggcgtgatgccgagccggaacagatacggaagggttgcgcaggcaattttctcctcgtcagccgcgcggccgaacaggatattctgatgcaggtacagcgctccctgctc

SEQ ID NO: 12921 - DNA, 948 bp, Unknown
  gut microbiota DNA sequence
cacatggacgtcgcccgcacgcccaagccgaccagctgggtcatgctgctcggtctggtcaaggagtgcattaccgacccgagcctgtgcggcacgctcatcatcgacacgatggactgggcggagctgctgtgcagccgctacgtctgcgacaaggcgcagaaaaagagcatcgaggagttcggctacggcaagggctacacctatctgatggaggagttcggcgccctgctgaatacgctgaacgagctggtcgagcgcggcgtgaacgtagtcgtgacggcgcacgccaagatgcggaaatttgagcagccggacgagctcggcgcatacgaccgctgggagatgaagctgtccgccaagaccgcgccgctcgtcaaggagtgggcggacatggtgctgttcgccaactacaagacgttcgccgtcaagacggagaacggcaagaccaagggacagggcggcgagcgccggatgtacaccacccatcacccgtgctgggatgcgaagaaccgcttcggcctgcccggcgagatgccgttcgattatgccggaatcgcccatatcatcggggacgaaaaaaatattcggtcaattactgaaccgaatgaaccgttagcggtcaattctgcggacgaaacgccggataagtgtaaggacgtttccgatgcacccgcacaggcggcagtaagcgaaccggcgaaaccggacggcatcgtgccggacattccggcaggtatcccgcaggcgctgcgcgacctgatgcaggccaacaacgtcaccgcgaccgacattcagaccgccgtttccgctaagggatatttcccgctcggcatggagatcaccgactatccggcggatttcgtcaacggctgcctgatcggtgcgtgggatcagctctatcaggtcattctgaaagagcgcaaggacattccgttttaatcaagg

SEQ ID NO: 12922 - DNA, 19990 bp, Unknown
  gut microbiota DNA sequence
tatgactgttgcgctgaacgtagcaacaacaggggatgagggtaaatccttgataaatttaccaatattgcgatacattggacgaaattcattaccccattccgtcagacaatgcacctcatccacaacgaccgtgtgcaccttgttcttctgaattgccttccacagatgcggatcattcagtcgttccggtgcaacaaagagcgcctgaagcctgccgtgcttcaatttttcaataatattggtattctctgcattgccgctgtacaggcagcccgctcggattttgctgtcctcgcagcgctgcactaagtcccgcatcaatgcaaccgtcgggagaataccaatcagcagaccattcgggtgcagagtaatcatcgagagaaagcagatcgacttgccctcagaagttcgtgctacaccaagtacacctctaccatcggataagtctgtgattaccttcttctgaaacggcttgagtttcgaaatgccaaaggtattacatatcagcttttcctgtttgttcgtcataattttcactcctaaacatagaattctcgttcaaaactgaaatttagaaatttcatctgaactgcctttattccattgttgagattgaagtagaattataatttcacaggaggaacatgatatataatagcagggaaatgatgcaagaaatgcgataatggtcaaaagattgaccttgtaaagttccggatctcgtcctattctatcaatcatacataagaacatcaatgaagatacgaaatcgtatacgacgatatttaacggtttgctgactcgtaaagagcgtgaaactctgtccgcgccgcaaggagaaaaagaaaaagcggtacggcagcagctttgcgcgcgttcagccttgttagaagcgcagctttatgatacgataaacgcatacacaaagctatttatcatgaacgacgccagcataccggctgacctgcgaaagaagctgaacgctgagctggagcagtttaattcacagacaacacagacgctgatggacaaatcgaccgattgtgtacgtcagaacacgtcggcggaacagatggcggaagaactgcttgcggtgttcaataaagcagcgaaaaagctgtccggtgacatcgacggagcctatatgcaggcaagctggtattatctgctgcatcgttttgttgcggcaggctacagtgaatccaacgttatataatatcgcaaactggctgactctgggcactgccgataccgtaaagggtgcggtcacgccggaaaaaccgctgtcgcttgaacactggctggattcgataggcgttgtctccattgcgcttggcgcatatgaattggcgcagaaatatgcaccggcagcgatcgatgatgttgcggcgtttgaaaatgcagcggctcaaaacgctgcggaaatcaacctgccggaagatgctcttattgtccgtgataccaaatatcttgatgaaagcggtcatgttgactaccttaaatacgcattggatgatggatttgtggcaggaacaaagcatatagaaacacttgatgtcggtgctttaattgaccgctatggcggaccaggcggtgattttaccgcgccgaaaggcacaccatataaaatgcgatcattgccctattacaaaaatcaaaatgtatatcacatttatcgagtaattaaacccattgaaaatgtagaagcagggacaatcgctccggcgtttggcgaaccgggcggcggaattcaatataaattgcctgcgccgattgaaaagttacttggcgaatatttggaggaggttactcaatgattacaatgaaccgaaaacagctgcttgcaattttccgctatctgaaagtaccatgcgacacttatgaccttgggacaagtatgagaatcgaggcctgctatgatgtggagtatacagagcagggctgggaaatgtgccgctttgaccgcggcaaaaaatacagcgttaaaatctttgacaacgaaaccgatgcatgttttgcgctccttaaccatgtaatgcatatgcgtgggctttccgtaagactttccctgagcatccatcagcttcattccattctggtctatctgaaagtacccgaagacctgtatgacttcagtgccggctatttcggcacaaactgctattccatggaatggacagcacagggctgggaggtattcttcgccgtgaacggcgaaaagtgtgatgttgccgtctttgacagcgaaaccgatgcctgcctcgacctgctgtataaggtaatgcatcgctaagcaccttgcacagcagcaacagattgggtataataaaagcagatatttggcacagcaggagagataactatggcagaaagttttactacgcagcttattcagcgttttcagatcgaacagaagaagaacgaccatagcggcgtatatgcactctctcaaaagctgctggcgtatcattccaaccgcattgaaggcggcatgctgacggaaaagcagacggcctcgctctttgataccggcaccctgacttcggaagatgcactgattcgcgcgaaagacgtggaggaaatgaccggtcacttcctgatgttcaatgaaatgctcaaaacctatgcggaaccgctttcgcatgagctgatcaagcggtatcattacaagctgaaaagcggcgtgtttgaggacattgcaaacggttatccgatcagagaatacaagaatcgccgaaatatcgtatcggatattacaactgcactgccggaagaagttcacgcgcgcatgacggcactgctagacgaatataatgccgcagacaaacatgatctgcacggattggcaaagttccatgcagattatgaggctatccacccgttcccagacggaaacggacgaaccggacggctgatcctgttcaaggaatgcttgaaaaacgacattgatccctttgtggtaaatgacagccgcaaagcagaatactatcatgcgttgaataccgcgcagacaaaacaggattacagcctgctggagcggttcttccgcgaggagcagaccgaataccgccagcaggtcgaaggctttctgccgccggtcgaaaaatagccaacgccaatgcggctactacgaggctactgccaccgaatatcggcagtcccaacaggtgcagaaaacatacaaaaaccacacaaaatgttggtgaactgcgcctttttagtagtcgctgcgatgcaaacacctcacatagcaccgctccgactccaaaggctatgcgttcgaatcgcaccgggcgtaccaaaatgtgttgatgaaagatgcaacgccgaaaacgccgcgcgaaagtgcggtattttcacgtataacgcaccgtttttagaatgaaaaagttgcaaaaactcgattttttgaaatttcagttttgccctgcgagaggcgacctttttaagatgcgccctgccgaatttatggtctggtgtgactcgaacaccaaggctgaaaaacaaagaaaaccagcagccgctgtatcacccgcccctcttctggcgtgtgaggcagcggcttgtcctatcagatgggagtcggacacataatctgaagtgggctctataacctaattgaaaagaaaacgttatacttgatatggacttttcctgctgagtcggttaccatattaagtgttccgtgtggcaggttcagctttgtcccgcaaggatcgatgaaaggaaaggcaaaatcaattatgaaactgaaaagaaattccctgaccacgcttctggtggtcagcctcctcctcatggcactctcaggctgcgggcagcaagccgagccagattcagcgcagccgccactggaaaccgtaacgtactccaatctgacggacgcggactcgcgcaagctgctcaccgaagcgcttgcagatgccaatgtggatgagacccgaacgaagctgctgctggaccgcgtggatcagttcaatgccagcgtcaagagcgaatggctgacaggcgggtttgagaacgccgctcccaccgagaccagatatgacccctatgagatgcaagatctgtggacggagaagaacggcagcttccccggctataactgccggatcacggccttcagtctgttcaatgagttcgtcaccgccggagtagatcagccagaaacgcagggcgaggactccctctttatggatcttgaaacgctagccgcagatcccgccgttctctgcggagacagcacgtccaagttctgcgcattgtttgcgtcggtaactgctgcagataccacggaggtggcgaatcaggtcaaagcgcttcagacaggttggtcggagcgcggtatttcttttgaggacagttccgcccgtctgatctccgttgtccttcatgaccgattttcggatacggacaatacgctgtttatcgggcacgtgggcgtattactgccggcagaggacggaagtctgtacttcattgaaaaggtcgcctttcaggagccgtaccgccttgtaaagattcagaacagaaccgaactgagcgattatctgatggaaaaatacgatactgcatggggacaggatacgacacgttccttcatcatggaaaatgatgaacttatggatggataccgcccaaacccgttggacagcgcgtcataagcagcacatagggcaggaagcctgcttcttcgcaggcggttcggtcggcaccaagctggcaacggcatcgcacagaccagcattgcaggcattatgagtttgtgcggctatatttcctcgaccggcagcgctgttgtgcagtcgcagtccgcaatcaactcgatcatcaacatctatatgtttggcccgctgctgatctttgtcggcgttctgatcgtcggcctgctgtatcagctcgacaaaaagtatcccgctatcatgaaagaacttgcagagcgcgaagcgcgcggcgagctataactttctgatcttcatattccctcaaccgttcccggcatggctgcaaagctgtgtcgggaatctgtatctccggcttttctcgccctcccgcaccggtcggcaaggctgttttccgtctgtgtgccgtgtccgcctcgcggatattcacaaaaagtttatcgctgcggcattgcggctgtccgctcttctgtatataataaatgcagagcacattcctgtgtctcacatcccgattaccgaacgatttagggcaataccgcataattagacaagagcgatttgcgagcaaattttgtgctctgataaggcgcggttttgcagcaatactttcgtattgcaagaaatcgcaacgcaatcagggtgaaaaatttccgcaaagcgccgcagctttcattgtgcggtgttgccttagataaaggagtacccgtatgtcaaccaacaacctgtcctctcccgcctccggccgtttttccctcagcgccgcggcacttcacattctcgccatggtgctgatgctgatggatcatctctgggcgaccctcctgcccgcgcaggactggctgacgtgtgccggacggctggcctttcccatcttcgcattcatggcggtggaaggatattttcacacccacagcttccgaaaatacgccctgcggcttgcgctgtttgccgtgctctccgaagtgccgttcgacctgatgtacggcggaacctggttttatccggtgcaccagaacgtgatctggacgctgctgctcggccttctgggcattcatctgatggaaaccgtgcgcaaaaagcagaaaacatggctgtatctgctcaccgccctgcttgttgtgctgatcggcacagtgctgggcaccctgagcatggtggactactacggcaccggcgtgctgatgatctttatcttctacttcttccgcggacggaagtggtggtgtctggcagggcagcttctcgccctctactgggtcaatgtgcagctgctgggcggtctgctgtatcccgtccatatattcggcatggaatttgagatctgtcagcaggggcttgcacttctggcgctcatccccatctggctgtaccgcggacggcagggctatcacagcaagccgttccagtatgcctgctatgccttttatcccgtacatatgctgatccttgtgctgatcctgcaatatctgacccgctgatggccataccggcatctgcaaacatctgtaaaactttttatttatcaaatgcgcgttctgttatataatgaatacaacattaaggcattttctgttttatgaaggaaagtgtgcaggaaaggccggctgctgtgtgcggtgcagatcgaccggctgcgagagcgcgcgctttccccacgataacattgaaaattttcggtaagagagaaaggaaaaaacatatgaactggaacattattacggattcaagctgtgatctgctcccttccaccagtccggacggaaggatacggctgaccagtgtgccgtttaccatccgcatcggggagcgggattttgtcgatgacgagcacctggatacgatggaaatgctctccgccatggagcaggaacactcggccggtcacacctcctgccccacgccggacgcatggctggcgcagtttgaacaggcggactgcgcgattgcgatcaccatttcctcgcagctgtccggcagcatgaacagcgctcttgcggcaagagatatggcgctggagaaaaacccggataaaaagatcgtcattttggactccttatccaccggaccggaggttctgctctgcgtaaaggagatcgagcgcctgattcgtcagggcctttcctttgacgatattgcggcgcacgccagaaattttctacagaaaaccaaaatcctctttgcgctctcctcgtttgacaacctgatcaagaacggacgcatccaccgtctgacaggtatgctcgccaaggctctcggcatctggggcatcggcagcggcagcgacgagggaaagatcacctttgaaagcaaggcgcgcggtgcgaaaaaggtcgtacagacgctggtcagcaccatgaaggagcacggattcatcggcggaaatgtcgcgatcagccattgtgataatctcgcactggctcagacgctgaaaaacagcattctggatatctgggaaaatacaagcatcgagatcctgccgacccgcgggctctgcagctactacgccgagcgcggcggattgatcgtcagctactgatttcaacaaacaaagggcgaaaccgcatggtttcgcccgagcctggataatgcttttgcatattctcatcgtcagcacatcattatgtactaattccatccctgccttttggccaaatcgcacatcgcgaagcagaatctctcaaacggtgtcaatgccatctgtaacgggtcgccctcgcggatacgcagggttcttctgatctcctttgggatgacgacgcggccgagatcgtcgatcctcctcacaattccggttgctttcacgctgttctgcctcccatttacggtagttctgttgttatggtggtagtatttacagtgaacagaaaataatgcggattttgcgaggagatatgcggcagagcagggagcgaacgggggcacaggaaaaagtcggaaaaattctctgcgctcttgcaaatgaagggcacggagaatataatggaaggagaaagaatccgctcgagaccataaagggggagaaaaacatgaaagtatgtccaaaatgcggttctcagatgaacgatacggatttattctgtcaaaactgcggcatgagcttcggcggcggcgcgccgcacgaaaattcgcagcagccgaacgggggacagcagaacaactggcagcagccgaacaactggcagcagccggcgtatcatttcgacccgtatgaccatactgcggaatttgatgcgaaggacatttccgataacaaggttatcgccatgctgtgctatctgctcggcacggtaggcgttatcatcgccctgctcggcagccagagctcaccgtatgcaggcttccatgtccgtcagtcgctcaagtttacggtcgttgacatcctgctcggcatcatcggcgcggtgttcttctggacctttcttattccggtagcctgcggcatctgctatgccgtcctgttcgttgtccgcatcatctgctttttctccatctgcaagggacaggcaaaggagccgccgatcatccgctcgctcggtttcctgcgataaaacggaaatttcacggaacacaaagcgcccggccttttggccgggcgctttttcctgcaaaaaggaaaagactgcataaagcagtcttcagacggcagaaaagccgtggccgcaggaggatgaatatcagatcaaagtcgaacgcctgaacgaactgaacttcctgttaagcaaaaaagatgaccagccccagcttggcttggaacagcctcagccggagctggcgtgatggcctgaccattttggagcagacaatttggtatattgtatgaattacttaaacgaaaagtggactgtttcaaaacatcccaaaaattccacttgaacttcacgagtccgagtggaattttttaaatgtgacttactggatataacggcgtacagaatatgtattggcatccatgaggtgagcacagttgggaaatcttgtcttttataaggctcttataagttttagaaagattgacgcattttatggtttggagtcgaattcttttgtttcttttgcgataagataatacatcaaaaaaggcaggagcaatgatagcagaaaaccaactatatatgcaattggatgagtcgaaaaagctaacacaaaatcgtaatagcaggtaaaaatattaactggaatcgatataatattaaccgcccaagttataattactgaagaccgaaaaaacgtttttaatagaagcgataaaattacataagcaaatatgcattttgatattatttttacttgcaacaaattttgctttctttttttccagaatctaagaaaaagaaaaaagactatagcagaaagaattaccgaaatactgtatctaattcttactactatttccaatgatattcctgaaccatacaacttctgtataaaaggtgttgtcaaatagtcagcaaaaaaaattatcaagcctgacaagattaaatatacgcttgacataaataatgttctcttcatcattatcaccattttaaatcgggacaacctatgcaaaggttgtcccgaatattttttaggctgtacaatatggaacggttctggttgcactccaagaacttacaccgggatagccgtacgcatcatacgaataataaatcattcttgcaatttcgtcatcctgaagactgcataaagcagtcttttcgaaattcttttacttgccgaagtagctgaagtgcatgtagtcgcgcttgctgtgccaggcgttgccgccccaggcgaagccgtacttggtgaaggcgttgtaaacgtcgccgccctcgggaatggagaacgggtcggtgtacggcgtccagtgtgtgccgcaggtcggggtgagcgagccgtcggcgttgatggtcgcctccatgttctcgttcgggttgatatcgactgcggtgccctgcgaatgctcgccggtacgccacgaatagcagccgacgtcgttgatcgggaacttttcgtcgccgttgtagatctcctcaaaaatcgccttgtagatcgcggcgagcgaagcgttgacctgtaagtaagcggtgccggtggtcttggtgccgtccgactggagacgccataccggaactgcgatctcgaccatgtgcgcctcggcctcctcggcagaggtgtatttcgagccgcccgggccgtagacgaacgtcatcttatcgtccggaatgatcgtgctcggggtgttccagaggttgttcggcgtgctgaccgtcgtgttcggcttggtgataacgacctcggacttgttcggcgagagcttttcgaactcgctgcagaaacggttggccatgataacggcctgctcgcgcgtcgcggtgccggacggagccagctgcgcactgcccaagccgtccgagatgccgttgacgatggtgtagtccaccatgcggacgaccgggtcgaccgcgtaggacttgatcgtgctgacgtcgtcatagtcctcgacgcaggcgtcgcccgcgatctccggcgcgtcaatgccggccttgtcgagaatgttgttgagaatgacgcacagatcctgacgctcgatgctcgcgttcgggtcgaaatagccgctggcgcggccggtgaccagaccgagagaataggctgcgtttacgttggcgtcgtccgtgtcgcggaagaacttctgacctgaggcatagaccgccttgccggtcagctgcttgtaggccttgacggcgatcgcacagaactcggcgcgcgtgatctcctcacgggcggagctgtctgcaagcgaggtcggcataaggcctgcctgctgtgccgcagcaatatcctcctgcgcccagctcgaaacgtcggagagcgcaccggcctgcggcacgaccatagtcgccgcgagagccagaacgcctgcgcggcgaacaaagtggtatggcatagggaagacctcctgtaaattcctgtgttaatttcctgtattatatgtatatagtttaatgagcttttgtgtcgaatttgtgaaaaatatagatttattcacagtttccacaagcttatccacacaggctgtggataactccggtgcgtgcacgcacacgccggcggagcacaacgattgtgcgcagaccgaaaagaaatgtctgcatatacatattaacattatatcatcaaacagagaatatttcaacaacaaaacgccggagaatgtctattttatcgaatttacaggccgttttcatccagccacgcatccagaaaagcggcggcaaggctgttcggacgaatattcgcgcgcgcatcttccggggaaaaccagcggaagcggtcgacctcgcggttcacgtgaatgcgctccgcgtcggggacgaaggcggtgaagttgcacatgagcgtgttggacggctcgaagaaccgggtgcggttgaaatggatacggccggtgtgcagaccggtctcctcgaggatttcgcgccggacggcagcctcggcgctctcgccgcggttgatataacctgcgacgaggatatagctcggtctgccgtactgctggatgagcaggatgcggccggtgttttcgtccacgacgatcatgctgaccgccgcgttgtacatgggaaagcggtattcgccgcaggccgggcagaagggcacgatgccttcgccctcgagcggcttttcgatgagcgctgcgccgcattcccagcagtgtttctgtatcacaatgaatgtcctttcgggggggatggccggttatttcgaccggcggagccacttgaagagcaggcagatgatgaataccgtgagcgcggtattcaaaaccgtcacaaaggtgccgtagaggtcaaacgcgaaaaagcagttcatgaaagtgctcctttatacattataatatattactcaaaatttgtcatgcggtcgagcgtgcggtactggatggcctcggcgatatgctcggcgccgatggtgtcgctttcagcgaggtccgcgatcgtgcgcgcgacgcgcaggatgcggtcatgggcgcgggcggtcagaccgagccgctcgaaggcgcggcggaaaacggcagacgcctcgtcggtcagcggacagaactccgcaagaagcgagggcggaatggcggcgttgcagacgtcctcgccctgccggtcatactgccgctgccgggcagcgagcacacgggcgcggatggtctccgagctttcctcctgtgcgcggctgcgcgcggcgagcgcctcgtactcgaccggctgcacggtgatctggagatcgatgcggtcgagcagcggcccggacagacggcgcagatactgctgcacgcgctccttcgtgcaggtgcagcggtttgtgccgtaccagccgcacggacagggattcatggcggcgatgagctgaaaatcggccggataagtgacctgtccggccgctcgggcgatggtcagctttccgtcctccatcggctgccgcagcacctcgagcgcgtcgcgccggaactcgggcagctcgtcaaggaacagcacgccgcggtgcgcgagcgtgatctcgccgggcaggggaagccgtccgggtgagcccgagcctccggcaagcgctgccgccgaggaggaatgatgcggcgcacggaacggccgctcagcgcggtcgacggcctcctgcgcccggccgaccgccgaccagacgcggatgacatccagccgttcgtcatgcgagagcggcggcaggatggacgaaaaccgcttggccatcatgctcttgcccgagccgggggagccggagagcaggacattgtgcccgccggcggccgcgacctcgagcgcgcgcttgacgaggtgctgcccgagcacatgcgcatagtcgaggtcgtgctccgccggtttcggttccggcggcggggggcaggggacaagctgctttcggccgctgaggtgattgatgagctcgctgagcgtgcgcacgggatagacggtcagactgtcggcataagaggcctcctgcgcgttggccgccgggacgtagaccgcacggaagtccgcgcttcgcgccgcgagcgccatggagagcgcgccgcgcaccggacgcagctcgccggagagcgaaagctctccgaagaacagcgcgtcctgcggcagagcgttgatctcgcctgcggcggcgagaatggacagcaggatgggcaggtcgaaggcggtcccggccttgcgcgtgtccgccggggcgaggttgaccgtcaggcgcgacacaggccagtcgaacgagcaggatttcgcggcggcgcgcacgcgctctccggcctcgctgaccgcgccggtcggcagtcctaccacatcgagccgcggcagtccgcccgaaagcagacactcaaccgtgacgatatatccgtttatgccgtcgagaccggcggaaaatacgcgagagaccatgctcgatccatcctttccgagggaagctgtgcttctgccgtggagcgaaaaccgctgtatagaataaatataccatatcactccccctcccacaatacaaaaactgtaggtttgcacaggaaaaacggatggaaaaacggaaattgtttcacaatgcaaaacagcttatcaaaaaatgaaaaaacaagcgaaaaaaacggcttttgctgtttacaatcgtttgcatcggtgatacaataaatttcagaaaaaaagtcttgttatcgtgtaaaatacactaaaaaggggctttttaaaatccgacgctataattaaataggaggatatatctcatggcaagaaagatgaagtccatggacggtaataccgctgcggcacatgtgtcgtatgcatttaccgaggttgcgggcatctatccgatcaccccgtccagccctatggcagacagcgttgaccagtgggcagccgcaggtcagaagaacattttcggtactaccgtaaaggttatcgaaatgcagtccgaggcaggtgcggcaggcaccgtacacggctctctggcagcaggtgctctcaccaccacctacaccgcatctcagggtcttctgctgatgatcccgaacatgtacaagatcgcaggcgagctgctcccgtgcgtattccacgtatccgcgcgtaccgttgcttcccacgctctgaacatcttcggcgaccactccgacgttatggcatgccgtcagaccggctttgccatgctcgcagagaccaatccgcaggaagttatggacctgtccgcagtagctcacctggctaccatcaagtcccgcgttccgttcatcaacttcttcgacggcttccgtacctcccacgagatccagaagatccaggtttgggattacgaggatctgagggaaatgtgcgacatggatgctgttgaagcattccgcaagcgcgctctgaatccggagcacgcaatgatgcgcggctctcacgagaacggcgacgttttcttccagcatcgcgaggcagccaacaagtactacgaggcagttccgggcatcgtagaggagtacatgggcaaggttaacgccaagctcggcaccaactaccagctgttcaactactacggcgctgctgacgcagaccgcgttatcattgctatgggctcgatctgcgacgttgcagaggaagtcatcgactacctgaacgcacacggcgagaaggtcggtctggtcaaggttcgcctgtaccgtccgttccgcgctgacaagctgatcgcagcgatcccggagaccgcgaagaagatcgcagtcctcgaccgcaccaaggagccgggctcccagggcgagccgctctacatggacgttgttaccgctctggctgacgcaggcatcaccgacaaggtcgtaaccggcggccgttacggtctgggctccaaggacacgcctccggcttccgtattcgctgtatacgaagagctgaccaaggctgagccgaagaagatgttcactctgggcatcaccgacgacgtaaccttcctgtctctggaagagaagccggctccgaacaccgcagcagaaggcaccaccgagtgcaagttctggggtctcggcggcgacggtaccgttggcgcgaacaagaactccatcaagatcatcggcgaccacaccgacaagttcgtacaggcatacttccagtacgactccaagaagaccggcggcgtaaccgtttcgcatctgcgttttggcgacaagccgatccgttctccctactacatcaacaaggctgacttcgtagcctgccacaacccgtcctacatcaccaagcacttcccgatcgtgcgtgacgttaagccgggcggcgtattcctcatcaactgccagtggactccggaagagctgagccaccacctcgcagcttctgagaagcgctacatcgcaaagaacaacgttcagctttacaccatcaacgcgatcgacctcgcgatcgagatcggcatgggcaagcgcaccaacaccatcctccagtccgcgttcttcgcactggctaaggtaatgccgtctgagcaggcgatccagttcatgaaggacgctgctaccaagtcctacctgaagaagggccaggacatcgttgatatgaaccacaaggcgatcgacatcggcgctaccgcatacaagaagatcgacgtaccggctgactgggctgacgctcaggacgaggctgatacccgcgagcttcagggccgtccggaagttgtcaagatggtcaaggaagtcatggagccgatcggccgcatggacggcgactctctgccggtttccgctttcgcaggcgagcatgttgacggctccttcgagcacggcgcagctgcttacgagaagcgcggcgtagcagttaccgttccgcactggaacgaggctacctgtgttcagtgtaaccagtgtgcttatgtctgcccgcacgctaccatccgtccgttcgctctgaccgacgaagaggctgctgccgctccggagtctgcgaagctcgtcgacatcaaggccggcaagggcaagggcaagtacaagtacaccatggctgtatctccgctcgactgcatgggctgcggcgtatgtatcggcgtttgcccgaccaagtctctgaccatggttccgcaggatcaggaagctgctcagcaggataccttcgactactgcgtagcaaaggtttccgagaaggaagatatggcttccgtaaactccgtcaaggattctcagttcaagaagccgctgcttgagttctccggctcctgcgcaggctgcgctgagacctcttacgcccgcctggttactcaggtctgcggcgaccgcatgtacatctccaacgctaccggctgttcttctatctggggcggcccggctgctacctccccgtacaccgtcaatgccgagggccacggtccggcatgggcaaactccctgttcgaggataacgcagagcacggcctcggcatgtactacggccaggaagctctccgtgatcgcctgatctccaagctcgaggagatggctggctccgagaaggcttctgacgacttcaagaatgccgtcaacaccttcatggataccaaggacaacggcgctgcgaacgctgagccgaccaaggcactggttgcagagctcgaaaagggcgcagcagcaggctgcccggactgcaaggatgttctggctcacaaggaatacctcgctaagaagtccgtttggatcttcggcggcgacggctgggcatacgacatcggcttcggcggtctggatcacgttctggcttccggcaaggacgtaaacgttatggtattcgataccgaggtttactccaacaccggcggacaggcttccaaggctaccaacatcggcgctgttgcacagttcgcagcttccggtaagaccaccaagaagaagagcctcgctgagatcgctatgagctacggctacgtttacgttgcacaggtagctatgggcgctaacatggctcagaccctgaaggctatcgctgaggctgaggcttatccgggcccgtctctggtcatcggctacgctccgtgtgagatgcactccatcaagggcggcatgaccaactgccaggctgagatgaagaaggctgttgactgcggctactggaacctgttccgcttcaacccgcagctggctgacgagggcaagaacccgttcatcctggagtccaaggagcccaagaccgaggattaccgcaagttcatgatgggcgaggctcgttactccgctctgacccgttccttcccggatcgcgcagagggtctgttcgagcgctccgagatcgagtccaccaagcgttacgctcacctgcagcgtctgcaggctctgtacgcaccggaggcttaatctcctgcacacaggctgaaacagcataaataacgaactcccgcagagtaaaaacgctctgcgggagtttttttatgtgcaataacgtaaaaattcgcgcttccgcaagggcgggctgctctacgggaaagagctgctccggcgcaccggaaattcactctgcccggcaaaaaacgcatatttgcatttttactgtgcaattttgcagaaacatatatcgctctggaaaaatctatgctatactgaggaaaaggacaggcatttgagagcagacagagaaaggcgggatttcatgaaacttcaccttgtcaaacgtgtgggaatgctggcggtgtgcgcggcagccgcgacggtctgtgctttcagcgtcgcttcgctgaacggactgcggtatgtccgcccgacggcggaaaactggacgctgctggcgtatgtggaaccggcggcgcgggtcgagcagcaggtggaacgctcggacggcgagtatttcgccacaacgcttaccggctttgacgcacaggagcgccgggtctggtcgctcacctccatgcacccgttcatcgtcggctacggcgacagagaagtctataacggcagcgaaatgacccggtatatcacaggctacggcggatatacgacacagcatgtgcagtatgacgaactcgggcgcacgatacagttcgaaagctcgtacggaacggcgttttatacctaccgcggcgaggaaagcgaaccgtatcaggagaaatggtacaatacacagggcgaacagatgtcggaaagcattttcgagcacgattccgcgaccggatataccatacagaccagcaatacctatgagccgtatggcacggtcggcacggattataccgtgatagatcggtacgggtacgtgctgtatacgggcgagaagctgcccgacgcagcgaatatgccgcagggggacggggtttatgatacgaatgaaaacacattgacccgcacgatagcggacggctcgaccgtaaaaatatggtacgacgatgagcagcgtatggtgcggcgcgaggagagaaacgaggacggctcgctttcgtactacaccgtggtagaatacaccgacgtcacccgataagggaacttttcctttccgagtaacgtcccaaatagtgtaaaggaaaatcctgccgtgattgacaaaccggggcggcaggattatactgaaaacgcaaaaaatggtacttgataaaaaggaggagcaaatctatgaagaaaatgtggatttccgcgctgctcgcggcggcaatgatgaccgcagcaggggcggcggacgcgccgagcgcgtgggcgcagaagtcggttgacgcggcgcgtgcggccggtctcgtgccctcgcaggtggacagcgctttcgacacgccgattacccgcgaggatttctgctcgctcgccgcggcggtctaccgcgcgtgggatagggaaaatgtcttgcagactgcctcgaccggcaaggtcagcttcaccgataccgataacgcggatgtgctgctctgcgcctcggcaggcgtggtaaacggcgtcggaaacggtaaattcgccccggataagaacattacccggcaggaggcggcgagcatgctgcaccgtctgggcgcgctgaacaaaaacgtcaaaaatgacgtaaacgaccgcctgccgcacgttttcgcggacggcgagaaaatccggtcgtgggcgcgcagcgacatcaactgggtctaccgtcagggtatcatgaacggcaccggcagcaatcatttcactccggacggcgcgtatacgcgcgagcagtccatcgcgaccacgctccgcctgtacgacagcaggtacgcccttgcgccggaggcggaagcggcgcattatgtgctcgtgccgaatgaaagaaccgtgacgatcgaggacgcggcaggaaaccgcctgctgaccgatttcgagaacacaaacggctatttccagaatgcgcatctgttcggcgtgtgggcagaggttgaatggaccgatacggacgcgcactgcacggtcgtgaacctcaagaccggcgaacggctcgaaaaccgcacgataaccggcatcagcccggacggcacgaaggcgtgggcaaagcagtttaacaccggcagcggcggtacgttcctcatcatccgttcggacggcacgcacggcaagaccgagttcagagcgctgagctcgtggagcaacgacggaaagtcgctcgtgcgcagcagcgacggcagcatcacagccatcgacaaccagacccgcgagctgtggcgcgtcaagggcgtttcgctcggcgcttattacggcagaggcgatatgctgctcatcagttacgacaacagtccgtctgtcctcgtgaaggacggcagggccgtcacgctcggcgcgaagaatatcaccagcctcaaccagagcggcgagacctgtgtgatttcggacagcgtcggctattacaaggtctgtgatctgaacggcagggcgctcagcaggacctaccggaacgcgctgtacagcgagggcagcaatctgtacgccggctgggtcaaggaccgtacttatgaaatcttttactgtccggcaggcggcagcgcgaaggtgctgtatacggtaacgtgggatgtttcgacaccgacggagctgccgaccgacggcgccggtctgtatgcgcttcagacggacgacaggacggttgtctgcattgacagcttcggtcagactgttggaacggcgaaggctgcgttcaaggtcagcaatgttgcgtttgaggacggtgtgctggtgcttcagggtgaaaatcagcaggtaaagtgtctgccgacaggcgaggttatttcttaaggagaaccgctgaaggcggcggagacgtcggtgcccaccgacgagggcaaaagggggcaagggcaccgtatggttcccttgccccctcttgactcccccaaaccctcctttggacgcgactcccttcggtcgcgcgtctaaa

SEQ ID NO: 12923 - DNA, 23852 bp, Unknown
  gut microbiota DNA sequence
caggggattgcgcccccgggggcgcggaaaggcacgcgaaagcgtgtcttttttgacattttattgagatatatgaattttatggatgaaaaacgaaggcggaaaacggacgggatgttgcttttttcggggtcgggtcgggggaaaacgtgaaaattcagaaaatttgccttgacaggagacgcgcaatctgcttttattaaatgtgatacaagcgctgaatgagactattatatataggaaaggcaaggggggatgcggctgtgacaggtgttggaaggcgagcgccgaagagccgcgcgatgcacgcggcgatggtgatcgctgttggtttcgcgctcattattctggcaggaacgctgctgctcatgctgccctgcgccgcaaagagcggccgcgcaacgcccttcatcgatgcgctgttcaccgcgacgagcgcgacctgcgtcaccggtctggtcacggtcggtacggcggtgcactggtcgcttttcggcaaatgcgtcattctcctgctcatccagatcggcggtctcggctttatgtcggtcatgacggcgacgtcgctgctgctgcggcgcacgatcacactgcgcgagcgcatggtcatcggagccggcttcggtctggattcgagcggcggcatcgtgcggctgatgcggcgcgtgctggtcggcacgttcctgttcgagggtgtcggcgcggcgctgctgtccatccgcttcgtgcagcagttcgggccgctgcgcggcgtcggcatgggcgttttccatgcggtatcggcgttctgcaacggcggctttgacctcatgggcacgccggacgatccgttctgctcgctcgtacactatgcggaggacccgctcgtgagtctgaccatcatggcgctcatcgtgctcggcggtctcggctttttcgtatggagcgatgtgtgggatcacaggcgcttccgcagcctcagcctgcacagcaagctcgtactcgccatgtcgggcgtcctgctcggcggcggctttttgctgacgctgctgtttgagtggagcaatccggcgacgctcggcggcatgaccctgccgcacaagctgctcgcggcggcgtttcagagcgtgacgctgcgcacggcaggcttcaacaccatcgacgagagtgcgctgaccggcccctcgcaggcggtcgcgtgcgtgctcatgctgatcggcggctcgcccggctcgacggcgggcggtctcaagaccgtgacggtggcggtgctcgcactcagcgcggtcagcgcgctgcgcggacggacgtcggtcacggccttcggacgaaccatcgagccgcgcagcatcatgaatgcggtcgcgctcacggtcatcggcgtgacgatcagtctcggcggtgcgtgcgtcattgcgtttatcgaaaatgcgccgatgaacctgtgcctgtatgagaccgcctccgccttcggcacggtgggcctcaccatgtcgctcacgccgtcgctttcggcggtgtcgcatatcatgctgatcgttttgatgtatttcggccgcgtgggcgtactgacgctcggcgtcgcggtattcctgcgccgcagtgagcctcccaagctcaaattcccctcgggcaatgtcatgatcggctgaacaaaaaaaagaaaatccacgaaaaaaatatacacagcctgtggataaaagggagaaagcaatgaaatcctttctggtaatcggtctcggccgcttcggccgggcggtcgcgtgcgagctcggctcgctcggacatgaggttctcgccctcgacaacagcgaggaaaacgtgcagcacatcgcggacagcgtcacgcaggctatctgcggcgatgcgcaggacgaggcggtgctccggtcgctcggcgttggcaacttcgactgctgcgtcgtggccatcggcacggacatcgaggcgagcatcctcatcacggtcatgctcaaggagctcggcgcgaagcaggtcgtctgcaaggcgctgtccgcgctgcatgcccgggtgctcgagcgcgtgggcgcggaccgcgtcattcagccggagagggagatcgggcagcggctcgcgcagcatctcggccgcacgaacgtcatcgactacatcggcttttcggacgatttctctattctggagatcaaaacgccgcgcagctggatcggaaaaacgctcggacagctcggcgtgcgcgcgaggtacggcatcaacgttctggccatccggcacggtaagggcggcgtggcggatgtaacgccgggggcggacggccgcatcagtgagaacgacctgctggtcatactgggtacgaacgataaagtagataaagtggtggacctgaagtgatagagatacagagccgtcagaacgctgcgctcaagcatctagcgcggctcggacgggagaggaaataccgccgctcgaccggcgaaatgctgtgcgagggcgaaaaaatgctgaccgaggcgctgcgctcgggcgcggagatcaagaccgtgctcgtgcggcgcggcttcgagaacggggagctgcggcaggcggaaaagcagggcgcagcgatgtactgcgcggaggacgcgctgttccgcctcgcgagcgaggtggaaagtccgcagaacgttattttttcctgcatgcagccgcagtgggacgcagcggcgctcgatgacagggagcaggtactgctgctcgacggcttgcaggacccgggcaaccttggcacgatcctgcggacggcagaggcgttcgccctcggcgccgtagtgctgtgcgaaggctgcgccgacccgttttcgcccaaggtcgtccgctcgaccatgggggcggtattccgcctgccctgcgtgcagctgccgctcgcggacgcgctcgccctgctgaaaacggccggtctgccggtctacgcgaccgcgctgcacgaggacagcgtgccgctctcgagcgtttcgctcggccgggccgccgtcatcatcggcagcgagggcaggggcgtgagtgagagcgcgctgcgcctgtccgaccggcgcgtgatcatcccgatgcacggccgcgccgagtcgctcaacgcaggcgttgcggcggcgatcgtgatctatgaaatgacgaaataaggaggcggaagggcatgtcgtcactgctgagctatgtctggttatccctcaagcgaggtctgggaaactatctgcgcgcggaggtgctgcgccgcatgggttcgcccgaggcggtttacgccgcggacagcacaatgctcgcgcagagctgtcccagtctgcggcggcagcatatcgagctgctgtgcgacaaatcgacggacgaggccgaacaggtcatcacgcagtgcgcacgcgaggacatccgcatcctgcccgtttcggacgccgcctacccggaccgcctgcggcagatcgaggatccgccggtcgtgctgtatatccgcggccggtggccggattttgacaccatgccgggcatcgcggtcgtcggcacgcggcaggcgacgagctacggcgtgcaggtcgccgggacgatcggcgcggagctggcgaaggccggctttgtcacggtcagcggcatggcgctcggcaacgacgcggcggcgcatcgcggcgcgctccgcgcaggcggcctgacggttgcggtgctcgcaggaggaccggatgtgtgctatccgccgcagaaccgcgccctcatgggcgatatcctgctttccggcgcggtcatcagcgaatatccgcccgggaccgagccggacggcctcaactacaagagccgcaaccgcatcatcagcggcctgtgcgtcgcgacggtcatcgtcgaggccggaagcgcgcgctcgggcgcgctcatcactgcacgtcacgcgctcgaccagagccgcgacgtttatgcggtccccggtgcaatgggcgcgccgcagtccagagagtgcaacgctctcatcgagcggtgcgaggccgccctgctgaacgacccgagggcgctcgtgcgcgagtatgcgagcctgctgcccggcggcgcggccgcatttcatgcctatacccgcccgcccgtcgcgcggacggcgccgaagcagcgcaatgcgtcccaacggcgcacgcctgcaaaaccggctcccgtgccggaaacggcggctccggcgccggaaaaaccggcgtttaccatgccggagggactggacgagaacgagcagaagatcgtccgtctggtcggagagggcatgcacagtctggaggagctggtcgagtgctgcggtctgcccgcgccgcggctgatgtgcatggtcacaaccctcgagatggagggcgtgctcgagcgcgacgcggcgaacgtccgtctcgcagggcaggaatgagtaagaagaaaagaaagataatatgacaggcgcagcgcctgtcagcgcatcgtgcgcaccaaacaggaaacggaaagccgttttccgaaaacccggaggtttttatgtctaagttagtaatcgtggagtctcctgccaaggcaaagaccattggcaagtatctgggcgcggattacgtggtcaaggcgtccatgggacatctgcgcgatctgccgaaaaagaaaatgagcatcgatctggagcatgatttcaagccggaatatgtgccgatcgagggtaaagataaagtcatcaaggaaatccgcagcgagatccgcaaggcggacttcgtctatctcgcgactgaccctgaccgcgagggagaagcgatttcgtggcatatcaaggagctgttcaagctcaaagacagcaattcgcgccgcgtgaccttcaacgagatcaccaagcaggctgtccgctcgggcatcgcaagtccgcgcgacatcgacatcgatctggtcaacgcgcagcaggcgcgccgtatcctcgaccgtatcgtaggctatcagctctcgccgttcctgtggcgcaaggtcaagcgcggtctgtccgcaggccgtgtgcagagcgtcgcgacccgtctggtcgtcgaccgcgaaaacgagatccgcgcgttcgtgcccgaggaatactggtcgatcgaggcgctgctcgcgaccgaggacggcggaacgttcaccgcgcgctactatggcgacggcagcggcaaggccgagctgaagaatgaggagcaggcgatgcgcgtggtgaacgccgtcaccggaaagccgttcaccgtcggcgagatcaagcgcggcaagaaaaaacgcaccccggcgcccccgttcatcacctcgaccctccagcaggaggcgagccgcaagctgaacatgacgccgcgccgcaccatgagcatcgcgcaggagctgtatgagggcatcgagctgggtgagtacggtcttaccggtctgatcacctatatgcgtaccgactcgctgcgactcgccgacgaggcgaccgccgccgccgccggctttatccgcggccgctacggcgaggactactatcccggaaagccgcgcgtttacaagaccaagtcgggcgcgcaggacgcgcacgaagccatccgcccgtccaacgtgcagctgctccccgaggagatccgcaggtacctttcgcccgaccagttcaagctgtaccgtctgatctggtcgcgctttgtcgcctgccagatggcggacgccatcctcgacacggtctccgcggacatcgtctgcgagggacaggtgttccgcgcctccggccatacggtcgcgttcccgggctttacggcggtctacgaggagggcacggacgacgaaaagaagcaggacgcagccggaaagccgctgccgcgcttcgacaagggcgaccggctgaccgccgagaagctcgagccgtcgcagcactttacgcagccgcccgcgcgctataccgaggcatcgctcatccgtgcgatggaggagcgcggcatcggccgtccgtccacctatgcgccgaccatctcgaccatcatcgaccgcgactacgtcaccaaggagagccgagcactgcgtccgacgccgctcggcgagggcgttaccggtctgctcgtggacgagttcaagtcggtcgcggactatgagtttaccgcgaacatggagcacgagctcgacgaggtcgaggccggaaagctcaactatatccagctgctgcacaacttctatgacggcttcgaggcggcgctcaagcaggccgagatcgatctggagggcaagcgcatcaagattcaggatgaagtgaccgacgttatctgcgagaaatgcggacgcaacatggtcatcaagtccggccggttcggcaagttcctggcgtgccccggcttcccggaatgcacgaacaccaagccgatcaccgaggacacgggcgcagcctgcccggtctgcggcgcaaaggtcgtcaagaaaaagtccgcgcgcggttttgtctactattcctgcgacaaatacccggcctgccagttcatcacctgggacaagccgctcaagaccaagtgcccgaactgcgactcctcgctgttccgccataccgaccgcgactccaaggaggtcaccgacgtatgtctgcgcgagggctgcggcttcgtcgagctggtcaaggagggcctgtcgcccgaggagaccgagaagcgccgcaaaatgcgtgaggcgcgcgcggccaaggctgcggagcgcgccgccgcgaaggaagccgccgaaaagaacggcgagaccgcggaaaaggcgccgaaggaagcgaaaaagcctgcggcgaaaaagaagacggtcaaaaaaacgcttccgtggatgaccaagaccacgaacaagttcaaaaagctcaaggacgaggccgtgcaggagctgactgcaaagcagcaggagcagtacgcaaaggcgctcgcaaaatatgaggccgaaaaggccgcggagaaggcgaagaaggccgccgagaaaaaggcggcggcgaaaaagcctgccgcaaggaaaaagaccacggcaaaggagaacccggatgaataataccgttaccgtcgtcggcgcgggactggccggctgtgaggctgcatggcagctcgcgcagcgcggcgtttccgtgcgcctgtgcgagatgaagccgtcgcagcacagcccggcgcatcactcggacgatttcgcagagcttgtctgctcgaactcgctgcgctcggatgagctcaccaacgcggcgggcctgctcaaggaggagctgcgccgtctggacagcctcattctgtcctgcgcggacgcgaaccgcgtcgaggccggcggcgcgctggcggtggaccgcgaggcgttcgccgcagccgtcaccgaaaagatcaggaaccacccgaatatcgaggtggtctacggcgaggtgaccgagatcccggagggccgcgtcgtcatcgcctccggcccactgacctcggatacgctgttcgacgccatccacgccaaggtgggcggcgatttcctgcacttctacgacgcggccgcgcccatcgtgaccgcggagagcatcgacatggactccgcctacgaagcctcccgctacggcaagggcacggcggactatatcaactgcccgttctcgcgcgaggagtatgacgcattctggaacgcgctgaccaccgccgaggaggcgccggtgcacggcttcgaggactccaaggtgttcgagggctgcatgcccatcgaggtcaacgcgcgccgcggctatgatacgctgcgcttcggcatcctcaagccgatcggcctgcccgatccgaaaaccggcagggacccctatgcggtgcttcagctgcgccgcgacaacgcgaacggcacgctgtacaatctggtcggctgccagacccacctcaagttcggcgagcagaagcgcgtgttctccatgattccggcgctccggaacgcggagttcgtgcgctacggcgtgatgcaccgcaacacgttcctcgactcgccgcgtctgctcgacgcgacctacgcgctcaaagccgagccgcgcatccgctttgccggacagatgaccggcgtcgagggttatatcgagtccaccgcctccggctggaccgcaggcgtggcggccgcgatggaggtgctcggaagaccgatgccgcagctcgaccgctttaccgccgtcggcgcgctcgcatcctatatttccgaccatacggtcacgaagttccagccgatgaacatcaatttcggcatcattgaaccgcttggctgcaagatcaagggcaagcgggagaaaaacgcaaagatttccgagcgggcactcgaacgcatcgaaagtctgaagggagagctttgagaatgaagatcatcgttgacgcgatgggcggcgacaatgcacccgacgtaaccgtccggggcgcggcgctcgctgcgaaggaatatggcgaggatatcctgctcgtcggccagcccgaggcaatcaccgccgtgctgcgcgcgcatggactggagaacaccgagcatctgaccatcatgccggcctcggatatcgttgacatgcacgacgacccggcgaccgttctgcgccgcaagccggactcgtccatggcggtcgcgttcaagctgctaaaggcaggcgagggcgatgcgctcgtctccgcaggcaataccggcgcgctgctgaccggcgcgacgctgtacggcggccgcatcaagggtatccgccgcgcggcgctcgcgcctgtcctgccctgcgagggcggcgaggtcatgctgtgcgacgctggcgcgaacactgagtgcaccgccgagatgctgctccagttcgccttcctcgcgtccctgtacgcggagaagaacaacggcctgaagtcgccgcgcgtcggtctggtcaacaacggcaccgaggacaccaagggcgacccgctgcgcaaggaagcctacgcgctgctcaaggccgcaggcgacgcaggcaggctcaatttcgtcggcaacgttgagggcagtcaggtaccgctcggtgcgtgcgacgtcgcggtctgcgacggcttcatgggcaacgttctgctcaagacggtcgagggcacggcgaaattcatggcgcacgagatcaagaaggtgttcaccgcctcggccggcaccaagatcggctatctgctgtgcaaaaagggcatggatgacttccgcgagatgtttaatcaggacaaggtcggcggcgcgcccttcctcggcatcgcaaagccggtcatcaaggcgcacggctcgtccaacgagatcgcggtgatgaacgctgtccgccgcgcgatcgcctacacgaagtccggcatgatcgacgcggtcaaggaaaatattcagtacatgacggttgaataagcaaaaaaacggcgaaaggaggtgaaaccatgctcaaaatcgactataaattcaaggacgtcagcctgcggcagaaagcgatgacgcattcctcgtatgccaacgagcaccacggcacgcatctggactgcaacgagcggctggagtttcttggcgattccgtactgggctttgtcacggcggattacctgtacacgcactatccggagctgcccgagggcgagctgaccaagctgcgtgcggcggtcgtgtgtgagggtgcgctgtgcgagatcgcgagggaactcggcattccggaggagatccgtctgggtcacggcgaggagaacggcggcggcagaaagcgcccgtccatcctggccgatgcgaccgaggcgcttctgggcgcgatctatctggacggcggcatcgagccggcgcgcgcgttcgtgctgcgcttcatcccgcacaaggtagacgtcgccattgcgggcggcgcgttcaaggactacaagaccatgctccaggagatcgtgcagaagaacaagcaggaaacgctggagtaccggctcgccggtcagtccggcccggatcacgacaagcggtttaccatggagctgctgctcaactccaacgtatttgcctccggcacaggccgaagcaaaaaggaagcggaacagcttgccgccaagaaggctttggaaatcatgggctgctaaggcaacaccgcacaattagagctgcggcgctttgtggaaattttgcacgctgactttgttgcgatttcacggtaatacatcaagtattaccgcaaaaccgcgcctcgtcagcacgcaaaatttacacacaaatcgctcttgtccaattatgcggtattgccctaaaaatttcagaagacaaccaaaccggcaaaccggcacagtgaaaaactgtgccggtttttttattcttttatatatcgcagattttagaaatatgtaccaatcaattttgtttgtttttgtttgactttcgaattgctatttttcaggaaagagtatatgataacagtataaaaatttaattaacctaagagatgattatattgagaaagtggtatcggatatatcaatatcgtctgaccaccaagaggtgtgtaatgaaaaagatcctcatcattgtaatttggcttctgtccttgtgctgtgctttttttgcaggaggttggactaatcaatttgccaaagatcagtacactatgcaagatatcgcgtctatgatgaccacatcatttgggtggacaattcaaagttcaaaagatgttaatgcatatcagatatccctacaagatttttgtgaaatgtacaaccacctaacaaatgaagataattcctcaggtctagccaagtctagcggtaatataaaaggtatagacccgcactttctgcaagaaagcaatatccatatcgctggtgaatcaaagaaagctgtatatgtatatgaatttccgcttgaattcaaaatgcctgaaggtgctcatcttcagagtattgttgcctttactgacggggaaatatgtatgtctgctattcatgtacagctggatctggatattattgatcaagtggataaccgcttaagccatgatgaagtggcagaagcggaactatttccatcaacatggccgctaaatgttgacaagcaagtcgttcatagctggggacaatcttttgataagttgatgaggaaataatcttaatttcaacacaatgattacattcataaaatcccacttgatctcacaaagttcaagtgggatttttcattacaattttgaagttattagtcctctatatctgaaattgggcttggactcggaaaaacatattaacccgaaaagcctgcaatatatcatgggacattcggatatcaacattacgatgaatccgtacgctcacgtttcggttgacagtgttaaatcggaagtggtaaaatattttatctatatcttcgaggtggaacatggttctcaagagcctgatcttacagggcttcaagtcgtttcccgaccgcaccgagatcaagtttctcggcggcatgaccgcgatcgtcggtccgaacggctccggcaaatcgaatatctcggacgcgatccgctgggtgctcggagaacagtcctcgcggtcgctgcgcggcgcgaaaatggaggacgtcatcttcggcggcacggcgaagcgcggtccggtcggctttgccgaggtctcgctcatcctcgacaactccgccggtattttccgctcgccgttcgccgagatcatggtcacgcgccgctactaccgctcgggcgagagcgaatacagcctcggcaaaaagcactgccgcctcagggatatccgcgaactgttcatggacaccggtctcggcctcgacggctattccagcatcggacaggggcggatcgatgaaatcctgtcgctcaggagcgaggatcggcgcggcgtattcgaggaagcggccgggatcaccaaattccgcgcccgcaaggaggaggccgagcgccgccttgccgcgaccgaggacaacctcacgcgcattcgcgacctgtatgatgagctggggcggcagctcgagccgcttgaaaaacaggcgaaaaaaacggagaaattccttgttctgcgcgatgaactgcgcgttctcgaggtgtctctgtggctggaacagctcgaacggctgaaaagcgaggcggaaaaacgctcacgcgacgcagaagtctgccgcagacagctggaaaatgcaaaatccgagcaggaaaggcgctatcagcaggcggagcagctgacggctgatctgcatggcatcgaccgcgagaccgaagcgctgcgcacgtcgctgcgcgaggcggagagccgcgaggccgggcaggcgagccgcattgcggtgctgcgtgcaaacctcgaaaactgccgcgcgaacctcgagcgcgtgcacagagagaacgaggagcgcgcaaagcaggcggaaaagctcgcagagcagttttctgcgcaggaaacccgcatcgcagagctggagcagagcagcgcagaggcgcgagagcgccttgcggcgcaggaggacaggctggcgcagcacagggaagcggaaggtgcggcggccgccgcgctggagcgggcggagcaggcccgcgccgcggcgcagaatgaacagcatacgcttgcgctcgagcgcaccgccgcgcagaccggtctggccgggatggacggacagcaggatgatctgcatcgcgcgctcgaaaacgcaggtgaccgcctgaaggctgtacaggaggagcagtccgcattcgaaagccgcgtatccgcagggcaaaccgccctgcggcaggcgcaggcacaggccagcgaggcagacgccgcgctgcggcaggcgaaggcggaggcggacgccctcggcacggcactgcgacaggcagagagcgcgctgaccgacgcgagaaaccgcgcggccatgctgcgcgatatgcagcgcgattacgacggctttgcccggtcggtcagatcggtcatgcagcaggccgggcgcggcaggctttcgggcgtgcacgggccggtctcggcgctcctttcgacggaaaaccgctttgtcatcgcgatagacaccgcgctcggcgcatctgcatcgtcgatcgtggtcggctctgccgaggacggcagggcgtgcatcgaatacctgcgccgtacggacggcggacgggcgacctttctgccgctcgacaccatccgcccggcgtcgctccgagagagcggacttgaccgcgaacgcggctgctgcggtacggcggacacgctggtgcagtttgatgagacatacggcgcggtcgtgcgcagcctgctcgcgcgcacggtcgtgtgcgaaaatatggatgcggcgctggcgatggcgcgttcgcgcggacaccgcttccgcatcgtcaccctcgacggccagatcatccagccgggcggcgcgatgacgggcggctcggcgtcgcgcggaacgggcgcgctggcgcgtgcagggcggctgagggctgccgaagagcaggcggaacgctgtgaagccgcacggaaaacggcagagcagcgctttcgagccgcagaaaagcagctgcacgatcgtgaaaccgcgtgcgaaacgcagaatgcagccctgcggcggcaggcggaagcacaggccgcccttgctgccgcgtgtacgcagcaccgggcgctgctcgggagcgcacaggcgcggcaggaagagctgatgcagcagcagcgcagcatggaggccgaaaagcagcgcagcgcggaggtgctcgcgtcgttcgacgcgagggaagcgcaggccggaacgcagctgcgggacgcggaaacgcgcgtgcagacctgccgggacgcgctcgcgcggctccgtaccgaggctgcggagcaggaagcgcagcttgccgggcagcgtaccgcgcttacgcgcacagaggccgagctgtccggtgaaaaacgggcgctcgagcagatgcggacgctcagatgcgagacggacgccggtctttcgggcgcggcggacagcatcaaacgctacgagtgcgagtgcgaacgcatacaggacgagcttgcagaggagaaggcggcgcacgaacggtcggagacgctgacgcgcacgctgcgggagcagctggaacagaccggaaagcgccgcgagcaggtcgaggaacggcggactgccgtgcgccgggacgcacaggatgcaggcgagcagatcctcggcatggagcgcgaggcctcgcgtctggaaaaccgcgcaggacagctgaaggccgaggaggcgcagcttctcggtcggatgtgggaaagctacgagctgacgcccacaccggccgccgcgcttgcgcagccgcttgacgacccggccgccgcacgcgaacgcgcgcacgagctgcgcgggaaaatacgggagctcggcagcgtcaatccggacgcggtggaggaataccgccgggtgcgcgagcgctatgccttcatgggcgagcagaaggacgacctcgagcgggcgcagcgcgagctgtacagggtcatcgaccggctgacggtcaacatgaaggagattttcgcctcggagtttgcccggctgaacgtgctgttcgggcagaccttccgcgagatattcggcggcggccatgcggagcttgcgctcgcggacacgagcgacatcctttcgtgcggcatcgacatccgcgtgtcgcctcccggcaaggcggtcaaaacgatcacgctgctttcgggcggcgaaaaggcgtttgtggccatcacgctgtactttgcgatactcaagctgcgccccgcgccgttctgcgtgctcgacgagatcgaagccgcgctcgacgatgtgaatgtgcagcggtatgcgaaatatatacgaaaattaacagatttcacacaatttattgtaattacgcacagacgtggtacaatggaagaagcagatatgctctatggcgtgaccatgcaggagcagggcgtttcgaagctgcttatgctcaatctcgcagaggcggagaaacggctgaaaaacacgataaaatgacgcaggactgtggggtgtaaagcatggatatgaggagttcaaaatatccgtaccggctggatgtggaaacccggctgccgaacggctgcatcacgacgcacggctacgcggcgcatcatccggcggaattccggcactgggcacacgcacgcggctatgtcctctggggcgagcgcatcgaccgtgtggactgggaaaactggcgcatcaattactacggtatgtaacgcagaccggcaggaacaatcttatagatacaggagcagaacatgggattttttgataagatcaagcagggctttaagaaaacttcggacgcagtgagccattcgctcgacagcgtgttcgcggcgttcgtcaagatcgacgaggatcttctcgaggagctcgaggaagcgctcatcctttcggatgtaggcgcgtcgacctccgcgaagatcgtcgccgaggtggaaaagcgtgcaaagctgcgcaagacaacaacggcctccgagctgcgcgacctgctgcgcgaggtgctgaccgacaacatgcttgacaatcagccgctcgacgtctcgggcaagccagcggtcattctggtcatcggcgtcaacggcgtcggcaagaccacctcgatcggcaagctggcggcacgctatgtcagcgagggcaaaaaggtcatgctgtccgcggcggacacgttccgcgcggcggcggccgaccagctcgagatttgggcgaagcgcgcgggtgcggacatcgtccggcacggcgagggcgcagacccggcggcggtcgtctttgactcgatctcggcggcgaaggcgcgcggcagcgacatcattatcgtcgataccgcaggccgcctgcacaacaaggccaatctgatgaacgagctggcgaaaatcgaccgcgtgatctcgcgcgagctgccggacgcttcgcgcgagacgctgctcgtgctcgacgcgaccaccggacagaacgccgtccatcaggccgaggagttcaacaaggcggccgagctgaccggcatcatccttaccaagctcgacggcaccgccaagggcggtatcgtcatcgccatctcggccggtctcggcgttccggtcaagctcgtcggcgtcggcgagggtatcgacgatctgatcgacttcgaccgcgcggcattcctcgaggccatcctgccgccggcagagcagatgacaggtgacagcgaaaatgaagaagaaggagcggagcaggaatgacaagacctgacggaagagcgaaggacgaaatgcgcccggtcaagctgacgaccggatttaccatgtacgcggagggctcggtgctggctgaaatgggcaacaccaaggtcatctgcacggcttcggtcgaggaaaaggttccgcccttcctcgagggcaagggcctcggctgggtcacggcggagtacgcgatgctgccgcgctcgaccaatacgcgcaaaaagcgcgacatcaagtcgctcaagctggacggccgctcgagcgagatccagcgtctgatcggccgtgcgctgcgcgcggtcgtcgaccgcgaggcgctcggcgagcgtcagatcaccatcgactgcgacgtcattcaggcggacggcggcacgcgctgcgcgtccatcacgggcggctatgcggcgctctatctcgcgtgcagaaagctggtcgacgagggcgtgatcgagaaaatgccgctcaccgcggcggtttcggcggtctcggtcggtatcttcgaggacgaagctgtgctcgacctcaactacgccgaggacagccatgccatcgtggactgtaacgtcgtcatgacctcgaagggcgagttcatcgaggtgcagggcacgggcgaaggccgtccgttcacacggaacgagctggatcagctgctggcgctcggcgagcagggctgctccagactgtgcgagatccagagaagcgtgctcggcgaataaaagaggaaaaccaaacatgaaatttgtactggcatcccataataaaggaaagctgaaggaaatggcggccattctgggcgagctcggcatcgaggtcgcgtctctgcccgagggtgcgcccgagccggaggaaaacggcgcgacgtttgaggaaaacgcgcgcatcaaggcgaaagccgccgcggacttcaccggcctgccggctatcgcggacgacagcggtctgtgcgtggacgcgctcggcggcgcgccgggcatccgctccgcccgctactgcgagggaacggacgcggaccgcaatgcgttcctgctgaagaacatggaagacaaagaggaccgcgcgtgccgctttgtgtgcgcgatcgcgtgcgtgctcgcggacggcgagaccgtcacggtacggggcgaatgcgagggcgagctgctgcacgaaaaccacggcgcaggcggcttcggctacgatccgctgttctatgtgccggagtacgagtgcacgttcggtgagctcgcacccgaggtgaagaaccgcatttcgcaccgcgcgcgtgcactcggcaggctgagagacgtactgaaggataaaatataactgatttcaaggagaaaatacatgattaacaccaaacagcgtgcacagcttcgtgcactggcaaatccgctcgcagtcaccctcatcatcggcaaggagggcgtgaccgaggcggtcgagcgtgagttggacgctctgctcgagtcccacgagctggtcaagggcaaggtgctcgagagcgcgatgctcacgccgcgcacggtatccgaggcgctctgcgaggcgaccggcgcggatgccgtacagtgcatcggctcgaagttcgttgtctaccgtcagtcgagcgacgaggacaagcgcaagatcgttcttgtaaaatgaggacaggcatactcggcggaacgttcaatccgccgcatctcggccatctgcacgccgcagagctggcgcatgatgcgctgaggctcgaccgggtgctgttcatcccgaccaaccttccgccgcacaaggcgctgccggaaaacacggcctcgcccgaggcgcggtgtgaaatggtgcgccgcctgacggcggacaggccgtgggcgcagctggatacgctcgagatcgaccgcggcggcgcgagctacacggtggacacgctgcgcgcgctgcacgggcgcggcgagaccgacctctatctgatcgtcggaacggatatgctgctttcgtttgaccgaagctggcgcgcgccggacgaaatcgcgcgtctggcgacgctcgccgtgtgcgcacgggaaaacgaggactgggacgcgctgcgcgaaaaggcggcgcagctgcgcgaaacgctgggcgcgaggatcgagctcgtcccgggcgacagtctcacggtctcctcgaccgagctgcggcagggcggcgacctgcaccgcttcaccgcgcctgcggtcgcggattatatcgagcgggagcacctttacgggttctgaacgccgcgcaatagaaaaacgcggtgtttgaaatacataattcaacctcaactacacagaaaggcgggcaaaaattatgttatgtgacgagaaaatgcgcagagatatcctttcgaggctccatggctaccgctatgagcactctctcggggtggaacgctgcgcgatcgccctggcgaagaaatacggcggcgacccggagcttgccggagccgcaggcatccttcatgacataacaaaacatctttctccgcaggaacagttgaatttatgtgagaaatacggtataataccgtgtaccgtcgaaaaaagcgagccgaaaatgctgcacggaaaaacggccgcagcgatcgcacgcagagaatatcacatgccagacgaggtatgcgacgccatcgcctgccatacgaccggcagggcgaagatgaccattctggacaaaattctctatctggcggactacatagaggagacacgcgattttcccggcgtcgaaaaggcgcgggagctggccgagaccagcatagaccgtgcgctgctctactgttatgaccaaacgttgatcgagctgatcacgcgaggcaagctgatccacagcgacaccatcgccgcatacaatgatatgatccggcagggagtacgctggcgcgacgaggagagggcttgagagacagaaaagccttcccggaactgaactggaggcaggaaccgtttgaaacttttcggaggcagcggcgagcataacggccgctcggacagacagacaaaaaaacgaccggccgcggcgcagagcggcgtgaaagcgcagactgcgcccaagcctcaggggaaaaagggcggccggacagccgcaccgaagaagcacagcaaaaaacgcatcgcggcgatcgtgatcgcggtgctcatcgcgcttttgtgcgcgtgcggcgcggcgtactatgtgttctttgtgcgcccgccaacagacacgatccacgacaagaccaacggcgaccgcgtcgatacgagcagcctgctcaatcagggcacgcgcatcgacgatgtgttcacctttgtcgtcggcgcggtcgatgaggaccagacgcgcacggacgcgctgatggtcgcgaccatgaacaccaaggacaagaccatcaacattatgaatattccgcgcgataccatgtgcaacaacggcgaaagcggcgcgtggcgcaagatcaacgcggcctacgccaccaagaagggcatcgagcagaccaaggtcgagatcgagcgcctgatgggctttcagccggataagtacgtcatcgtcaacttcgagggcatcgcggccatcgtggacgcgatcggcggcgtggattatgacgttccgttccgcatggaatatcacgacccctcgcagcacctcgacatcgaccttcagccgggcatgcagcatctgaccggcaagcagaccgtcgagttcctgcgctggcgccacaacaacgactactccaagcagtatgtcaacggcgacgagggccgcgtggaaaatcagcagaaattcctcaaggagctggcgcgacaggtccttcaggtcaagaatgcgaccaaaatcccgaaaatcgccgaggcggtatccaagaacgtaaagaccgatttcacgactggcgagctgctctggatgggcaagcaggcgcttcagatcgacaacgcaaacctcaagttcttcactctgccgggctacggcgcgatgagctacgcgggcagcgacccgtacaagtattccttcttcttcccgaagctgaaggaaacgctcgagctcgtcaacaagtatttcaacccctatggggagccgatcaccacgctcgacatggttaccggtccggcggagagctcgtcctccggttacagcggcggcgtcagcgccggcgaggatgaggatgtctggggcgacaccggcggcggctactattatgaggacgattcggattattcgggcggcgagagcggcggagactactcgggcggcggcgagagcggctacgaagagccggataacagcggcggagattactcgagcggcgcagccggcggcggtgagaccggcggcgaaggcggcggtgaatccggcggcgagagcggcggatcgatctcgggcggcgaaaccggcggcggtgagaccggcggcgactattcgggcggcgagaccggcggtgagaccggcggcgaaggcggcggcacggtagatcccgaggcgtgatccgtaaagaaagaaaaacggcggccgcagagacgatctgtggctccccgacaggatacaggcgcggcgcgcgccatgaaaaggagtttatgaatttgactgcacaagaaactgtaaaggcgatctgtgaagcgctgatcgagaaaaaagcgcagggcatcgaggtcctgcacgttgagcgcctgaccgagctgaccgaatatttcgtcatctgctccgcgacctcgaccacgcaggtcaaggcgctggcagataacgtagagtggcatctcaagtatgatcacgacgtcatggtcgaccacaccgagggctatgagtctgcgcagtggatgctgctcgactacggctgcgctgtgctgcacgtattcatgccggaggcacgcaagttctacaatctggagaacctgtggaaggacggcacgccggtatcgctcgaggagctcggcatcgaggataagtaaaaaatcgacaggcggcggcgcgcatagaccgtgtccgccgcattgtcgcgcttttatataaaacactttagggggaaaatccgttgaagtacgatcataaacaagtagaaaagaagtggcaggacatctgggacgagaagcagtgctttcaggccgagaacggctcggacaaggaaaagttctatgcactggtcgagttcccgtacccgtccggtcagggcctgcatgtcggtcatccgcgctcctacaccgcgctcgacatcgttgcgcgcaaaaagcgcatgcagggctataacgtgctgtatccgatgggctgggacgctttcggcctgccgaccgagaacttcgccatcaagaaccacgtgcatccggctgaggtcaccaagaagaacatcgcacgcttcaagagccagctgaagagcctcggcctgtcgttcgactggtcgcgcgagatcaacaccaccgacccgagctattacaagtggactcagtggatcttcctgcagctgttcaagaagggcctcgcctacaagaaggaaatgagcgtaaactggtgcacctcctgcaagtgcgttctggcgaacgaagaggtcgtcaacggcgtctgcgagcgctgcggcagcgaggtcgttcacaagaccaagagccagtggatgctcgccatcaccaagtacgcacagcgcctgatcgacgatctggacgacgtcgattacattgagcgcgtcaagattcagcagaagaactggatcggccgatccaccggcgctgaggtagattttaagaccaccgagggcgacaccctgaccgtttacaccacccgtccggacaccctgttcggcgcgacctacatggtcatctctccggagcacccgatgatcgagcagtggggcgacaagctcgcaaacatcgccgacgtccgcgcttaccgcgaggaagcggcccgcaagtccgacttcgagcgcaccgagctgaacaaggacaagaccggcgtcaagctggcgggcgttgccgcaatcaacccggtaaacggcaaggaaatcccgattttcgtttccgactacgttctgatgggctacggcaccggcgctatcatggccgttccggcgcacgatgaccgcgactgggagttcgctaagaagttcggctgcgagatcatcgaggtcgtttccggcggtgaggacgtgcagaaggctgcgttcaccgcaaaggacgagaccggcattctggtcaactccgacttcctgaacggcaagaccgtcaaggacgcgatcccggcaatgatcgagtggctgggcgagaagggcatcggccgcgcaaaggtacagtacaagctgcgcgactgggtattctcccgtcagcgctactggggcgagccgatcccgatcgtcaagtgcgacaagtgcggctacgttccgctgccggaggatcagcttccgctcgagctgccgaacgtgcacacctacgagccgaccgacaacggcgaatccccgcttgcacacatgaccgactgggtcaacaccacctgtccgtgctgcggcggcccggcaaagcgcgagaccgacaccatgccgcagtgggcaggctcgtcgtggtacttcctgcgctacatggacccgcacaacgacaaggcactggcatccaaggaagcgctcgaatactggtcgccggtcgactggtacaacggcggcatggagcataccacgctgcatctgctgtacagccgcttctggcacaagttcctgtatgacatcggcgttgtgccgaccagagagccgtatgcaaagcgcaccagccacggcatgattctcggcgagaacggcgaaaagatgtccaagagccgcggcaacgttgtcaacccggacgaaatcgtagacacctacggcgcagacaccatgcgtctgtatgagatgttcatcggcgacttcgagaaggctgctccgtggagcccgaagtccatcaagggctgccgccgcttcctcgagcgtgtctggtctctggctgaaaaggtacaggacggcgacgagtattccaaggagcacgaggcgctcatgcaccgcaccatcaagaaggtcggcgaggacgcggacaacctcaaggcgaacaccgcgatcgcagcgctcatgaccatgctcaacgagttctacgacaagggcgtaaaccgtgccgagtacaagaccttcctcgcgctgctcaatccgtttgctccgcacatcaccgaggagctgtggcagcagctcggcgagaccggactgctttccgtcgcgccgtggccggcatacgacgaggcaaagacggtcgagagcacggtcgagatggcggtacaggtaaacggcaagctcaagggcactatcaagctcgcagccgacgccgacaagcaggcggccatcgacgctgcactggccgaggaaaaggttcagcacgccatcgagggcaagcagatcgtcaagcagatcgttgtcccgggcaagatcgtaaacctggtcgtaaaataaaaaacgcaaaatctgctcgttcgtgaaagatttttgttgacacggacgggaaaaacagatataatattcttacggttttatgtgcctgtggcagatgaagctgtgcaaagcgtcctccatagaggaacgcgcggagggagggaaaactgtgtcggagatccgcatcaaggaaaatgaatctattgacagcgcactgcgtcgtttcaagcgttcgtgtgcaaaggcgggtacgctttccgagctccgtaagcgtgagcattatgaaagcccgagcgtcaagcgccgcaagaagtctgaggctgcacgcgctaagaagaagaagttccgctaaaatagaatttccagagagcagatgctatgcatctgctcttttcttatgcgcggcgggcggagccgccgctgtccagggg

SEQ ID NO: 12924 - DNA, 3805 bp, Unknown
  gut microbiota DNA sequence
ggtgttctatgagtgatttccaaaaatatttagatgaagcattctctaaaataaatacttctgatttttctgattctgaagaagatcttccgcgcgatgatgtttataaagaaattcagcagctgattgtcagcgaaagaaaaaaacaaaaggtaacacagaaagaactggcgcacagaactggtttgtcacaggctaatatcagcaatatagaaaatggtgtaacgcgcccaacgattgattcattacagaagattgcagaagcactgggtaagcgtcttctggtttgctttgaagaaagcgaggatatttgactatgaaaacattaactcagcttcggattgaccattttcgtgggatacgggatttgaatatagagcatttgacttcaatcaatgtaattgtgggtgacaataactgcggcaagaccagcgtaatggaagctattcagtttctacgctcgggaagtcctgcaaatatttacaacattgccagactgcgtgatcgcacgttgaccttttttctaattcgctgtatgacagctttatttgtatgtttcccaaagacgatgataaattgcaaatcaaactttcgggagagtatgacagtcagcctgtttcctatgtgcttttgggaaccgagtcaaaagagctgatagacctaaatgagctggatcgtatagcacgcagagaatttgcagaagcaaatggagaaacggaaaccgatgtttttgatggcagctcggtttatatgatcggtgaacagacattaacggaaagtattcgattgaaccgattgactcgcgtgaccggtacattaattcggctgaaaccgcagatcaagatcagttatgtatcgccatttgagcatcttaacgggaatattgtaaacagaattataaaaaatgatgcttataagttaatctgtctgaatgcgctgcaattgtttgatccggaaatagaagatataatgattttcagaagtgatgtcagcaatcgaccggtagagtatctgaagcataaacggcttggcaatatgccgctgtctacgtatggcgatggcataaaaaaagttcttgtattggcgaatgcgatcattggagcgactgacggaattttactgattgatgagattgaaaccgcaatccacagaaaatattataatgatatttttcgttttattgtcaaggcttgccgcacatttaatgtgcaggtctttattacaacccacagcatcgaagcaattgacggtttacttgctacacaggattatgatatccagtcaaaagaagatgctattaccgttgtcacattaagaagagaaaaccataagacatattctcgcgtccttcaggggcgagaggtctttaaaaacagggaagcgttcggcttcgaggtgcgtctatgaataaactgattctttgtgaaggcgcaaccgatgcaatcttgctcagctactatctggaacgaacagcaggatggaagtttgttcgtcaaccgccgcagggcgtatccattcgagcaacagaacaaaatgaagaagtcacatggtataaaaagaacaacgactatctgttgatctgtgcagtaggcggaaaagataatttcgggaaattctttgacgataaaattcaaaaaccgctcgttatgtcagatgcctttgagaagatcgccattgtagccgatcgagataacagagaggtcagtgaaatcgaaacagaagcatccgcttttctgaaagtaccgtgtggcaccattaaaaacaatcagtggaacgattgcagttatacgaacgagtttagaatggaaaaaactttttcggcgttgctggtcgtcattccacaggagcagcagggcgcattggaaaccgcaatgcttgcagccattgctgaagatccatatgataagagcattgtcgagaaaacaggagcgttcgcttctcgaatgcgtgaagaagcatcacgatatatttcaacggatcgtttgaaactgaaggcgcacctgggatcgacatgggctgtacagtatccggaaaaagtcttttccctaattgacgaacagatcagaaatgtgaagcgggaagagtcggaaacgctgcggttgtgctttgcgtctctggtggaaatttaaggcggaatatttcttttaagggcagtagtatcacgctgggaagataaagtatcagtttacccgttttgtatgaacgggtaaactgataacctatgaaaatagcaggttatctttgtgggaaatgcttgcctttcaagcggaaatatcgtataatatatatgtaaagtctgtcttagctcacttggtgagtattgtctcttttcactcccttgcaggagtattgtacccaaaattaaatgttcaagacctttatcagatgcgttctgataaaggtctttttatatatagattcgcccataaaaaagtttctcgatctctaaaaagaaaggaagtatccgaacagcatgcgtaaaagaataactcctaaacatctctaaaacactaagaaaaataataaaaaaagagcgcccggtacgccgtaaaagtaccggtgagatagcgactcaacgctatctcgacagctaaaaagaacagtaagaatttaataaaacagatcagcttggaagcgctgaaaaaagaagcttcccgtcgtgcataagacgctaagagtgcccaaggtcgtgcataagacctcgctcaaagagcaaaaaagagtgcatgcccgatgattttttcagagggcgacttatgttttaacatcaaaagtgagatacagtaagggaaatttttatatgggacacaagaaaaaagacggaaggaatagccgtacattgcaccagcaggcatatgacaaactgcaaaaaatgcaggcatttggcgacagcaaacgcctcgataagctcgaaaatccagaggattttgcaagaaaaatttacagcttttcgacctaccagacatactttaagcacataaaatactttatcaaatggctgcaaagggaacatcccgaagtaaaaacgctgagaaaagccgaaaaatttgtgccggaatggctgcaaacccgcgtggataaaggcctttctgcatggacggttcaaaccgaagaggatgctttgaataagctgtaccagataaaattggacgatgaaaatcgctttcagccgccgagaagattaaaggaaaatatcacgcgcagccgcggaaccaagaagcgcgacgcgcatttttcagagaaagcaaatgaagagttagtcaatttctgcaaggcctgcggcttccgccgcaatgtgctggaacggctgacgggcagtgacttatacgaccgcacaaaggccgaaacggcattcgctgaagcgcaggaagcaggtaatgaagcgcttgcggaagcactgcttgtgggtttgaaaaccttcccggagcaggattactttatcctgcatcgccgcgacaaaggcgggaaaacgcgcctatctcccatcgtcgggccgcacatagatgcggtcgttcggcgcatgaaagccacgccgccgagcgaaaaagtgtggcagtatgtcagctcaaattgcgatgtccatggctatcgcgcggattacgcaacgttcctttataagcagtacgcgcgcccaatcgaacagctggattaccataaaaagatacgctgttccgacggaaaataccgctccgaaatttatatctgccgcgggagtgagcgcagaaaacgccttgaccgccgtgcggtcggcatcatcagcatcgcgctcggccacagtcgcgaggacaccgcgattacaaattat

SEQ ID NO: 12925 - DNA, 3912 bp, Unknown
  gut microbiota DNA sequence
acacaccgccttctgctcataccacgagagcaccagagacaggggcaggtcgttgaccccgcagccaaaggcatccgccaaggccagcgcgattttgacagcaccgtaagcgtcgttgcactggcctacatccatgagtcgaggcaggccgccaatggttccgagatccaggtcattgaagcggaatttgccgcaggccagcgtcagcaccacggtatcggcgggcgtctgctcgacaaactcagtatagtagttccgtccgggacgggctccgtcacagccgccgaccaggaaaaagtgccggatggcgccgctctttaccgcctcgatcacctgatccgccacgccaagcaccgcgccatggccgaagccggtcgtgaccgtgccgccgccgttgatgccggtgaacgacttatcctcgttgtagccgccaagctccaatgccttttcgatgacaggggtgaagtccttatcctcgccgatgtgcgtcatttccgggtaggataccaccgctgtggtgaacacgcggtcggcgtagcttgctttcggcggcatcaggcagttggtggtaaacagcaccggtgcagggatgtcggcaaattctctttgctgattctgccacgccgtgccgaagttgcccttgagatgggcatattttttcagttcaggataaccgtgggcaggcagcatttcgccatgggtgtagatgttgacgcctttgccctcagtctgctccagcagcagcttcaggtcgtggaggtcgtggcctgtgatgacgatgaacggccccttctccaccgtcagcgggacagtggcaggcgcgggcgtaccgtagctttcggtgttggccttatccagcagcgccatacacttgaggtttttctcgcccacctccatgacgatgggcagcagcgcatccatgccccagtcctcgcccacggcaaaaagagccttggcgaaaaagcggtttacttcctcatcggtatagcccagtaccatggcgtgatgggcatacgccgacataccacgcacgccgaaaaggatcagagatttgaggctgcgaatatcctcctgcgcgttccagagcaggttcatatcataatcatcattccgcccacagcgagagctggagccttttggtgccaaccgttccctttccgcgtgtactcgattgatcagctcgcggattgtcttttcgttgaagttcacattggttacggtggtgaacaatccctcgatcatcagccgccatgtatcggcattgaccggtgtatcgccgtccgtggctcttgccagtccaatgagcgcgcccgtcagctcgtcctgaagctccgctacatcggcggtcttaccgcagacaccagccttaccggtacagccggtacaacccgctgtctgctcgcactgaaagcaaaacattttatgatccattatcgttttcctcctatttcggttcaaattatgtccttttatcagaagctcacgcctcctcgaagaactcctttttctgatgattttgttattcttccaccagccggccgtccaccatggcgatggcgccctcgtgacaggcggcggcacaggtgccgcagccgttgcatttatcttgatccatttcaatgattctccgcttcatcgcaatatctccttgcttttgtggtttgattataatagaatgaaagcaacaagtcggttgaattttcaacgaaagaggatttttatgaaaaaatttttcccggtacttcatacggcggcgcttttctccggcatttctgacgaggagcttgccgccatgctctcctgccttggcgcaaggctcgacacctttcccaaaggctcccgcctgctccgcgccggtgatacggtggaggaggtcggcctcgtgctaacaggcagcgccctcatcgtgcaggaggacatctgggggaaccgcaatattctctccaaggccggaccggggcagaccttcgcggaggtgttcgcctgcgcgccgggggcagtgctgaacgtgagcgtggaggcggagagcgcggtgacggtgatgtttttgcggataaagcacatcttgagcgtgtgcccctccgcctgctcccaccacagccggatcattcgcaatctgctgggtgagctggcggagaagaacctgcggctcaacgaaaagctcacccacatgggtcagcgcacgacgcgcgcaaagctgatgtcctatttttccgccgaggcgcagcggcgcggcggctatgagttcgacattccgttttcaagacagcagcttgcggattatcttggtgtggagcgcagcgggctgtcgctggagcttggaaaaatgcgggatgaggggctgctcgactttcacaaaagccattttcttctcaaaacgccggagtcggacagcgtcagctcgtacaatctgatttgaaaatacccacagccgctttggctgtgggtattttctgtttgagctctaaaagctttgcagaacgcaaggagcctaatgccaaattcagcatgtcaccaactatgaggaaaacatcttttagagaaaggtcaaaaggttcggcaaggaagatgaaccgcatccctttgcgataccgtttccgaaagattacagcttcgccccttaacaaagactttaagttaaatctgttatactgcagcagtcccctcaaaaatacagacaggagaaaaaattgacctatgatgaaaaaaagatatttcgctattcccattcttgcaatcgcactgcattttttgctgtccaacctgttgtatttccttgtggaaagacttgttttggatgtttttcatatctccccacagcaatttatgaaatactcatactggggcgagattctgatttacgtcgtccttatcctcgtattcttcaccctctataaactgttttggagaaaagagatcagcgaaccgcgcgcagcgacaaatttcaaagatgtgctcggcagtctggtcgtgggatttggcctttgcggaatctccggtctttggatcatgctggcagagcagcttccctcgcttcaaagaagcgttgaggcaatgaacgccggtgctgaaaatattgccggcggaaatgcgtttggaacatttatgattgcggtgatcgctgcacctgttgtagaagaaattctattccgcggcattgtgcttcgctccatacggaaatttgcccccggttggggcgcgattctaatatcatccgtactcttcggcgtttatcacctgaatatcgttcaggctgtctatgccacccttatgggcattgccgcaggagtcctttacgagaagaaaaggaacctgctgtttcccatcctcgtgcatttcgcaaacaacctcattactatgctgcaaggctttgcgccatccgaagtgaatgaactgatcagcatttttattctgatcatgatcgctccggcagggtatatcgcctgccgttcactccgacaggacagaagagcagatagcatgtaaggggtttatacaatgtgtaaagcatacagcggcacagagcaaactctctatgccgcctcagcctgtagaaaaagtctgtcttagcaatcacgccaaggcaggctttttcgtgctggcagacacctgatactgccaatgttccggcagaatcgtaagatcatcatacctccacttggcatacttttcgtcataggcttccggctgggaaagtttcaccaaatgccccacacaccagctgacaaggtagccattgccctccatataaccgtcccctcgctgatttgcgtcgagcaccttcgagagactcatggcaaccgagggcttttccgctaatacaagcttcattcgatactgctcctttcgcaaaaaaattagcagccaggcaccgaagcgcatgactgctatgtaaggaactgtattctgttt

SEQ ID NO: 12926 - DNA, 1632 bp, Unknown
  gut microbiota DNA sequence
gttaagagggggataagaaaccattcggtgtcttatccccctcttgcccccgccgccgggcggcggcatccccggcctccgaaggcggccaattcccctcggtcgtgggatacggcctctgtcgcctccagcggcgcgccgctgtatcggcggaaaggcttaccctctgctgagggtaaaaaagaaaaggccctgcctcgcggcaggacccttggaaacaaggattacttgttcttattcttgatgtactcatccatcgcggcagcggcgcgcttgcctgcgcccattgcgaggatgacggtagccgcgccggtaacggcgtcgccgccggcaaaaacaccgtccttggaggtgatgccgtgctcatcgtcagccacgatgcagcccttgcggttggtttccagaccaggggtggtgtggcggatgagcgggttcgggctggtgccgatcgccgcgataacgcagtcgaggtcgatgacgaactcgctgccctcgaccgggatcggacggcggcggccggaggcatccggctcaccgagctccatctgctggcacttgaggccggttacgttgaagttctcgtcggacagcacctcgagcggcgcggtcaggaacttgaacacaacgccctcttccttcgcgtggtgaatctcctcgagacgagccggaagctccttctcggaacggcggtacacgatgtaaacctcgtctgcacccatgcgctttgcgcagcgggcagcgtccatggctacgttgccgccgccgacaacagcgactttcttcgcgtggtagatcggggtgtcggaattttccttgtacgccttcatcagattgatgcgggtcaggtactcgttcgccgagtaaacgccgttcgcgttctcgcccggcacgccgataaaggtcggcagaccggcgccggaaccgacgaaaattgcctcaaaaccgtcgccgaacagctcgtcgatggtctcggagcggccgacaacgaagttgagaatgaactctacgcccagatccttcagcgtgtcgatctccttctgcacgatggccttcgggagacggaactccggaatgccgtacatcagaacgccgcctgcggtgtgcagcgcctcgaatacggtaacctcgtaacccaggcgagcgaggtcgccggcgcaggtcagacccgccgggcctgcaccaacgatggcaaccttgtgaccgttggattccggctttactgccttctcggtgctgttttcgcgcgcgtagtcggcaacaaagcgctccagacggccgatggctaccggctcgcccttgatgccgcggacacagtgacactcgcactggctctcctgcgggcagacacggccgcagacagccggcagtgcggaggtttccttgatcttcgcagccgcttcgaggaacttgccctcagcgaccagcgcgatgaactccgggatcttgacctgtaccggacagccggtcatgcagggcttgttcttgcagttcaggcagcgctgcgcttcctcgaccgccatttcagcggtgtagccgagcgttacctcttcaaaattcttattgcggacgtccggcgcctgctcgggcatcgggcactttttcggattcatattcggcatgattacttgacct

SEQ ID NO: 12927 - DNA, 15628 bp, Unknown
  gut microbiota DNA sequence
cttggtctcgccgccgacggtcagacggcagccgccgcacatgccggtgccgtctaccatgatggtgttcatggaaacgatggtcttgatgccgtagggacgggtggtctcgcagacgaacttcatcatgatcatcgggccgatcgcgatgacggcatcgtactgattgcccgcgtcgatcagctccttgagcacctgcgtaaccagcgccttgcgaccgttcgagccgtcgtcggtcacgatgtgcaggttggtgcaggcgttcttcatctcgtcctcgaggatgatgatgtccttggagcggaagccggcgatgaggtcgacctcgacgcccatttcgtgcagcttcttggcctgcggatacgcgatcgcacagcccagaccgccgccgacgacagcaacctttttgaagccgtcgaactcgctctccttgccgagcggaccgacgaaatcgtgcaggcagtcgccctcgttcagcgcgccgagcgcctgcgtggtcgcgccgacctcctggaaaatgatcgtgacggaacccttttcacggtcaaaatctgcgatcgtgagcggaatacgctcgccttctgcgctgacacgcaggatgatgaactgacccggctctgccttgcgggcaacgtgcggtgcgtggatgaccatcagcttggtgttcacgttcagcgtttgctttttcaaaatctgatacactcttaaagaacctccttcgattgtcgcatcgaaccattttattatactgtatattgcgcgcaaagcgcaagggaaaatgcaacatttttcgaggaaaaacgagactcccggttggcgcacctgccgatatgccgcatggtgtaaatggttttctgctttatctgaagcagatggcagagtctccgccaatacagcggtgcgccgctggaggcgagatttacgctcaaggtgagcgtgtgcagtggccgccgtcggcggccgggggtgccggtgttcaccggcgggaacaaaaggggacaggacaccaagtatggtttcctgtcccctcttgactccccagaccttcctttgcgctgacacatcagagatgtgcagcgaaacgggagttacgagagctcggttccgtgcgtcgggcagattttgggacgctataaggctctgaggtcagcttgcgtaaaccgccgcgcataacagtgcgcggccagacagtgcagggcgcaaacgccgtcgctgcgaaaagctccgcttccatcaagggtgtacccttggagcagcaaacgcccctgtgggcccctcgcttttagacgcgcgaccgaagggagtcgcgtccgaaggaaaggttggggagtcaagaggggcagggaaaccttggtgtccctgccccttttgtctccgccgggagaccccggccatccccctccgaccgtggaatatggccgatctcgcctgcggcggcagaccgtcggaacggcggaaaggcataccctctgctgagaggaaaagtgaaaagaggcggcagctgttctggcggcaatggcgtttctcgctttatctgacaaaaaaactgcctcggaggcgccttttttcgctgaaatttaggttgcattattaatcatacggctgtataataaaacttgtctgaaggaacggctgcacgaaaaataaatgagccgtaatatttaggaggaaagaccaatgaagaagtttactgctgcaatgctgactatggcactggcaggcacgatgctgaccggctgcggcagcaccgcatctaacaccaccaccgacgacagcgccgctaaggacaacaccgctgcaaccgataccgctgctgaattcaagctggcgaccgacggcaagctgaccatggcgaccaacgcttacttcgagccgtgggagtactacgacggcgagaacatcgtcggcatcgacccggaggttgcgcaggcaatcgcggacaagctcggccttgagcttgagatcatggatatggacttcgactccatcgtcaccgctgtatccgctggcaaggctgacatgggcatggccggcatgaccgttaccgaggagcgtcagaagaacgttgacttctcgcagacctacgcaagcgcggttcaggccatcatcgttccggacggctccgacatcaagaccgcggacgacatggaaggcaagaagattggcgttatgcagggctttaccggcgacctctcctgcaccgagcagttcggcgaggacgcagttgtccgcttcaataagagcgctgaggcagtcatggctctgacccagggcaagatcgactgcatcgttatcgacaacgagccggctaagaagatcatcgaggcgaacagcggcctgaccatcctggacagcaagtactctcaggaggactacgctatcgctttcgcaaagggcaacgacggcctgcgcgacgcggttgacgctgcactgggcgagctgatcagcgacggcaccgttgagcagatcatgaacaagtacattgttgcagactgatttccgatagaaaatcatctgccggcggggacggtctgaacggccgccccctctgcgtatttttacaaggataagggaaaaggaggaaggctgacattggaattcctgacatggctccaggagcagtgctaccagactttcatcgaagatgaccgctggagaatttatttcctcaagggtctgggcacaaccttcaaaattacaatcggcgcactgatcctcggcgtgatcatcggtatcattatcgcggtcgtgcgttcggcatatgactcgcagcgccgccgctggcacggtgtgggcggtatcctgctcggtctgggcaatctgctgtgcaagctgtatctgacggttatccgcggtacgccgagcaccgtacagcttctgatcatgtacttcatcatcttcggctcttcgcagaacatgatggcggcggcgatcatctcgttcggcgtcaactcgggcgcgtacgtggccgaaatcgtgcgctcgggcatcatgtccattccgaagggacagatggaggcgggccgctcgcttggtctgaactacgcgaccacgatgcgctgcatcatcattccgcaggcgatcaagaacatcctgccggcgctcggcaacgagcttatcaccctgctgaaggagacctcgatctgtacggtcatcggcctgatggacctgaccaagggcgctatgatcgttcagagccgtacctacgcgccgtgggtaccgtacctgtcgattgcgattatctatctggtaatcgtgctcattctgaccaagctgcttggtattttagagaggaggctgcgcgaaagtgatcgacgttaaaaatctgcacaaggcgttcggcgaccatgaggttctcaagggcgtcaacgagcatatcgagaagggtgaaaaggtcgttgttatcggcccgtccggctcgggcaagtctactttcctgcgctgtctgaacctgctcgaggagccgacgagcggcgagatcatctttgagggccagaacatcacctcgaagcagaccgacatcaatctggtgcgccgccgcatgggcatggtgttccagcagttcaacctgttcccgcatttgacggtcaaggagaacatcaagctcgctccggtcaagctcaagatcatgggtgacgaggaggcggacaagcgtgcgctcgagctgcttgcgcgcgtcggtctgcctgacaaggcggacagctatccggcgcagctttccggcggtcagcagcagcgaatcgccattgcgcgcgcgctcgcgatgaacccggatgtcatgctgtttgacgagccgacctcggcactcgacccggaaatggtcggcgaggtactggagatcatgaaggagcttgccgacgacggcatgaccatggtcgttgtcacgcatgagatgggctttgcgcgcgaggttgcgacgcgggtgctgtttatggacggcggcaatatcgttgagcagaacgagccgcaccagttctttgcaaatccgcagaacgcgagactcaaggactttctgtcgaaggtcctctaaaaactgccgccgcaggcgaagctttttctgcttcacccgaagcagagggcagaccttccgccgatacagcggctcgccgctggaggcgggaatggctgccgatgggcaagccggacattgccgccgtctggcggcggagacaaaaggggcagggacaccaaggtttccctgcccctcttgactccccaacttttcctttggacgcgactcccttcggtcgcgcgtctaaaagcgaggggcccacagggacgtctggtgctccaagggtcagcgcttgatcgaagcagagcttttcgcagcgacggcgttcgcgccctgcactgtctggccgcgcactgtcatgcgcggcggataacgcaagggaaattcagggcataacagcgtcccgaaatctgcccgacgcacggaactgagccccgtaaccctcgtttcgctgcacatcttcgatgtgtcagcgcaaaggaaggtaaggggagtcaagaggggacaggaaaccatacttggtgtcctgtccccttttgtttccgccggtgagaaccggcgtctccgccgccgaaggcggcaattttcctgagagctttataaaagctctccctgaacagagaccgtgtgcacctgccacggaatcagcttcccgcagttttgcagcgcggttcttaccgcgtgttccagtccgccgcagcacggcacctccatgcgcacgatggtgacgctcttaatatcgtttcggcgcaggatctcggtcagtttttcgctgtaatccaccggatcgagcttgggacagccgacaagcgcgatgcggttccggatgaaatccctatggaaatccgcataggcgtaggccgtgcagtcggccgcgacgagcaggtttgcaccgtcgaaatacggcgcgttcacgggcacgagctgaatttgcaccggccactggcgcagctcggagaccgcgggagcgaaggacgccggggagggggtgcgcggcgcaaacgcctgtgcacggctgcccggacagccggaatgcgtcgcgctctgcgcttttttcatgttctcctgcacggctttttcatcgtatgccgccgcttcgcgttcgataaagcggatcgcgcccgtcgggcagaccggcaggcagtttccgagaccgtcgcagtagtcgtcgcgcagaagctgcgccttgccgtcgaccatgccgatcgcgccctcgtggcaggccgatgcacacagaccgcagccgttgcatttttctctgtcgatttcaatgatctttcgtaccatgctgtattcctccatctatcaaatgtgtgttttctgcttgactttgtgaatacagcttactatactttgtttagaatgtctgttgccacggcaacgaaacgaaaattttttctgcgataaacgggaggaaaccagaatggatttcaaacgatatattcatgcgcacagcgacgagctgcttgcgtctcttgcggcgctcgtgcgcattccgagcgtggagggcgagccggaggagggcgctccgttcggtaaggagccggcgcgctgcctgcacgaaatgctcgctctgtgtgaaaaactcggttttccgacggaaaacatggatgaccgtgtcggctggtgcgagtacggcgagggagaagagatggtcgcggtgctgggtcatcttgatgtggttccggccggcgacggctggacggagagcgagccgttttcgggtgagatcaaaaacggccgcatctacggccgcggcacgatggacgacaaggggccgatggtcgcggcggtctacgcgctcaaggcgctcaaggagagcggctttcagccgtcccggcgcatccgcgtgatcttcggcacgaacgaggagaccggctgcggcgatatggcgtggtacgcctctcatggcggagaaatgccggtcatgggcttcacaccggacggcgaatatccgctcatcaacggcgaaaagggcatcctgaacggcacgtacacgcgcacgctgcatcagacaggcgattatattctgacgcgctttgagggcggcgaggcgagcaacatctccccggcgtatgctgtggcggaggtgaaatgtccggcggaggcggcctcgaagatcgcggcggaaaaggtgacggtgacgccgatcgacggcggtatccgcgtggaggcggagggcgtcgcggtgcacggctcgacgccggagcttggcgaaaacgcgatcggacggctcgccatggcgctcgcgcagctgccgttcacgggcgagaccggagagtgcctcgcgttcgtctctgaacgtctcggcatggaaacgcacggcgagtcgctcggtctggcgatgcgcgacggcatttccggtgatctgacgatgaatgtcggcgtggcatcgttcgaaaacgaggcgctgtccctcacgttcagcgttcgctatccggtgacgctgccgtatgagctggtctatccgagactgaagcgcggcttcacgctcggcggcttcaccgaaacggagatgacgcacgcggcggcgctgtatatcccgaaggacagcgagctcattcgccgcctgctcggcgtgtatgaggcggagaccggcgaaaaggctgagccgaagtgcatcggcggcggcacctatgcgaagtccatgccgaatatcgtggcgttcggcccgatcttccccggggacgaggtgcgcgagcacaagccggatgaatacatggagacgcgccgcgttatgcagaacgcggagatcatcgcatcggcgatgaaggcgctcgcagagtgaaaatatagggcaggaaaaaacggagagcacaggtttcagtctgtgctctccgttttttgtgtctgatttatttaatgcacgaggtgtgcggcgtgtagccttccttttcaagctcggcctgcgttccggtgaagtccctgcggtttttctccgacatcttgcccacggcggagcagctcgggtcgtggtacttcttcgagctggtgttcagtacgtaatgcgccgatgcggtatcgacagcggcggtgctgctgtccgtctgagcgtcccggtcgctcagatggtttgtgccgtctgcgtagtcgatggtgacgcccggctgcacgttgtagcagaacacgttgaagcagatgccgtcaccgtcatcctcgaccgagtacgcctccatctgaacgccctgagcgacgagatcgtcgccgctgaaaaccggggtgacacggtacatgacatggctgccggtttccttgatgtagtccgcgaccatgttctcgaagggaagcatgccgtcaacattcatgtagcgcgtgccggtgatgagattgctgcggttcgcattttcggcggtcagctgccagccgatgagatgacagcggttgtacaggtactttccgtcgacaaagtcatactttgccgtgacccatccggacggcttgacatcgctgatcgagccgcgcttttcgccgtccgccggcatcagatcggtcgagatgcaggcataggccacgccgcagcggccgaggctgtcgagcggcgcatagctttcgaacgagcttgttgtaagctcggatgcggtaaaggacggctgattgtcgtcgatcacgacatagggttcgccgctgaacgccgggatgtcatcgagtgatgcggctgtttccgaggcggtcgatgtgctgccggactgggagccggaagggcccggcgcaggctgagcacagccgccgagcagcagactgagcgttaagacaagcagcgcaagcgtttgcgtcaattttcgcattttacatattcctcctgtgtgatggtggggtgggaggagccttcgaactcggtttcacgcacttttttccagcactccggcacggaaaaatgcaggtcggcaggatagcgccggttccaacggaacaccgtgagatgagaggcaaagctgagatgcggcgtagggtctgcgcactccaaaaagcagaaatcgttcggctgtgcgtgctgcatgaaattgtcttcagcgcagatattcggggcgtttatcccggaaaaaagcgggaaagatgaggtattcatgcgtaaaacgcccttttgcgagagcgcggcgatgtgctcgcagagaatgcggtcgcggctctgacggcggtggttgaacgcgagaccgtccgcgtcatccagacagatgaaaatcgtcataaagcgaagctccttttttatggctctgacaattatagcatattgacaagcaccgcgcaaatgatttggtaaatatgacgaaacgcaaaaaaatattcttacgaaaaggtttgcattctgaaaaatatgcgttataatgtctttagagtaatgaaaagaggcctgcgcgaaaacagcgggcagagaaagaaaccggagaaagagcagaaatgaaagtaacactcaagcagattgcggagcggacaggcgtgtcgatcaacacggtgtccatggtgctgcgcggcatgagcggtatcagcgcgccgacgcgggagcgcgtccgcagggcggcggaggagatgggctaccgacggcagctcaagcctgctgcaaccaagcagagcctgtgtctggtctcggcagagcggcacagacgcgacagctattcctataccgaattcaatcgtatttttatgagctatgcggccgcgcacgaattcagtgtggtcacggctgaggcggagcagttccgcgatgacccggagggcgcacagcggcgcattgaggaggcgggcgtcggcggtatcctgacgctcggcgacatcgacgagacgctgttcagccgcctgcggcggtgcggcctgccaatcgtatcggtcggcgcacgttattaccgcgagccggtctgcaccttcaccgaggacaacgaaatggcggcgcatcaggtcgttcacgcgctgatggagcgcggctttacgcgcatcggcttcgccggaagtccgctgttcagtgcggccttttccgagcggtatttcggctttcggcagtcctgctatcgcgccggtctcgccgtgcaggagggagacgaatggcttgacctgcttccgggcattgacagcgaggagacggaaaacagcatcctgcggcatctggagcagaataaaagcctgccggaggtgtttttctgcggaaatgacctgcttgcggtgacgcttgcaaaggtactgcgacgggcaggcgtgcgcgtgcccgaggatatctcgctcatcggcgtggatttcaatcagctcggtcagcttgccgagccgagacttacgacggtggacatcgggtgcagccggcaggtcgaggccgccgtagagcagcttgcctcgttcattgaaacgggaacctataagccggcgcgcattctgatgccgaccacgctgcggtggggcgacagcgtagcgtataaaaaggcgtattaaaaaggagagcacaggcaaacctgtgctgagactgtcgaaaaacttcgtttttccgacaatctgtgttttgacttcgcaaaacacggacgtccgaaagttcctgtgtggaaactttctccctcttaaagtacgaaaaccgaggtacacgcccccggttttcatgcgcgctgccgcgcgacggctgttcctgcgcaaaaatgaactttatcgatagactgagagcacaggtaaacctgtgctctctgctgtttttttgtgcgctcaaagtatcatcagatgcggctcgctctcgctcagatccctgacgcagacggcgagcctgtaagccttgtccgccggaaaagccagctcgaacagcttgtactgtccctcgatattgccgcagtcgatctgcggacggccgcgccggatgtccacccagaacgagcggagcggcaggtcgagaccgcggccggtcgccttgacaaagctctccttgagtgtccagagacggtaaaagccctcgtctcggcggaactgcggcagactgtccagatagcggatctcctcgcggtggaaaaagcggcttgctacatcgcgccggccctcatcgcagtgctggatgtcgacgccgaccggactgctgctgatggcgcagacggcccattcgcccgaatgcgacaggttgaagtggatgtccggctctttggcgaggtacggcttgccgccctgcgcgatcgcgacctcgagcggatgctccgctttgggaaacaggcgctttaccacatattcaagcagcagcgccgccgcgaagctctgctggcggccctcgccgttcagctggtcgatcgcatagagcctttcctttgtgagcagcacgcgctgcgaaatgttctccgggtcaaaggcggagatttttgtcgcaaaaaccgcagtcatgttcaatatccccctggaaacgggcacattcgtcccgcaaaatcatgaaaggaccgccgtgcggcagtccttccggcaagagatattataacagaacgcccggatcaaatcaagattcccgggcgtttcttgtcattttttgcagcattcggacgagatcctgccgccctccggcggcaggatgatacagatattttatcataaagctggatatttgcatagaaaatatggtggattttggagagggcttcggaaaaaacatcggaaatattcaatatgctcttgacaagttaccaaccggtcactataatgaagttaccgaatggttactctggagggatgacatggcacgggatacaaaaaaccgtatcattgagactgcgctcgcgctgttttcgcagagcggctatcttgcgacctcgatgaacgatatcgcacagcaggtcggccttaccaaggctgcgctgtacaagcatttttcgggcaagcaagagatactggactgcatcgtcgcgcagatggagcgcatggacctggagcgggcgcaggaatacgagatgcccgagaccgaaccggacggcttcgcggaagcctatcagcatattccggttgaacagatctacgcatacagcctcgcgcagtttcgccattggaccgaggaagagttcccggcgcgtttccgcaggatgctgacgctcgagcagtaccgcgacccggaaatggggcggctgtatcgcgattacctcgccggaggcccggtggagtatatggcggcgatctttcggaggatggcggactcggacgcacaggcaatgcagctcgcgctgcggttttatggaccgatgtttctgctgtacagcgtgtatgatgagagtgaggacaggaaaacggtcatcgaggcgctcgatacgcacattcgaacgtttatcgagcagcttgaagcggagaaacgcagacggaaatgaaaggggagagcagagtggaagcgatcgtttacacgacgaataccggaagtgcggcgcagtatgcggaaatgcttgcaaaggagaccggtctcgcggcgtattcactcgatgaagccagggggaaagttccggcagacagcgaggtcatctgtctcggctgggtgatggccggtacggtcaaggggtacgccgcagcggcgaagcggtacatcgtccgcgcggtctgcgcggtgggcatgacgcagccgggcgcgcagggaaaaatcctgcgcgagcggaataagctgccggagagcgtgccgctgttccagctgcaggggaatttcgacgtaaaaaagctgcacggcatgtatcggctgatgatggaggtcatggtcaaaacggcggggaaggcgctcgcggcaaagtccggccgcaccgccgaagaggacgatatgctggacatgatgacaaacggcggcgagcgggtgcgggcggaaaatctgcacgcggtgctcgcatggtacaggaggagatgatgagatgataccggcatggaaaatctatccgagcagtcagagacgcagcacggtctatctgaagaatgtggtgaaaaatccgttcatcgaggtcgaggattatacggtttacgatgatttcgtgaacgatccgcgcgatttcgaacggaataatgtgctgtatcactatccggagtgcaatcatgacaggctgaggatcggcagattctgctcgatcgcgtgcggcgcgaaattcattttcaatgccgccaatcatgcgatggacagtctttcgacctacacgtttccgctgtttttcgaggaatgggatctgccgacggatacggcgtccatcgctgaaacatgggacaggaggggtgacatcgtggtcggaaacgatgtctggatcggctatgaagctatcattctcgccggtgtcaccatcggagacggcgcgatcatcggcagccgcgcggtcgtgacgaaggatgtgccgccgtatacgatcgtcggcggcctgcctgcaaaacccatccgaaagcgtttcgacgaggaaaccatcgcacgcctggaggcgctgcgctggtgggactgggatagagagaagatcaagcggagcattgacgcaatccgccacggcgatatagatacactggaaaagaacgcttaaagcagcaccgcacaatgaaacctgcggcgccctttcgtccaaccgcattgcggccgacgataatccgatgaagctgatgagcatcgccatgcgtccgctgagtgcgccgccgtttcctatcgagcgcatcgaggaaatgacgcgcctcatgggcggtgacggcgagatgaactggtaggaaagacggctcagatgggccggaaaaagacatgaaaacagccggagcagaggataagtctgctccggctgtcacatattcacggcattcgccgatctttttcagctggctgacaggatagaacagaagaacggatgccgctcgctgcaccatccagcccatttcgggggactgcttcccggtcattcttcagcatagagcgtttctcacaaaacagaccgtatgactgttatttttcagaattacagttgcgaattttacgcatcaccgttaaaatagaaagtacatgaaacaggaaagaaaggaagtggcgtcacgatgaagaatagcggcaggtttcgcaaatatgtgccgtccatcctgctgcttctgctgtttgaagcagcagcggtcgtgctgtggctggtcagggacaacctgttctatctgctgaatttcagttacatcggctgctgtctcgcattggggacggcgctgttcgccgccgggaaacgatacgcccggcattttgtgcagctggcggtggggggctacatgctgctgtatctcggcgtgatctcccgcgagaatatgcagatcgagggcttctggtactatctgttcctcggtgtttttgaagcggcgaccatccactatgcggcggctaaaatcttaggtccgctgctgttcgggcgcggctggtgcggctatgcctgctggacggcgatggtgctcgactttttaccttacaggcagctgcagaagccgcgcagggaaaagctgggcgttctgcgctatgtgatgttcgcgttctctctggcgctggtgtccgggctgtttttgatgaaggtcgcagatctggagcagatcatgttctggatgttccttgcgggaaatgcgctttactatatcgcgggcattgcactcgcctttgcgttcaaggataaccgcgcattctgcaaatatctgtgcccgattacggtgtttctcgcgcccgcaagctatttttcgctgctgcgtgtccactgcgatgaaagtaaatgcatccactgcgggaagtgcctgcgtgtctgccccatgaacgtagaggtcaacaaggagtcccgtaaacggaaaaacggaacggagtgcatcctctgctacgagtgtacgaaggtatgtcccacaaaggcgctgcattagaacgaagcagagggaatgccgccgatgattgcgcggagcgtgtcccatgcatcatcagatgcagacgaaggctgagacgggacggcaggcagttgaatttttcatttggttgaggaattgtttgtaatgcacgctcagctcgttactatataacagcatacgatggcagtttgcgcttataaagcgagcgcgttctcgatcttatcaatcaggcctaaatcagccggaagccattccacgcttttcagagtttccttggtcagccatcgtgcctcggccgcctctaacagctcgagatcaccgcgaatcagctgacaccagaagcaatccattgaaagatgaaaggtcggataatcaaattcaacggtatcaatcaattcaccaacagcaatctcggaggccagttcctcccggatttctctttttaaggcttgctgcggcgtttcgccgggttcaatttttccgccggggaactcccacagccccttaaagtcaccgtagccgcgcatggtggcaaagattttttcgccatcgcgaataaccgcggcggcgactcgaattgttttcataaaatgccttccttatccgacgaccagcttgttcgtcttgcgaagatacttcgccgggataggctggtccagatgccatgtaatattcatcggcctgctgccgatgtgcctcacataggctgccgttccgagacaggtatacggtgcagcgccgatgctgtcctgcttgaactcccgcacgaagagaacgaccttgctgccgcgctgccggtggttgatataacgctgaccggtgcttgctgtatcggaggtcgtgctctgactttgccaatggaacaggctttcgttgatcgaatagtcgttgtacatggtggtcggggaatagtccttgtccgccttgttgagcgtgataaagaatacatcgacctgcttgtccggcagccatttgacaccttcccgcacgtttttcggcgtcatgtagtccattgcaatcagaatttgatctctggtataggtgcaatgcaggtccagcggacaatcaaagccaagcgggacaggctgatcgataaagtcaatgttatacaaatctacaacaaagataaagcggatttcaccggagaccagacgctgtctggcttcatttcgttccttatcgctggaattagcggtaagagacatgcagggaataccctttgatagaaaatacgcttccatgaatttagcatgctcgacagagacgcaaaacccaagaccgcgaaccttattgatgtcggttacataccgatagagagaattgacaatatggccggcgcgcttttcggcgacagcacggttcagagaaaacacgttgttaagctcagctttatcataaccgccgcgcgtccagcggatgttggacaggtcaacatcatcggaaacgccgaaatattgaaacgggcaaagcagcttgcgctcgatcgccttcggcagtcggatttcagatgcaatacggccattgaagtaatccagaacgttttttccatccatacgttccggcgttgcggtcagacccaataagattttcggcttgaagtggttcagcagtccttgataggtaggcgctgctgcatgatggaactcgtccacaatgataaaatcgtaatagtcctccgggagaaaatcatacagcttctgagaagctaacgaactgcatttcgcttgtcggattgaccttgccgtttgtcgacagtgcacgctccagtctttccctgcacccgtcctcatagacttcaaagctggcggtgttccaataactatcgaaggttgc

SEQ ID NO: 12928 - DNA, 646 bp, Unknown
  gut microbiota DNA sequence
atcaccatggcttccgccgtggcggcgtgccttgcgctgctcatcggcgtgtccctcgccatgcccggtattgccgcaagcatccagaccggtgattattccggctttgaaactgcggcaagcatctttcacagcggcactgccttgggatacatcgtcatagggctgctggcgtttttactcggcgtttgcgtgaccgttctgtgcttccggctgcggcagatgaaccgggaggacgggcagaacgaggaaagcgaggggatacatggagctgattgagaacctgctgcaactgctggtcacgttcatcggcgcgctgctttcgggtatcgcctgccgcagaagccaccggcagacgtattttctgctgctgtgcttctacggctgctttgcccttggtgcgctctactggacgctgtatctgctgctgttcgataccacgccgcgggtcttttatgtctcggagttcggctgggtggccagcgtgatcttcctgcgcattttgcaggccacgctcaccagtcaggacgagcgcagtttccgctgccgcagggcatggcttgcgcctgcgttcggccttccgctgctggcgttctactgcaccttcggggatattctctccaatctgatctggtgcggcatgatg

SEQ ID NO: 12929 - DNA, 576 bp, Unknown
  gut microbiota DNA sequence
cccttcgccgtacttgtcggcgaaccgcttccggccgcttttcttgagccgaccgtagaactgctgcaggtcgttctgtgtcagcttattcagcgggatgtccccaatctccgggatgatatgcaggcggatgcggctctcgtaggtttcctgcgtagttgggcggatcttaggcttggagtgattctcataccagtatgtcagccagtccccgaagggcatctcaggccgcaccttctccggcttcagtccgccacactcctccttgagcttttggagcttctcgatgcaatccttcttcgttttagcgagaacatttttcgtcttgggatagccgttatcgtcatagccgatgacgacgcggccttcccaccgaccatccttgcgctgccttacggttccgtcgccggcttttcgctttcttgccacggtttcaactcctttccgaagatgtcttccatgaagctgcccacgatgccagaggctgtcttctgcatatcggaggtgacatgggtgtaggtgtccagcgtgaaggaggcgttggtgtggcccaggataccggacagggttttggcg

SEQ ID NO: 12930 - DNA, 306 bp, Unknown
  gut microbiota DNA sequence
ccttcttcaatcacgcggcgttgctgcgtcagggtttcccccattgcgcaatattccccactgctgcctcccgtaggagtctgggccgtgtctcagtcccaatgtggccgttcaacctctcagtccggctactgatcgtcgccttggtgggccgttaccccgccaaccagctaatcagacgcgagctcatctaaaagcggattgctcctttggcatcgaaaacatgcgaattcaatgctttatgcggtattagcagccgtttccgactgttatccccctcttaaaggcagattgctcacgcgttac

SEQ ID NO: 12931 - DNA, 5180 bp, Unknown
  gut microbiota DNA sequence
atcgcttgctgaactgcggagcgcgacgagctgctttgagaccgtacttcttacgctccttcatacgcggatcacgagtcaggaagccggcagccttcagagctgcgcggtactgatcggaatcagcctgaagcagtgcacgagcgatgccgtgacggatagcgcctgcctggccggtgaaaccgccgccggaaacagtgcactctacatcgaacttgccctcggtgccggttacttcgaacggctgacggcaaaccatcttcagggtctcgagaccgaagtagttgtcgatggtacggttgttgatcttgatctcaccggtgccgcccgggaaaagacgaacgcgggcaacagaggactttcttctgccggtgccatagaaataagccttcttaggtgtatacatcagttagttcctcccttacttttcccagttctcgggcttctgagcctgatgattgtggttctcgcctgcaaataccttcagacgggtagcggactgacggccgatggagttcttcggcagcatgcccttaactgcgagctgcatagcgaactccggcttctcggtcatgagggtcttgtactgaacttccttcagaccgccgacccagccggtgtgatgacggtagtacttctgggtgagcttcttgccggtcagaactgccttgtcagcgtttacgatgataacgaaatcgccgcagtcgacgtgcggggtaaaggtggtcttgtgcttgccgcgcagaagcattgccgcggtagcagcagtgcggcccagcggcttgccagctgcatccagcacgtaccacttacgctcgacagtctctgccttagccataaaagtagacatgttttcttcctccgtttatatctatcaaaaattattttgacaactaatttaccgctctcaacgagcatatctattaaaacacatctaaatgcgcaagtcaagccttattttcaaaaaatatcttaaatccgatgcaatctcttttattctcgtttattctcttttatgctcttgttttctcacttctcaattcactttttgtatttgcgtcaccgcgtcaaatctggtatatatatagtatataataaggataacatacgaaaaagaggacacgccatgcagaaaatgctctcttatgtccgccgcgcggtggaccattacaatatgataaaggaaggcgaccgcgtggcggtcggcgtttcgggcggcaaggactcgctcgccctgctcgtcgcgctgacgcagctcagccgtttctatcccgaaaagttcgaagtcgtcgcgatcacgctcgaaatgggctacgacgaaatggatttctcgcctgtgcaggcgctctgcgaccgtctcggtgtagaatacatccgcgtccctacccagatcggaccgatcattttcgacatccgccacgaggaaaacccctgtgcgctgtgcgcgaagatgcgccgcggcgcgctgcacgaggccgcaaaggccgcaggctgcaacaaggtcgccctcggccaccatttcgatgatgtggtcgagacgtatatgctctcgctgttctatgagggccgcatctcgtgcttccagcccgtgacctacctcgaccgcgccgacatcacgctcatccgcccactgctttatgtgccggagtatttcgtccgctcgttcgcaaagcgccatgagctgccgatcgtgcacaacccctgccctgccgacggcaataccaagcggcaggagatcaaggagcttctgaaaaatctggaaaagaccatgccgggtctgcgggagcgaattttcggcgcgatgcagcgctatccgctggacggctgggcgccggaccggacacgaaagaaaccgcgcgagaaaaaataaattctgcttttgcaaaaaaactcttgtcaatccgcgcgcaggatgatataataattaagcacctgtgaaacgggtgcgctacggagaagtatcgaagtggtcataacgagctcgactcgaaatcgagttgacggtaaaacgtcacgtgggttcgaatcccaccttctccgccacatgacagcacttttcagtgatgaaaggtgctgttttttattttgcagagaaaattactaacttttttgaatgcttgatttttgcgtaccccttagcgtaccccaaacaggttgtcacaggtcagacacattgtgaataaaccgatccatttggactgagctttccatacgcatcgcctcgctgacatgagcatattttgccatggtgaacgatgcggtagcgtgtccgagattggcctgtacggtcttgatgctgtcgccgttttccagcgaaacggttgcgaaggtatgccggagatcgtgaaaacggcactccggaaaaccaagctcacggacaatatccttgaaccgcttgtaaacggtgacatgagcaagatgccgtccgacctcgttggtgaacaccagattgtcgggattgtcccatgcactgccggcggtctgcgcccagtgcttctgctgttcacgctgacgatcaagaatacgcattacggttggggctggtttaatgatgcgcgactttctgcttttcggtgaggaaaatatgtagccttgtcctttttcggggagcttgacaagctgccgccggacaaagatgatgcctttccgaaaatctacatcgggccagctcaatccgatcacctcgctctgcctcattccggtaaacagtgttaccagaataagattggcatcggggtggttgagctcctgtaatctgcgaatgagcagcatgatctcgggcgtttccagcggggtaatgcccgggtccagactgcgcggcagactgcaatgctccgatggattatgccgcagatagccgagcgttacggcctgctgcaaacagcggtgcatgatgccgtaaatattctttacggtcttggcggacaaactttcctgtgcaagcgaattgatgaacttctgtatctgcgcaagggaaagctcgtccagtctgtgattgcccagtaccggcacaatatgattgtgtgcatagcttttgtactggctgatggtcaagggggaacgtccggtcaggtattcgctgagccatatgtcgctccattcactgtatttcatggagcatggggcgacataggagccggtgtcaatatcgtttgtaatctgacgcagacgttcgcggacttctttctgcgttttgccgtaaaccgagcgccggatagattttcccgttcgctcgtctgttccggcggtatagcggccctcccacgttccgtttggccgcttgcgaatattgccgctgccggacgcactgcggcagttttttgtgcgtgccataaataagaactcctttctgctggcacatgaatgcacttcgtatttacagtatagcataggacgatatacgttcatagcccagcagaaaatttaacaatttcccttaatgttgtaaaaacggtacatgagtcaatgactggtcatctggtcgatccactccagcaccttgcttttcggcgcgattttacgcttgccgatatggagtgtaggaaaagagtcgcagttcagcagctgatatgcgcctgcacgggaaatgccgagcattttcgcaagctgttcggcgttcagcatttcgggataactgtcaaaagcatcagggttcatagaaacacctccttccgtctgaaaaatatagttccatcggtattcagccgccgatggtcgctgctgatcttctcattcgcttaacgggttgcagctttccggtgcctgctttcacggagcacacccgagttatatattgtcaaggtacagaaaacggagtatcactccgttcgagcgcacagaagaaacaatgcgttcgaacggggtgatacttttttatcggcggagcatatcgagaagcgtgagaatgacagcttccgccgcgataagctcatcacgggtaaacgacgttttgaaagcatatctgatgtcggaaacccccagtaagtagtctacggatacattgaaaaaatgcgccatatcgacaagcgtattatccggcggattgcgcagaccgttttcatacgttgaaattgccgccttgctgacggaaagtgagtgcgccagagcggtctgcgtcatgcctttttccattctcagctgccgtaatcgttcatatcgcatatctcgtctccttgggatataatgaaggaataatccagttgttttttatagtttaatcatagcagaaatcggtttacatttggtcgtcaaagtatacagtgtgtggaaatgcgaaaattatttcggatgcgcgggtaaagtacgcggattttgcaaaaaaacagagcctcgcatagctgtgggagccatgcggggctctgggggggattttagttattacaaattgtcgaactctctttgaatatcttcaggaatatgtgcttgatagacaaagcgattgcaaactacttgtgttgttgaagcacatatgcagcatattacagttaagacagcatgtgtcatgcaatgatgaagagcattgtgccagtcagcttgttcaaattgcgtattcaagactatttgctgagcaatctgcatcaaggcgattataatgattgcagtttggatggcacaactaatctgcgcggtgttgcctttcaggacgaaactcaacgtttcaaataacagcaaatatgcggttagattttttcggtttttcaataattgcgatatagataattttttctgaatattttcaacggggcctaatttgaggattatcgctgatgcgataatgctgcaaaggctgatatatacagaaatggtttcttgagaggaataatatgctccaagcataaagagtaagatcgtcatgccaacgcaagaaattctgttcgtagcatgaatgccgccggctctgcttcgcaataagccaaaggtaacagtaaatgcgataagacaccatacattctgggtgatcaaataaaatccgatacttcccagtagtaacacgaaaacatcccataaaagcgtatgtattgcaaaatacgctttgttagaaacagattgtgggaaatttccccattgcatgagcagatacgaaatttttcgggcaatacaagccatatagaatcagtcctttccgttgtttacgtttatcatagtgcaaaaacaaatacttgtgtttttatgagaaaaag

SEQ ID NO: 12932 - DNA, 22689 bp, Unknown
  gut microbiota DNA sequence
tcaagaacaacttcccggacaaggccgacgccctgtacgcgaaggaggtcgaggacgtcaaggcccgctacgagcgctacaaaaagctcgcggaggagtaatccgttacaaaaagccgcaagccgcaaaatgttctctctctgaaacattatatccctgtttatgcctcgcgctgtgcgttcctgccgattttgcgcagcgcgggacagaacatcaatgtatatccctattcatagcctgattcaatgataatcttcctttctgtaaataatttttcaatgtctgacggctacggctttctgtataaaaaacgatgcacttctctgtcataccggcagaggagtgttatcctttcttgacatatcgccgcatccgtggtacggttgaggcggaaaacaaatccgaacgaggaggaaaaacgatggattacagaagatttggcgacacgctgctcgtccgcatcgatcgcggcgaggaaatcctcgagcaggtcaagacggtcgcgctcaaggaaaacattcagcttgcgagcgtgcaggcgcttggtgcgctcggcagctttaccgtcggcgtgtacaaggtcgacgagaagaagtattacgccaattcgttcgagggcagctttgaaatcgtctcgctgaccggcacgatcgacacgatgaacggcgaattttacacccatctgcatctgagcgccggaaacgacaggggcgaggtgttcggcggtcatctgaaccgtgcggaggttagcgcgacctgcgagatggtcatccgtctgatcgacggcaggatcgaccgtcagtacgacgaagtgaccggactgaacctgtttaagttcctgtaagagcctgatgtgataaaaaacctcccgtttttcgtgaaacgggaggttttctgctgcatggatcttatttttcggcgagctctgccttgactttctgagcgaccctgcggtattccgggcaggcgaggccgtatttgtcggccagacggacgacctgatagatgagtccgtcgacctcggagttttttccggcttccatgtcgcgctgcatcgaggtagatgcggactcggcgagatcgtcgagaattttcagatgggactgcatgagcggcgcgtccggcttgtcatccagctcgatgcccatcgcgcgcgcaagctcgaggatttcaccgacgaggcggatgaagcactcgcggatttcgcccggcttctgcatcgcgcctgccttcacgtgataatactggccgcaggccgccatgggggagacgtgcgagaacttgagcagggtgtccttctcgacaaagggggagtaaagcgtgtcgataccggcggcggtgaggtcggcggcgacctgacagagcaccggatcgtccgtgcggtggtcgggcgtgccgaagatcacgcggaagatcgagccgtgacgctggatcacgccgggagcggcgagattggacgagatgtagatgcagccgtcggtcacgagcagaccgggaagctgcgcctgcatcgtgcgtcccgtgccgtagatgttgagaatggggatgacaacggttttttcgccggctgcgctgcggataaaggggatggtatcgtcgagcgaatatcccttgacgcagacaaagatcacatcgggcgagggggcgccctgcgccttcgcggcgaggaagccgtccatgtcgaaggccttcaccggaacggtccagatttcgccgtcgctctgctcgaagcgcaggcctttttcctgcatagcggcgagatgcgcaccgcgcgcgatgagcgttacatccgcaccgttttttgccagaaaagcaccgagcggagcgcctgtcccgcccgcgccgatgatcatatagcgaagagtcatattctttcctccttgaagctctttgtgcaataattataccatgaaatgcatggaaatgcaacgacagaccgcatattcgccggagaaaagttcgaaatcgatgcacggaatgcacggcggaaaattcccgttccgccctttccttttttgcagctgcgtggtaaaatactatcagccgaaaacggcggaggagggcttgcttttgaaatggcttcagcatttgcgcacggtgcagcatcaccggtttctggtcctgcggcactgctggcgcgtcggcctgtaccgtcaggggctcacgcatgacctgagcaaattcagtccggtcgagtttgccgcgggggcacggtattatcagggaaaccgcagtccgaacgagatcgagcggcgcgaaaagggatacagcgccgcatggctgcatcacaagggccgcaaccgtcatcatctggaatactggatcgactatgcggcggacggctcgggcatgtgcggcatgaaaatgccgctgaactatgtgctggaaatgttctgcgaccgcgtggccgcgagcaagacctatcgaggcgcggcctaccgcgacagcgacccctatgactattacgcgcggtcggtcgatcattacatcatccatcctgaaaccgcgcaaacgctcgagtatctgctgcgcgtcctgcgcgacgagggcgaggacagggcgttcgcggaggcgcggagaatgctccgggagcaaaagaaaaacagataaaaagagccgttttcgcgaggaaaacggcccacagtttgccgaaagcaccagcttttcgacagcaaagccgcccggcagaacggaatgccgggcggctgtgtttttattcgatcgggatggagaggctgccgatggtgacagatgccatgtcttcaagcggaaggatctggtcgaacgtgctctgacgggtgcagaccgtcttgccgccgtgcgggtccatgctgccgccgcagtccgagaaatcgagcacggtgccgtctgtcttggtgacgagcagtttcgcggagtaggactcccatgtgctgctcacgccggcaggttcgcggccgctctcctgcggaacctcttcgccgttctcgtcgtacagcgtgtcgaacgtcgcctcgccgtccaccgtgtacactacatggtagccgatgggcgagagaacgatggtatcgacagttgcgctccgtccgttcacatcgatgctctgaccggcaggcagttcaaccgcgctgttcccggcctccagcttgaacttgaggcgccatgcgcccttggcgatagttgtcggctcaccgttttcactgttcagcacgcacaggtcgccgagcgtgatcttaaccgtgccgccggtctgcaccgcatcgttgtacgacatggtttcgacatactggatggcgttgtcgctcggattttcgtcatagaagtagctgctgccggacgcaccgtccacgccgcgtccgatggtgctgtccgaacgcttccagtacaggtcatacagaccggtatccgggtttttcgtgcagtcgaacgccgaaccgtcttccttttcgagggtgtaggagatgaggtagttgtagccgtcgaacagaatggcgtctgccgtgacggtcacgccgtttaccgtatcgcttgcgccgatggggcgtccgatttcgtcgatgacctcggtgtcggctgtcgggccgaataccccggcaaaggcttcgctcgcggacttgagtatgccggttgcgcctgcgccgatgctgagcacgagcgccgctgcaacgccgaccgccgcgacgcgcgggaagcggcggacacggtggggcgcaggctgctctgcgcgctccatcagccgctcgaccatgcggtttttcgcttcttccgagaaatggagctcgtccagtgcgtttttatactctctgttatcattatactctttgttcataaaattctcctccaagcgttccgcgcagacttttgcgtccgcggctcaggtgtgcggaaacggcggcctcgctctgtccaagcatggaggcgatttcgcgcacggaatatccttcgtagtaatacaggtacacggcttcgcggtactttttcggaagcgccatcacggcgtcgagtacggtcgagtcgggcgcctcgggggcggcggtttccgcgaccgcttccaggcctacgcaccggcggtgcgaggcgcggagcgcatccttgcaggcgttcgccgtggcgcggataatccacgccttttcgtgctcgggcgagtcaaagaccatgccgccggtcagcagcttgaggaaaaccgtctggcagatgtcctctgcgtcctgtgtggatttcagataggtataggacagacgcaggatcatgtcggaataggtctgcaccagacgttccgcctccgtcctgtcgattggtttcattgaaggtttcagctcctttcagcaacgttgctttcacctgtaatacgaatgaggggcgcgatttctgacagttatttttcgttgacttttgatttttcggacggtataattacagtgtaaacgagtagcacaactgcgtaaatccagttttcgtgcggctcgttttatttttttgttttttgagcgtgcagcattccgcgtaagtccagctttcggggagcagcacgctctttttgcgcaaaaagaaggaggaattcaaaaaaatgacggaaaacaacagaatgaaagagatgccggtaaaccggctgatgatgcggatgggactgccgatgattctgtccatggcgcttcaggcggtgtacaacatcgtggacagcgcgttcgtcggaaatatgcgcgagggaggcgaggcggcgctcaacgcgatgacgctggcctttccggtgcagatgctcatggtggcgctcgccatcggaacgggcgtgggtgtgaacgcgctgctcgcacgcacgctcgggcagggaaaccgtgaaaaggcggcgaaggtcgccggaaacggtctgttcctcggcgcggtcatttatctcatctgtctgctgttcggtctggtgggggcaggggcgtacatcgcgtcgcagacagcggacgcgcaggtcatcggcatgacgcacgactacctgttcatctgctgcacattctcgttcggcattgtctttttctcgctgttcgagaagctgctccaggcaacggggcgttcgctgtactcgaccatcggccagatcacgggcgcgttcatcaatatcgtgctcgacccggttatgatctacggtctcggcccggtgccggagctgggcgtcaggggcgcggcgtgggcgaccgtcatcggtcagatcgcgtcggcggtgctgcttttcgtgttccatctgcgcctcaaccgcgagtttaaccgcggcgtccgacagctgaagccggagaccgcagtcatccgggatatttacaccatcggcctgccggccatcatcgcgcaggcgctcatgtcggtcatggtgtatgcgatgaatctgattttgaaattcgatgccgccgcccagaccgcctacggcctgttctacaaggtgcagcagttcgtgctgttcctcgcgttcggcctgcgcgacgcgatcacgccgatcgtcgcctacggctgcggcatgggcagccggaagcgcgtcgaggacggcatcaggtacggtctgctctacacggctatgctcatggcggctggatttgcgctgaccgagctgttcccgggcgcgttcgcctcgctgttcaacgcgggtcagtcgagggcgtattttatcggcgctatgcgcgtgatctcgctcagctttgtgttcgccggtatcaacatagcgcttcagggcgtttatcaggcgctcggcggcggcatggagtcgctcgtgctctcgctgctgcgtcagctcgtcgtcgtcctgccgctcgcgtatgcgttctctctggcggtgcgcagcggctcagccggtgtttcgctcatctggtgggcgatcccgatcgcggaggcgctgtcgtgcgcggcaggctgcgtgctccttcagcgtatccggcggaaaaatttctcttgacattcacggcaggctgcgtataatgattaccaaagataattatcaagggtaatcactggagggacatacatgaccattgcgatgataaaatcgctgctcgatgcgtgctatcaggccaagcgcatccgcgacctgctgccgccgctgccgaagggcgtcgcgccggcatatattcagtatctggacgctatcggccaactcgaacggcagggcgtgcgcgtcagggtctccgatatcggagacacactcgacatcccgcgcccgggcgtgacgcggacggtcaaggagatggaggcgaagggctatctgcgcaagaccgcctccgaggaggacggccgcgtgacctacatcaccgcgaccgaagcgggaaagctgctctcgcagcggtacagcgagcactatttttccctgctcgcgccgcagctcgcggatatttcggacgaggacgcggcgtgcaccatccgcaccatcgagaagatgcaccgcgtgatgagcgagaggaggggacgcatcgatgagtaatacagcagactttacgcagggcagcattctgaaaaaactgtgccggttcatgctgccggtgctcggcgcactgattttacaggcggcctacggcgcggtcgacctgctcgttgtcgggcgcttcggttcgacctcgggcttgtcggcggtctcgaccggcagtcaggtactcaatctcgtgacattcgtcgtgacgcagcttgcgatgggcgttaccgtgctgatcgcgcggtatatcggcgaaaaacgcgaaaaggagatcggcgcggtgctcggcggcgcggccgtcgtgttcgccattctcgcagggtgcctgttcgtgctgctcgtgctgttcgcacggccgatctctgtgctcatgcaggcgccgcaggaggcgctcgcgctcacggcaagctatgtgcgcatctgcggctgcggcatcctgttcatcgttgcatacaacgtgctctcggcggtgttccgcggtctgggagacagccgttcgccgctgctgttcgtgctcgtggcctgcctggtcaatgtcgcaggcgatctggtgctcgtggccggtctgcatctggatgcggccggtgcggcgctcgcgaccgtgctcgcgcaggcggtcagcgtcgtgtgtgcgctcgcgatccttcgccgcaaaaagctgccgtttacgttccgaaagagcgatgtgcggctcaatgagcagtgcagacgctttctcacgatcggtctgccgctcgccctgcaggaatttctgacgcagctctccttcctcgcgctctgcgcgttcgtcaaccgtctggggcttgcggcctcgtccggctacggcgtcgcgagcaagatcgtcagctttgtcatgctcgtgccgagtgcgctgatgcagtcgatggcgtcgttcgtcgcacagaatatcggcgccgacaacgtgaagcgcgcgaaaaagtccatgctgaccggcatcgcggtgggcgtggcgttcggcatcgtgatgttcgctctcgtgctgctgaagggcgacattctggccggtctgttctcgaccgatgcggaggtcgtgcgcaggggctttgaatatctgcgcggcttcgcgcccgagaccatcgtgaccgccgttctgttcagcatggtcggctatttcaacggcagcaatcagacgctgtgggtcatgatacagggactcatccagacgctgctcgtccgccttccccttgcatattacatgagtatccagccgaatgcaagcctgacgaagatcggcatatcggcgccggtcgcaactgtggtcggcattgtgctgaacatcgggttctttctctatctgaaccggagagatgcagcaaaacgaggcgcggaataaacggcttttacggtcctgccggtctctgtccgctcaaaaaatcacgaaacgcaaaggccacccgtaagggtggcttttgctcagtttgtcgataaagcttattttcatgcaggaacggcagccgcgcggcagcgcgcattgaatagcgtttgcggtgcaaacgcatcaaaaccgggggcgtgtacctcggttttgatactttaagagggagaaagtttccgtatgggaactttcggacgtccgtgttttgcgaagtcaaaacacagattgtcggaaaaacgaagtttttcgacagtctcaagccaccctcgcgggtggctttttgctgtttcagataatatagtcgtactcgtccgggttggtgtggatgaggtcggcgatcgtgatgttgtcgaggtagtcgttgatgaccttgtccagacccttccagagcgtcagcgtgcggcattcagatgcgtgctcgcaggccttggcacccggctccagacaggcgaccggcgccagcgagtcctcggtcagccgcaggatgctgccgacggtgtattcctcgggcgagcgggtgagacggtaaccgccgcccttgccgcgcagaccggtcagcagtctggcgcggacgagcagcttgatgatgctttccagatatttttccgagatgccctgccgctctgcgatgagcttgaggggggtatagccgtccgttggatgctccgcaaggtcgatcatgacgcgcagcgcatagcggcccttggttgagaccagcatactttcttttcctccttcattcgataaacctattatacgacacgggaaataggaaaatcaacgaaaaaaatttttctaaaacctattgacaacataggaatagtaggatataatttagataaacctacaggaaaggttggtatagaaatgcgataccagatgacgttccgatgtccgcgatgttgaccatggcagacacggaacacagtttatcatataaaaaataacgacgagatatatcgggaggaaattatcatgagcaggatttacacatccgcagaccagctgatcggccacactccgcttctggagctggtgcatatcgagaaggaggagaacctcgaagcaaaggttctggcgaagctcgagtacttcaatccggccggcagcgtcaaggaccgcatcgcaaaggcaatgatcgacgacgcagaggcaaagggcctgctcaagccgggctcggtcatcatcgagccgacctccggcaacaccggcatcggtctggcgagcgttgcagccgcacgcggctaccgcatcatcatcgtaatgccggagaccatgagcgtggagcgccgccagctgatgaaggcttacggtgcagagcttgtgctgaccgagggcgcaaagggcatgaagggcgcgatcgcgaaggcggacgagcttgcaaaggagctgccgaacagctttatcccgggtcagttcgtaaacccggcaaatccggccgtgcacaaggcgaccaccggcccggagatctgggaggataccgacggcaaggttgatatctttgttgcgggcgtaggcaccggcggcacggttaccggcaccggcgagtatctcaagagccagaatccgaacgtcaaggttgttgccgtcgagccggcaagctctccggtgctcagccagggccatgcgggcgcgcataagatccagggcatcggcgcaggctttgttccggacgttctggacaccaaaatctacgacgagatcatcaccgtggaaaatgatgatgcctttgcgaccggcaggctgatcggcaagcacgagggcgttctggtcggcatttcctccggcgcagctgtctgggctgcgatcgagcttgcaaagcgtccggagaacaagggcaagaccatcgtagcgctgctgccggataccggcgaccgctacctgtccacgccgctgttcgccgactgatttcagcatacccatttcaaagctgcaaatgtattttatagcaaaagggagacctgtacggtctcccttcagtctgtcgataaagtttattttcatgcaggaacggcagccgcgcggcagcgcgcatgaaaaagcatttgcgtagcaaatgcacgaaaaccgggggcgtgtacctcggttttcgtactctaagagggagaaagtttccgtatgggaactttcggacgtccgtgttctgcgaagtcagaacacagattgtcggaaaaacgaagtttttcgacagtctcaagggagacctgtgcggtctcccttttgcataaacagacgagtaaggagaatgtagttatgataccgaccccggaacaggcatgggagctgctgtgcgaatataacgagggtgattttcacagaaagcacggacgcatcgtgggcgatgctgttgattgaaaaataggcgaaactgctgataaaacggctgacgaagcgcggataattggataagataacggaattagcaattcatacaattccgatgttgacactaggcaatgagagtgctattatataaccaacaaaaacagtaggttaacggaaaggagcagaaaagcatgtttattctgaacgaacgaatgtcgggctgcatgtgtatgtctatgccgcagtatgctcatctgctgtctgcccgatcggatacgggaacggacggacgcggtcttatctgatgccgcgcactgttccggatcatggatcgtcctgaagcggggagctgtgggctctccgcttttttgtgtaacagggaggaattgttttgatagaactgacacatatctccaaaaatttcgcctccggcggacgcacggtgcacgccgtgcaggacgtcagcctttcgatcggcaagggcgagatcttcggcatcatcggcttctccggcgccggcaaatctacgctcgtgcgatgcatcaatctgctcgagcggccgacctccggctcggtcacggtggacggaaaggaaatgaccgcgctctccgcgagggagctgcggcaggcgcgcaaaaagatcggcatgatctttcagcacttcaatctgatgccgtcgcgcaccgtgttcggaaatgtcgcgtatccgctgcgcggcagcggactttccggagagcagatcgcggacaaggtgcacaggctgctcgagctggtcggcatcggagacaaggcggaggcgtacccgaagcagctctccggcggacagaagcagcgcgttgccatcgcgcgggcgctcgcaaacgacccgaatgtgctgctgtgcgacgaggcgacctcggcgctcgacccccagaccaccaaggcgatcctgcggctgctgaaggacctgaacgaaaagctcggcatcacggtcgtcatcatcacgcacgaaatggccgtggtcaaggagatctgcgaccgcgtgacggtcatggagcacggcagggtcgtcgagcagggcgaggtattcaacgtgttcgcagatccccggcaggagatcacccggagcttcatccatacgacgtccaatctccgcaagatcgaggaactcatcgaggaggactccccggtggtgcagctgaagccgggcgagctcatcgtgcgcctgagctacattcagcgcaacgtttccgagccgctgatctcgacggtatcgcgtaaattcgatattacgctcaacattatcttttccgatattgccatcgtgcagaatgcgccgatcggcggtacggtagccatcatcagcggcgagcgtgaacagatcacgcaggcaatcgcatatctcattgagaaaaacgtaggtgtggaggtcatcaaggatgcaagagtttctgaataacatcattccgaacgtcatggcaaagctgccggacttctatgcggcgatcggcgatacgctgctcatggtggtctggtcgggggcgatctcgttcgtgctcggtctggcgctcggcgtgctgctcacggtcacaaagccgggcggcattctggaaaacaaagtcgtctaccagatcgtcgacaagctggtcagcctgttccgctccatcccgttcatcatcctgctgacgtgggtcatgccgttctcccgcgtcgtcatgggcacggcgctgtatgtgcgcggcgcgatcgttcctctggtgttcggcgcggtgccgttcttcacccggcaggtcgagggcgcgctcgcggagctggacggcggcctgatcgaggcggcgctctccatgggctcgacgccgcttgagatcatcttccgcgtctacctcaaggaaagcgtcgcggcgatcgcacgcggcacgactatcacggccatcagcctgctcaacctcaccgcgatggcaggcgttgtcggcgcgggcggtctgggcgatttcgccatccgctacggccacgaccgcaacatggtcgacatcaccaacgtcacggtgctggtcctggtcattatcgtttgcattatggagttcgttggcggccaggtcgtcaggaagaacacgcattaaggagagtctgacatgagtatttccaatcgtaaagttgttatcgtgggcgcaggccacgtcggctcccacgtcggctacgcgctgatctcgcagagcctcgcagacgagatcgtctacatcgactccgaccgcgcaaaggctgtcgcacaggcgctcgatctgaccgacgcgaccaactatctgccggtccgcacaaaagtcaccgccggtgattacagcgatgccgccgatgcgcagatcatgatcatcgcggcaggtccgctgccgagcggcaaccagacccgcatggatacgctggggcagaccatcgagatcctgaaggaagtcaccgcgtccatcaaaaaatccggctttgacggtattatcgtcaatatctccaacccggcggacgttatcacgcattatattcagcacacgctgaactgggcgccggagcgtatcttttccacgagcaccacgctcgactccgcaagactgcgccgcgcgatcgcgcatgagaccggcatcgatcagaaatccatcaccgcctacgcgctcggcgagcacggcgagagccagatggtcgcgtggtcggccgtcaccattgccggcaagccgctcagccagtggcgcgacgagtacccggacacgttcggaaagctcgacctcgatgccctcgccgatgcgggccgcgagggcggctggaccatcctgcgcggcaagggctgcaccgagttcggcatcggcgtgtctgcggcggaggtcgtccgcgccatcttctataacgagaaccgcgtcctttcggtctctgtcctgctgaacggtcagtacggtcagcacgatgtttatgcgagcgtcccggcgatcgtgggtcgcgacggcatcgcgcacatcatcgagctgcatctcaccccggaggagcaggagaagttcgacgcctcctgccggaccatgagcgacaattatcagctttcgctcaccctctaacatcagttaattaaaaagttcacatcataaacggaggtaatcccaatgaagctcaaaagaattatcgcactttccttgtccgccgcaagcctcgcgctcgctctgaccgcatgcggctcttcgagcagcgcttccgatgatgccgcacaggcatccggcagcagcgacgcacagaccaccgtaaagctcggcgttgtcggcgcgatctacgaggatatctgggcgccggcgaaggagaagctcgcggacgagggcatcgacctcgagttcgtacagttttccgattatgtaatcccgaacaatgcgctcgccaacggcgagatcgacctcaacgccttccagcaccgcatctatctccagagcgagatcgacagctacggctacgagatcgagaacatcggcaacaccttcatcattccgctcaacctgtactccgacaaggtgaagtcggtcgatgagctcaaggacggcgataccgtcgctatcccggacgacgcgaccaacggcggccgcgcgctcaaggtgctggaggctgccggtctcatcaagctcaaggacggcgcggatttcaacccgaccgttgacgacatcgagacctataacaagcagatcaagatcgaggagctgaaggcgaacatcatcccgtccacgctcgcggacgtgaccgcaggcgttgtaaacggcaactatgcccttgatttcggcctcaagaccgaggacgcgatctacaaggacgacaagctggacattgaggaatactggaacctcatcgcagcgcgcaccgaggatctgtccgacccggcgaaggtcgaggcctacaagaaggtcgttgcagcgttccagtcggacgagaccgaggcggtattcaacgatcagtttggcggctacttcatcaaggctggctgggatcaggacctgctcgctgacaagtaagaggaaaccatacggtgccgccgtttcggcggcactttccacaggaaggaaatgaccatgcaaatcaacagacaggctctgcggagcatcatcccggacgaggcgcgcatgaaccgcatcaagacggcgctcgacccgaaacatatcctgaacgatcagaaatcttacattgtgggaggaaaataaaatgcagagcttatccgaacgcacggccggcttcaccgactcggtcatccgccgcatgacgcgcgtttccatgcagtacggcgcggtcaacctgtcgcagggctttccggactttgaaccgccgaaggagatcctcgaccgcatggcgcaggtcgcctatgaggattttcatcagtattccatcacctggggctcgcagaacttccgcgaggcgctcgccgccaagcagtcgcgctgtatgggccggaggatcgacccgaacaccgagatcgtcacgacctgcggcagcaccgaggcgatgatggcggcgatgatgaccgtcaccaatccgggcgacaaggtcatcattttctccccgttctacgaaaactacggcgcggataccatcctgtcgggcgcagagccgatctatgtaccgctcgtgccgccggatttccatttcgacccggcccttctcgaggatgcgttccgccagcaccccaagacgatgatcctgtgcaacccctccaatccctgcggcaaggtgtttacgcgcgaggagctggaatttatcgcgacgctcgcggaaaagtacgatacctatgtcatcaccgacgaggtctacgagcacatcgtctacgcgccgcacaagcatacctacttcgcgaccctgccgggtatgtgggagcgcacgctgtcgtgctcgtcgctgtccaagacctactcgatcaccggctggcgcctcggctacatcatcgcgccgccgaacatcatcgaccgcgcgaaaaaggtgcacgatttcctgacggtcggcgcggcggcgccgcttcaggaggcagttgtcaccggactgaagttcgggccggactactatgacgacctgctcgccaagtacacccataaaaaagagctgttcctcaagggtctggacgagctgaagatcacgcacaccgacccggagggcgcgtattatgtgctgctcgacatttccgagttcggctacgagagcgatctcgaattctgtgaggatctggcgcattatgccggcgtgggcgcggtcccgggctcgagctttttccgcgagccggtcaaccacctcatccgcctgcattttgcaaagaaggacgagacgctgctcgaggcgctgaaccgtctggagggtctgcgcacgaagatcaagccgaaaaagtaaggaggacgtatcatggacgtaaggaaagcggcggaggcggcgcgcgactatctcgtttccatccgccgggaatttcatcagcatcccgagctgagcatgcaggaattccgcaccgcgcagcggattgaagaggagcttgaccagctcggcatcccgcacacccgtgtcggggagaccggcgtactcggcacgctgcgcggcgaaaaggagggcggaagagccgtcgtcctgcgcgcggacatcgacgcacttcccatcaatgcagtcagctacctgttccgccgcgacgagataccgcccgagctgacccggaacatcatgctgtactgtctggactgcttcggtgaggacggcagcacgggcaggcgcggcacctcgcggatggccatgatgttcctcagcaactggctcaacggctacggcgagaccggccatctggcggtatcgagccgctatctgtcgggccgggaggtgaacttctcccagaacggcccactccgggacgctctgcggcgcggcggtcgtgcggctcgacctggagggctggcactatgtgctgctgacccgtgtcgagggaggggacgtttatctgttcgacccgtattaccatgagggaccgttcgacaacgccgagctgtgcgtcaccgacgagcatccctgctcctataaccgtatcgttcccgttcactatttcgagcgggaggagatcagcgtctattcgctcgggcccttcgatactcgggaggccatcctgctgttcaatacggataccgagctgaccgaggacaagacggtcgagtatttcatctgagattgccgcgaagctgtgttttttcgtcactctcttgccaagaccgccctgtgtgcgtataatgaaagtgcataacggaattcagacaagggagtgagtgatatggaacgggatttcctcaagcagagcattcgtagagaactggattactatcgggacggcctgttcaacgaggacggggacgaagagtgggtgcgcgcatggtctgcgccggatgatgacgactcgatggcggaaaacggctttctgaatgtcgcgatggcgcatctcgcaggcgatgagtgcgatgagatcgtgctgctcggcacggaatacggctatcatcagccggattacgacagctatatcgacatcggcgccgcttttgtcaacgatatgagcaccggctttcttcagaccgagggaagcgaggaggactgggaacagctgatcgacagcatcgcggatattctggggaaaaacctgtcgcgagactgacgcttcggtgacgggcaggacaggagccgcacagagggcgtgaacagaaaaagtaaaaattttttaaaatccctattgacaatctgcaccctgcatgatattatatataagcactctgaagtgaagcttcgccgacggagtgagaaaatgaatatcgcggggtagagcagttggtagctcgtcgggctcataacccggaggccgcaggttcaagtcctgtccccgcaaccatgtttaaccgctgatttcgtaagaaatcagcggttttttgtatttttcggagcacttagaaaacctccgggtaggtgacttcaaaagcagaaagtcgtatgcggagagggaaacaagtaaaaaagagagtacgattgaagcattttttacttgttgcatatttgcaaaaataaaaatataatagcctttaaaacggtgatattgtagatatattttcggaaaataagaataaaactgaggaaaaataaaaatagaaataaatggaataaaaaggatataaaattgttttttacttgtcaatagatagattcggtatgtacaacggactcgatctgttcggcaacatatcgcacacagccgagcgtgcatagcgcatggtttttcccgcctgctcgcagagtaaggacgcggaatcccttttaaaaaagtaacattgggtatgaaatctggcaaagataaattttgcattacaagaaattaacggattcgtagaaaatatgtaaatttattatgaataaacctgcggaaagttgaaaaattatgggcagatgctataatgaaaccaagagaaagaataatttggaattcgatataccataaaatgaaaatgtttttatggttaacatagaaaggaaaaatttgaagaagcgtaaaagcaaaggttcgcatatcaagcgatatggtattgatttttatgtgagtaagataacgcaagcaggagatacccagccaccggcagaggtagtgcctgagtatgcaaggctgtcctcccgaagtgatgttgtgcaaagcagtgtgcgtggatattgtcgggacgtctgcggtatgacagcatcacggatgatgcggattttcggcttaaaggcggagagcacctatgaagaatggtatgtcgattacttatcgcgcatcgcaatgctggctacgcgggcacggcttgagcggtgtcataaactgttgcagagtggtagccaattgaagagcgttcagctcagcatgaggctgaagctgaagcgtggcgccaaaatacgttttacagcaaaatctcagattcgtcttgcagtgcttttataagcgtaggaaaacaaaagaaacttgggcggactgtccaagtttcttttttcagataaaaagtagaagaaatgggaaatttttttcatagcccgagaaaagtaacgggacaaaatttggataagtttaaagttccgtgtaagtgtgatcggagcgattataagtatcagccggtgacagcagaaggcgagttaacactggagggtgtttacgaacaatttttgctggatatgcagaatgaccgtcactgggccaagagcacgtgcatagcgtatgacagggaattctggcggtctgttgcaccgatttttcgggggataccgtatgcagatctcaatgaagaactggcggaaaagctgtggatggaaaggggacagtttggtctgggtgacaggatcattgagcaaaacgctaagaaaattttttcctgcattgttgagcaggcatatcagcatgacctgtcccagatgcgcttctggggaaatgttgacgtggaactttgcaaaaatggtcttgcgcataccgctgaagggcagaagcatttgttcaatcttgcacacaagctgctgaagcgccccaaatcgcttccgatcagcgtggttatccgtatttatgaagaaatgataagtcgtgcagatcgctttggagaatgtgttgcactgcttgcaatgctgttgcttggtcttcgcacctcagaggccgccggtctgtcatatggcgatattcgtcagatggatgaggagctgtatgcaattgagcgcagatatgtggaaaagcagagctcgcgtgatgttcaagtgggcggaaaaacatcaaattcatatcgcttgctgccgcttgtaaaagagtttcgcgattttcttatggagcgtaaaaagaaagcgcttatgtattacatatagttcgtttaaacggccgatggaactgggatgtacggcagcaatgcgtgaggaaacacgtcttgcggcggatatggctgagaagagccggtctatctatacatcggtcggcctttttgagaagccggaacttgtggacagtatgccggaagcggaggatttagagcgcgagtggctgccagaggtcgtggatgcagagggaaatccgtatccatgcagccaacaggctgactcgtcaaagaagaagtcaaagtcggaggcgaaagagggcatctgtgaagaagaactgctggctgtgttatccggcggcaggctggttaaagtgccggaaaaccgctggctttgtaaaccaggcgtttgttcgatgggattggataagaaacttcaagtgaagcggatagtggtttttcgacaatcggtcgataaagttttggtcagttcaagtggtcaggcatggtatttgccggcttcactgacagtggatgacttctgcaaaaatggaagatggcagaaatgtcatgaagcattgcttgaagatggtgtgctgacagaatgtaatcctaaggatacttcgctggtctgtgcagcgcaaagcggcaggcaggtgcggctgccgttggatcaagtgcgtgttataccagacggtatgcagattgtacgtacaggcggggagaaaattgtcacagcgtgttgcagcacggcggaagacgaattgctgtttgtcagccatcagggaaaagcattgcgcgtgcctgttcaggcgatgcatgagtacaaaaatctgggtatcggattggtttccggcatgaagctgaagacaggagattcactttgtcagctcatggtctaccggccggagcataaactgattattgtgacagagaaaggcagaggacttgtactgttgccggacacagcggaaaagcgtatgattgagccaaagctgggactgggtgagggtgtacagctgatacagtgggggcatggcggcgatgccatagatacgttatatgcggaaacaggtgtgctgctggtaacgaagcagggcaaggcgcactgtcatgacttgagtgatgtaactccgcaaaacagaggtacgacgggacactggtggattacaaatcatgatgttgtgggtgtggttgagatgagtattgctaaggcaacatcgcacgattaaagccgcggctccttgcgtaggttccggtcacgctgccgcgcctcatgcacaacttcattttacaacgcgcgtaaaaaatatcatcacgcaaaccattcgcgtgatgatactttttaccggccttgccgcgcatttgcagagattgaggtgctttttccgaaacatgccaaccagagcgcagatgatgtgagtaccgtctgtatgcctgatctggcggtgatctgtaatcctaacaaattgcatgaacaatactgcttcggtgcgccgactgtagtaatggaaatcctttttccctcaactgtcaaagctgatcgactggtgaagctgaaccgttatcagcaggcgggcgtaccggaatactggatcgtattgccgcaggaacagaacgcaaccgtgtttgtgctggagaacggcttgtatcgtaccgttgccgtttacgctaaagaagacaccgccgcaaaggtgtttacgctgaccggttgtgaactggatttgacgcgcgtatttgagtgatggagtaacgaaacgttaccctatttcagcggggatagcaatttgcgacacctctcacgcacaaggcggccttcaccggtttgtcgaggcctgcaccggtctgtacactgcgttgaacaacccgttttctcttggcggggtgtcatacaagctaccacagaggacgctcgaaagcgtccttttttatgcgtcgaactgggtgaaacttggcgtttatttggtgtttgttgaggtgcagacaggtggttttacatggtcacagaagtgtgtgatatggatagcgtataatgatagcgtataattaagttcgcaaaagcaaatatgatgtgatcgactcctacgccaaacgctttccgaaagcggttcagtgccttgaagacggattggaggattctctggccttctatgcattccccatgctggatgcgcgaaaaatctcatcttccagcatgattgaaagattgaatcgtgaaattcggagacgtaccagcgtggttgaaatctttccgaatgaaagttcctatgttcgcctagtgaccacgtatctcatggaatacgctgaggagtggtctgtctccagagcttatctcagccaggaatccattgcggcaactctgctcgttgctgcctaacttcatttttttcaggagccctttttgtgaacattacttgacgcggtctcaaaaacttaagcgttctgtgacggcaaaaatgtagcagtcaagctcggaatatgttgatatttttgccgatgatgtggtatactatgtaatagattaacgtagttttttgatggattttatggtggaggatcatagatgcgatatctttccgttgctgaaatagcgaaaaagtgggatgtgtcagagcgcagtgtcagaaattactgcgcccaggggcgtgtgaatggtgcgtttcttaccggtaagacatggaacattccagaaaacgcagaaaaaccggagcgtgccaataaaagaaaagcagaaccgatcactctgttggatatcctgaaagaacagaaggcaagtaaatactccggcgggatctaccacaaaacacagatcgatttgacatacaattccaaccatatagaaggaagccgactgacccacgatcagaccagatatatctttgaaaccaataccattggtgtagaaaaagaagtgctgaacgtggatgacgtgattgaaacagcaaatcatttccgctgcattgacatgatcatagatcatgcaaaagcagctctgacggaaaagttcatcaaagagcttcacttggttttgaagaacggcaccagcgattccagaaaagattggtttgctgttggcgattataagaaacttccgaatgaagtcggcggcatggataccgcccttcccgaagaagttgccgataaaatgaaggccctgctgacggaatataacgccaaagaagaaaagacccttgagaacattttggactttcatgtgaagtttgagcggattcatccgttccaggacggcaacggtcgtgtaggcagactcattatgttcaaggaatgcctgaaatacaatatcgttccgttcatcattgaggacaatctgaaactgttctattaccgtggattgaaggaatgggacaacgaaaagggctatctgacagatacctgcctgaccgcacaggacaagtataaagtatatttggattattttaggattgggtattaagcaagctgattgccaaagtgtcaatttgacactttaatctctttgccaccgaaacccaagtcggaatgtgatggctgtccctatgggcgagatcacccgtgcattggttggtgtacgaagaaggttatgcgtgaagtggggcttcgttgatatggatgcgtatgaataggaataccgcttctgctattttgcccgatgtccttacgaaaagacggatatgactttccccagcattccgctgacaacagaaagttttccgcagaaagaaggtggtgaagccgtgtgagttttgattatttttacggtc

SEQ ID NO: 12933 - DNA, 38137 bp, Unknown
  gut microbiota DNA sequence
tcgaaaggatattctaaaaaatcagccccggtgaccgcgcatcatgagctggagctcaccgccgcgcgccatcgagtagtaactgtcctgtgcaacgatgcagtggtcgaccagcgcgatgtcgagcggagcaagccgcgcgacaagcatctgtgtcgcggcaatatcctcgcgcgaaggacgagcctcaccgttcggatggttatgcgcgagcacaaccccggcagcgttgcacataacggcgctgcgcgggatggataccggatcgagaagcaccttagaggtgctgccgcggcattgatcgtcgcagcggatcagccggcagctgctgtcgacgtaggcaacgcagagcgattccgtatgcagcgcagcaaagcgcggaacgaagtacgctccgatcttatccgggtcgttcagccagaccacgctattccgcatccggatgcggtcagtctgatagcggcgcatgcttgcgctgatgagcgacagatattcggccgtgcgcgaaccgacaccctccacctcgcacagctgatcggccgtcgcctcaagtacggcatggagtgagccgaaatgctgcatcagagcatgggcaatcgggttggtgtccccctgccggatggtataatacagcagaacctccagcagctcatgatctgcgaacgcatcgacaccgaacctgccaaatttatcaagcatgcgtcggcgatgcccctgatgcggatttctttccacgggtatcgcctcccttgccgtgggtccgtccatatataaaaaaatgcagaaaaaacacatatttctacttctactatacattttgcaggacatatagtcaaacgcatttattcacagcatatgcagaaaattccgattggtttttaggcagattcaccaaaatgacagtctggcgagtcttaacacgcccagcgtcccgacaaaagtctcttaccgtgacctgctaactgcattttcgttgctttcgccacggttttgcgcatcaatcagaatttcggtcatcccgtcattgcttgaaacaacatataccggctgaatgtattcgtcacccacatcagcatagaatccgagctccgcctgttccattttcctgttttgcggcgattcgtctctggtacacagaaagtcctgggcaagaaatctattttttatcgtccgaaggtctgacagctgaacctgtgcgatcttctcatattcgcccgccaacttttccactccaacaattttcccttcagctccaactgcaatacaaatacggaatacgccataaacaggccgattttccaccgtcggataatagaaaacattccatcgaacaacagatgaaggcttatttctttcctctccgctcatatcagcgatggcagtgggatttcccagtgtttcgaccggatacaaattcgatataaaatcattggcaatttggatggctttctgtttttccggcacattttctcccgtatcatatgccagatcggtttgatatatccagcgtccgctttccgtatcatatcccaacaccgcggtggaggatgccggcattgggtctgacagcgttccaaatttcgcattctcatctaaaccgagtgcctttctgatatttttctgatcctgcgctgaatccacctttttcagtttgtaaaccccgcaggctgtttcgggcggaaatttcacatgatccagattgcagttgtttacaatatcagactgatttacatacccagaaaattcaagctctgggattttacctattgacatccggcaaaaatgcagcaacacaaaaataaaaatcgatgctcctaccagcgctgcaattccaattttacggctgtataactgttttttcattcctatcacccctaatttgaaattattacagaaagtaagccctcattattataaaacgtcaagggtatcgtactgcggcggaacgatgacccggcctgtcgcggcattgacagcaccgcattgaagccgggaatctcctgccgaaaaacaaattttatagatgtttttctccggaataagctcatatgcgtgcagatggcagttatcaccatcaacaaaaatgtaacgactgccggtgtccatctgccactgctgctgcatctgcgacaccgccgtttcgagcagcgcgtcccggtccgccgtatcgaccgcccctgcgcccgccgccatactgcctgcggccaccgccgccgcgatcagataacgccatcatttcataaagcatccctcctgctttcatgttatccggcaaaattatgatatcgctattataacataagcattcaacgaacaaaacactttgtaaaaaatccatttcacgtgcagctctatcgtccctccatttttgatccggtcatgtgcgcattgaccgggcgggcgcgatgtagtaaaatatggtgtatgaggtgatccccatgaaccgaccgaaaaagtccgctctcttccgaagactccgcatgacatttttctgcgtgccgcttgcggcgatctttctgcttccgcagctgttttccggctttcttctcccgaggcaggtcgaaacagccgtgatccatactgccgcaggcgacgtgacgcggcgggaattcgagacgagcaattcctccttcacacagcacatccgaacctggacggatgccgaaaacaccgtcgtgcgcagcgaccgctttgcgcccgtgtcgggaacgcagacgcacgaaagcacggtcctcacggtcaagggcacgggcacgatgcgcacctatgacgtcaaggcgaaccgctggagcgaagtgcctctctgcgccggcaccttccccaagggcatgtacttcatccgcgcggacggcggcgacagcatcattgtcacgcccctcgcctaccgcgaccgcggaaccggcatgatcgaatatctgccgtcgagcgacggaacgctcgaaatcaccaagaccgcagacggcttttccctctcggtgcagagcggctcggtgcctgccggcgcattcagcgacgctctcgccctgacctcgcacagacagctgttcgactggaacgacggggacacactgacccactggcagaactaccgcttcaccgacgacaaccgctggtgctggagcggctattattacaccgcgcctcccgaatattacccgaacggcgaaaattactttcatgcacttcccggcgcttacatcacctgcaagatggtgcgcaacgcggaggacggcgcctgccggatgctcggcatcgccatgctggacgtcatgcgccggcagcagaacgagcagggctttcttccctcgaccgctggcagcacctggctgaaaaacgattacggcatcgaaccgggatattatgacacgcgcttcaacaccgacctctggctcgcggtggtgaatgcggccgaaaactacggcgtgaccgaatggctgccgcaggcgcggaaatacgccgattttctcgtgcagtatgcacaggagcatcattcctccatcacgaccggagacgcgctgctcgttcaggactactggcacccgaacggcgagggcctgccgacgcatacctcgctcaaccatcattccgtcgaggcggtctttctctatcgtctttcctgcgccgcaggagacgacagctatgcccttgtcgcggatcgcatggtaaaaggaatcgagcagacagtctcccggtgggtccgcccggacggcaatctgcattacagtctttctccggccggtgtcggcggcggcgcagattacccctacctcacctacaatgatcttgtcgaccttcagacgcagtacaccgcccgcttccatcatccaaacgccgctattcggatgctcgctcagaccaagctgaactggatgcagaaaaatcatgtcgttatcctgtactgactgttctccaccgggccgccgcccttcagaacgccaaaaagcacggaatgcatcacgcattccgtgctcttgtttttccctgcttccattacagcatcagccgccgcattcctcgcggataaacaggcagccgtcgatgaacgccgcgatgcgttccccggaaacatacagcttgatgtcgtccgtctgccccgagaaggtttccatgtccaccggaatatcccactccaccgggtcggtctccgcgaagcagtccatcgtgccgaacggcactttcgataccgcaaaatgcggctcggtcataaaatgctcgaccagctgaagcgagtacacctcgccctcgtacagcactgccgcaacacagtacgccccgtccgacacatgcacaagctcctcctccgccgtgtcccagaacatcaccacgccgccctgcatgcccgccgtgtgcagcacgcacaggatatagcgcccgtcggtctcgacaaagccgccctcgttctcgtaaatatattcccagtacgggtagatgtcctcgccgcagatgcgctgctccatgccgtcgacatccgccgcgatcagtacgtcctccggaaggtccggctcgaatttgatctgatagatattaggtccctgctgcattctgccctctccttccgcgcgtctcacgttattttcttcggcgtttcgactttttctgcacgctgtatccgaactttccgagctttcggccgaggccgaaatattcgccgtgcgagtacatgatgaggccggttccgttgatgtcgaagcggccggtctcgtcgagatagcggtcatccgccgtcacgcccacgacctctgcaaggaacatggtatgactgccgagggcgcgctcctcgaccacgcggcacgcgatgctgaccgggctttccgcgatgccgggaacggacacgccctcgaccgggatgggcgtgagaccggtcttcgcgaacttgtcgacatccctgccgctcacaacgccgcagtagtcgcacgcgcgcgtcagcggctcggtcacgagattgatgacgaactcgcccgtctcgcggatcatatcataggaatagcgcgtcggacgcaccgagatcgacaccatcggcggattggtgcacaccgtgcccgcccacgcgatcgtgatgatattcggctttccctccctgtccgcgcagctcaccatgaccgccgggacaggattgagcatattgcccggcttccagctttgttttcccatttttctctccttttagatgacacatccccggcgccgcctgaatagacctgccggggatgccgttgttaatcttccgttttggctgtcttggccgcctttgccggtgcgcgtgtactgaggaaggacgagaccgcacgagtgataacgccgcctgccgcgcagcatacgattgcttcgatcagaccctgcacgccgacgagcagtaccacgaacatcagcggattgaccgcgccgaggtctgcgaccttgctctggataaattcggtattatagaacaccagaacgatatatcccatgaagaacagcgtattgagcagcggcgcactcagtgcaccgataaagtagctccagccgcctctgcggtcgataaagcgcagcgccttgaagatcagaccgacgcagaagcccatgagcacgcgcatgacaacgcacagcacgaaggtattcagcggactgatctggaagaacacgccggtcatgcccagaccggaaagcgcgtccttgaagctgacgagaccgaataccgcgccgagaatggcgccggccgccggacccatcgtcatcgcgccgaccgcgatcggcacggtcaggaacgacatatacagcggtccgaccggaacgctgccgaggccgatcagcttcatcacgatctcgatcgccgcaagcagaccgagctgcgcgagaaatcgcacgttggttttgttgttattcatttttattcctcccgctcccgtctcagcattcctttcgccgagtacagggcaaaattttaacaaagaaaagcatctcagccgcggtttttgctccaaacgagccgcagcccctcaaaaataaggtcatccgcgcggtcccagccgatcgagagatgcggcgcgatcagctggcagcagtcgcccgtgagccagacccgaggcgttttgccgagaacggcggcataacggccgatgagaccgtcgaccatggcagccgcgcccatgactgcgccgatacgcatcgcgtccgcggtgttccgcgccataacgtcatattttgcgccgcgcacgagcgccacagtcggcagctgcgcggtctgtgcacgaagcgcttcgagcgaaagctcgacgcccgcggtgatggccgacgcgacgagcgcgccgttttcatcgagcacggtaaaggttgtcgcgcgtccgcagtccacgaccacgcacggcaaactgccgcgcgccttggcggcgacggccgccgctacgcggtccgcacccacctgctgcggctggtccgagcggatattgagtccggtcttgatgccgctcgacaggctgagcagcttgtggcggctgcctgcgatgcgcgcgagcgcgtcgatgagcgtcggcgtcagctgcggcacgaccgacgcgagcaccacgccggtgatacgctcgccggacacgccgtagagcgtgaacagctgcgtcagcatgaggatatagtagtctgaggtctgccgcggctcggtctgtacggaagcatggaagcgaatttcctctccctcgaagccgaccgcgcggatatgactgttttccgcgagcacggtgataagcatatgcagacctcctccaaaactttttcacgagcctgtcgcgaaactacagtttcgccgacattctgtgttctgacagcgcgttgcgccgcagaacacggacgtccgaaagttcccatacggaaactttctccctctgggagtataaaaaccgtgatacatgctcccggtttttatgattttgcgctgcaaaatctatttcatgcgcgccctgcgcgcgaaacaccgtattttcgaaaaattgaatttatcgacagactgactgtattatacctcgatttcgtcctttgcgcaatacaaaggagcagagaaatcttccctgctcctgcgaaatattatgtattctttttacattctgccttccagatactttttgcgctgctcatagccttttttgccgagcagagcgaacatattcttcttgtatgcctcgacgcctggctgatcgaagggatttacgccgagcagatagccggagatgccgcaggccttctcgaagaagtaaacgaggtagccgaagtgccattcatccgcgcggtcgatctcgaacacgatattcggcgtgccgccgtcaacgtgcgcgagcagcgtgccctgatatgccttggagttgacgaactgaacgctcttgcccgcaaggtagttcaggccgtcgatatcgtccttttcctccttgatgatgctctccgagcgcggctcgcgcacccagagcacggtctcgaacatcatgcgcgtaccgtcctgaatgaactgaccgatagaatgcaggtcggtcgaaaagttcgcgctcgtggcgaagatccccttgtggtccttgccctcggactcgtcgaacagctgcttgaaccactcgccgagcatgacgagcgccggatcgtagttgacgaggatctccatcgacttgcccttgcggtgcaggatactgcgaagcgccgcgtattttgcagcgagatggtcggtggtacagcggttctcgatacgcgcctgcgccgcgccctccatgacctcgtcgatgttgacgcccgccgccgccatcggcagcagaccgaccggcgtcagcacagaaaagcgtccgccgatgtcgtccggcacgacgaaggtctcgtagccctcatcgtccgcaagctgcttgagcgcgccgcgctccttgtccgtggtcgcaaaaatgcgctccttcgcgccctcgcggccgtatttcttctcgcaaagctccttgaagatacgaaacgcaatggccggttcggtcgtcgtacccgatttggagataacattgatgcagaaatcccggtctccgatgatcttgaccagatcgttcagatagctggaggaaatattgttgccggcaaagtagacctcgggcgtaccctccgggcggacctgattgtacatctgacctttcacaaattcgatcgccgcgcgcgcgcccagatacgagccgccgataccgatcacgataagtacgtccgccgttctgcggatcttttccgccgcctgcttgatgtgcgcaaattcttccctgtcgtaattttccggcagatccagccagccgagaaaatcattgcccgcacccttgcggctttcgagcgtatcctgcgcgacctttacgagcggctctgcgtcatgaatttcgtcatcctgcacataccgccaaaggccgttcatcttcagttccatagacattcttgcatttccccttaatttatcctctcaaacccgggtcaaagcgtctctctcactgtaaccctttaccaatagtataccatatttgagaagaaaggcaagtgttttgttcattttctacaaaacatttcgaatttcacccggattttgcaatatttttaccacatcgtttttttcgtaaaaataaacaaagaccgcctttcatatgaaaaagcggtccctgagaaagtttttagttgagaaaatgccggtttcggactgagtcgtttttcttagtagatcgggaaacgggagcagatctcgcatacgttgcggcggatctcgtcagccttgttgtcgaaatcggtcgccgcctgccagataaactcagcgatatgcagcatttccggcttgccgaagccgcgggtggtaacggccggggtgccgatacgctggccggaggtgacgaacgggctttccggatcgttcgggatggcgttcttgttcgcggtgatgtagacctcgtccagacggcgctgcagctccttgccggtaacgccggtgccgcgcagatcgatcagcatgagatggttgtccgtgccgccggaaaccagattgaagccctgattctggagggctgccgccagtgcctttgcgttgtcagtgacgcgctgttggtaagccttgaactccggcttgagtgcctcgccgaagcagacagccttcgccgcgatgacgtgctcgagcggaccgccctgggtgcccgggaagatcgccttgttgaacttcttggcaagctcctcgttgttggtgaggataacgccgccgcgcggaccgcgcagggtcttgtgggtggtggtggtcacgacgtccgcatacggaatcggactctgatgcagaccggcggcgaccagacctgcgatatgcgccatatcgacgaacaggtaggcgccgacctcgtgtgcgatctcagcgaacttttcaaaatcaatggcacgcggataagcggaagcgccggcgatgatcatcttcggctgctccttcttcgccatgtcgcggactgcgtcatagtcgatgtagccgttgtcgtctacgccgtaggaaacaatgtggtagagcagaccggactggttgaccggagagccgtgggtcaggtggccgccgttgtccaggctcatgcccataacggtgtcgcccggcttgcagagcgcctgatagaccgccatgttggcctgcgcgcccgaatgcggctgaacgtttgcgaactttgcaccgaatacctcgcagacgcggctgatcgccagacgctccacctcatcgacgcactcgcagccgccgtaatagcgcttgcccggatagccctctgcgtacttgttggtcagaaccgagcccatcgccgccatgactgcctcgcttacgatattctcggatgcgatcagctcaatattgcgctgctggcgcttatattctgcctcgatcatattgcccagttccgggtcatatgcctttacaaaatccattgcctcgcgtaccatgtttcatcctccatttgcaagggaaatattataataactattaaaccacaatttcctcattctttccatagtgaaagagttagtaaattacaaggttcacagaaaactttctgtgaatgttgtttaatctgtatatttttcaccgcatttttccgaacgacggacagatgtccgcgagcgggcagtccgtgcagcgcggcgcacgggcggtgcagtgctcccggccgaacagcacgaggcggtggcagaagtccgaggactcctcgggcaggacgagtccgcgcagcgccttttccaccttgaccgggtccttctcgtcccgaacaaagccgagacggttggacagccggatgcagtgcgtgtcgcacacgatggccggcttgccgaaaatatcgccgaggatgaggtttgcggtcttgcgtccgacgcccggcagccgcagcagctcctccatcgtatcgggcactctgccgccgtactccgcgagcagcaccaccgcgcaggcgtgcaggtcacgcgccttggtgcggaacaggccgcagctgcggatatcctccgcgatctcctcctcgctcgcctccgcgaagctctcgagcgtcggaaaatcagaaaacaacttttccgtcacgatgttcacgcgcgcgtccgtacactgcgcggagagccgcgtcgcgaacagcagctcgtagtcatgcgtgtagtgcagggcgcagaccgcctcgggatagacctgcttcagccgctccgtcaccgcctgcatacgttccttctttgtcatggctcattcctctttctaagacaaaaaaaccgagaaagctcccggtttttttgcagtatcagccttcctcagtcacttcgatgttgccgatgttgtcagcaagtctcctgccgcggaaggcatccttattgttttcatagatcagacgcagaccctcgagcgtcagattcgggtccacttcgtcgatcagcggacagtattccgccatcatgcggcccatgccgcctgtcgcgacaacgcgcgcgctgccgccgagctccttctggatgtcggtgataatgccggtcagcgcgccgacatagccgcgcaccgcgcccgactgcatcgagcggacggtcgtcttgccgatggcgtgctcgggcatctcaatatcgacgcgcggcagcttggacgccttgaggaacagcgcctccatcgcgaccttgagtccggggaagatcgcgccgccctgatacgcgccctctgcgtcgatggcgtcgaacgtggtcgccgtgccgatgtcgacgatgatgagcggcctgccgtagcgcttcatcgcggagaccgcattgatcaggcggtccacgccgacctcgcgcggattggcgtagcagttgcgcacgccgatgtccacatcgcggcccgcgatgagcggctgcacgtgcagatacttgcggatcgcgttgacgagcgtgtacatcacgggcggaaccacgctcgcgatgatgaccgcatcggtctgatgacggtcgagaccgtgaaaatggtaatactgcgcgatctgcataccgagttcatccgatgtacgctccgcgttggtggagatgcggaacgagccgcagagcttctccttatcgtaaatgccgaacaccatgttggtgttgcctacgtctatcgccaaaagcattgatctttccccttacttccttacaaaactctctttccgcagcagcgcgccgtcctcatcaagcagctcgagcgtgcggaccatgccgccctcgatgtcgagccgcgcatagctcgccgggccgccgcgcggcaggctgatgctgccgggattgcacacgaaaatgccctgttctctctcggccatcatgcggtgcgtatgaccgaaaaacgcaaacgagcagccctcttccctcgcccttgcgggcacaaggccgctgtgcagcatggatacgcgctcccggtggccgtgggtcaggtacatgcgcacgccgccgaccgtcacgaccgcgaacagcggaacatccatatcaaagtcgttgttgccgcgcacatgatagatggtaagcgccggaaaagcgcggcggatgtcatccgcgtcatcggtatgatcaccgagatggagcacggcgtccggcttttcgcgctcgatggcgtaagccatcgacatgttatacccatgcgagtctgaaaaaaccagaaccttcacgcactttccttcctttcgctccgcggcacatatagcgttattttacaccgcgagacggtcgttgtaaagcacaaatcaaaaattcacaggaatttttgatgaaaactcccgctgtccgtcccggcacgccccgcgccgcagggaacttttccgtgccctgcgcatacattataaggagaacctttggaaggagcgatcttcatgtccgatacgaacgacattctgagaaaacttgccgcccaggcaggcggcgaggccgcgctttccgctctggagcgcgcgctttcgagcgccgacggccgcagagcagtcagcagcctttccgcgtcgcacgaggcgctgctgcgcgccgccgccgaccgtgctgcttcgggcgacctgtccgctgcccgtgcgctcgcacgcagcctcgccgccactccggagggcgcaaagctcgccgacgccctgcgccgcagcatgggagggtcgagccgtggataacgatgccctttccggcctgctgaacgatccggaagcacttcagaacgcgctccggtcggtctcctcgctgctcggtgcgtccgatgcgggcggcgcaccggacgccgtctccccggccgatgacccggaagcacagctcctcccggtcatcaccggcatcatgcagagcggccgcgccgccgtccggccggaaaagcgggcgctcctgagcgcactgcggccgttcgtcgcagaggacgtcgcgtcccagttcgaccgggcgctccgcctcgccggcatggcaggcatggcacgcgccgcgctgggacagctcgagcaccgcgcagaaggaggcgagcattctgtataaccgttatctggccgagagcacgccgtccgccgcacccgaaacgccgccgctttccccgctcctgccatcgctgccgcgccttgaccgcgacgcgctcatcacgctcgccgccgccttttttctgctgaccgacggcgaccgcggtacagactgggaaagcgtcattctggccggcatcctgctgtttctcgggttctgagagaaaaagggcgagctatgcgctcaccctttctcgtttttatccctttttcagcttttcggatgcaagatccgccagtcttgcgtaatccgcaaggctgaggcgttcgccgcggatgcgcgcgtccagacctgccgcctcgacgagcgcaacgatctcctccttgctcattgcgctcgcgagcaccgggccgagggcgttgacgagcgtcttacggcgcatattgaacgcagcgcggaccagcgcgaagaacagcttttcgtcgcgcgtctcgaccgcaggctgcgcgagcggcgtgagcttcagcaccgctgagtccaccttcggccgcggcacgaagcagtccgccggtacgtcgaacaggatctccgccttcgcgtggtactgtacatagatcgagaacgcggaatacgccgatgtgcccggcgcggcacagatgcgctccgcgacctccttctgcaccatgaccgtgatatgctcgaacgcgccgctttccatgagtgcggtgatcgcaggggtcgtgatgtagtacggcaggtttgcgcaggcgaccgccctgccctcaccgaacttctcgcggcacagcgcggcaagatcgagcgcgagcacgtcgccctgcacgacctcaaagttgtcgaactctgccatggtctccgcaaggaccggcagcagcgcacggtcaagctcgaccgaaacaacgtgctccgcgcggcggcacagctctgccgtcagacagcccatgcccggcccgacctcaacaacgttcccggcctcgcgcgcgccgctcatctccgcgatgcgctcgggaaccgtgatgtcggtcaggaagttctgaccgagcgacttggaaaagtggaatccgtggcggccaagcaccgcgcggatggtttcgatatcacataaattcattgcattctcccataaagtatctcattacagtatcttatgcccgaaaaaagccggcgaccctgtgccgccggcttatcgtttctatgtatgcccgcgcattgctgcgtgacgggaaggttattcctcgctctcgatcagaccatagccgcctgcggcgcgcttgtagacgaccgcgtgggtgttgtcgttctccgagttgcggaagaagtagaactggtgatccagcagattcatctggaggatcgcttcctcgacgctcatcggcttgacatcaaatctcttgcggcggactacgtcgaaatcgtcctcagcaagcgcagcctgctgctcggcgatcttgtcgaacgcaccctcgcgcagacgcttcccgagacgggtcttgtgcttgcggatctggcgctcgatgctgcttaccgcaccgtctacggacgcgaacatatcgctcgtcgtctcctcggcgcgaacgaccagaccgacctgacgcaccgtaacttccactgtctgcttgccgcgcagttcgctgaaggtaagagtcgtgtcagagtcctgctggaagtagcgatccagcttctctaccttgcgcagcgcgtatgtacgcagatcgtcgtcaatcttcatttttctctcgacgatggtgaacttcataacatcatctcctaacgggcgtaaccgcccatgatacttgcaccttccgggcggaaaccctgaccgaaaggcatatggggttttgctatcttcagtatagcacaacctatgcaacttgtccaacagattttacaaagttcacagtttgttcagtaaatttaactacatccctgccgggcgtatcagatttcgccctctgcgtggcgcgttacgtggcaggagatgttgacgacgcacggcagacctgcgatgtgcgtgccgaacggctcgatcgcgcaggagagcgcggtcacggtgccgccgaggccctgcgggccgacgccggaggcgtttaccttgtcgaggatgcgctgctccatgtcggcgtacagcggatctgcgttatgctcgcccacggtgcgcagcagcgctcgcttggcaagataggccgccttgtcgctcgtgccgccgaggccgacgccgatcacgatcggcggacaggggttggagcctgcaccgatgcaggcgtccgcgataaagtcgatgatctgctcctgcgttgccgccggagtgaacatcttcatcttcgtcatgttttccgagccgaagcccttgggcgcgaccgtgatcttcaccctgtcgcccggcaccatcgaggtatacaggatgcacggggtgttgtcgttggtgttctcgcggcgcagcggatcgccgacgaccgacaggcgcagatagccgtcgatatagccgcggcgcacgccttccgtgactgcgtcctcaaacgagccgccggtcagatgaacgtcctgtccgatctccgcgaacacgatggccatgccggtatcctggcagaccggaacgtcgttctcacgcgccagatcgcagttcgcgatcatctctccgaagatctcacggccgagcggagactgctcgctctgctgaccgtccacgaaggcctgccgcagatcggccggcagatagtagtttgcgtcgatgcacagcttgcgcaccagtgccgttacctcagaaacgtcgattgtcctcatcttgtcctcctgtattccggtgtgccgtttacgaaaacagccttcacctgggttgcaatatcgagcggttccccgctccagagcacgcagtccgcgtccagaccggcgcgcaggctgccgatgcggtcgtccagacctgcgatcttcgccggaacagccgtcaccgcacgcagcgcatcggttttatccatgcctgcgcggaccgcgagcataaccgctaccggcagcaggcgcaggggaatttccggatggtcgaccgtgatggcggtcgggatgccggccttcgagagaatgccgggcgcctcgtcggtcagatttttgatctcgggcttggagcggtcggtcatgtacgggccgcacaccacggggacattctcctccgcgatgaggtccgcgaccagatgcgcctccgttccgtggatgatgaccgggcgcaggccgaactccttcgagatgcgcagcgcggtgaaaatgtcgtccgcacggtgcgcatgaaaatgcgcctcgatgctgccgttcagcaccgggagcagcgcctccatcttgccgtcgtaatccggctcctcgtggtcgtcgtctacctcggcgcgcgccttgcgcgagagatattcgcggcccttgtacagctcgtcccggatgagcgcggcggtagccatgcgcgtgaccggggtctcgtccttgtcgtggtagaccgacttcggattttcgccgagggcgaatttcatcgcaagcggcgccttgacgatcatgtcatcgatgcgccggccggcggtcttaatgagggcgatctggccgccgatggcgttcgcgctgccgggcgaaacgcctgccgccgtcacgccggcctcgagcgcctcgcggaaggcgtggtccatcgggttgaccgcgtcgatagcgcgcatctgcggcgtgacgggatcggtgtcctcgttgccgtccgcgccctcgaagcccagaccgtcctcatacagaccgaggtgggaatggatgtcgatgaggccgggcgtcagcacgccgccctcgccgtcgagcacctcgctgcacgccgggggctcgccctcgccgagcgcgtcgattttttcgtttttcagcagaatccagccgaaaaaccggctgttttcgtcgtccattgtcagaatggttacatttttgatcagaatttctttcatgaaaacctcagaatcgctgttgacagatatggtattatatggtatatttatcatggcagcagggaaagctgccatgcaccgttcatatctttatccccacacttcggcgccccttttgaacaaggggcgcatttttttgcgccgggacggctgtgggtgctccgcgtccgctcataaaaacaaaaccgaggcagttcgtccccggttttgaaccggccgcaagccggttttactgcttatctgcggcggcgcgaaccgttcttgcggtcggtcgcgtgacgcacgtccgcctgacggctttcgctgtccgtcatgaacgccttgagcttatcctcaaaggtcatggtagaaggatccttcggcgcctgctgtgcacggccgcgcggcgcgccctcgcggcgctgctgaaaacgcggctgacgcggcgcgaaaccgcggtccgaacgctcatgctgctgacgcggctcctgcggctgcgccttcttgatggagaggttgatgcggccctgctggtcaatgttgatgatcttgaccttgacctgctgtccctcctgcagaaaatccttgatgtcgttgacgaagctcgacgccacctcagagatgtgcaccatgcccgacttgttctccggcagggctacaaatgcaccaaacttggtgatgccggttaccttgccttctacgatcgctcccactgtcaaatccatatacgctgtttttgcctccgtttatttttaagggtagcgcagctttttcggcgctgccttcacctacctgctggacgtgtccacgaaaacacgctcgcccggttccgcataattcagtttcgtgcgcgcaagctcggaaatatcctcgtcggtcagaccgttctgcagctgctcgcgcaggctgtcattggcttcctcataggtctgcacctgaatgttgaggtcatcgagctcctgccgctttgctttgatctgggccttgagggtaaagaccgtgccaagcgcatagacagcaagcgccagcatgatcacccggatcagaaccagccttccgtcacgtcttgccattgtctcacctctcctgccgctgaactgatttgctttttattttatacctttttcgcgaaaaatggaagggggttttgcaaacttttttgcgaatttcgcggattttttcagcgctcgcccactgaaagcaccaccgaacgccccttccggcccggtgtgcggccgcacgcagcgcagacgccgcgccaagaaagagcggcagagccgccgcgctcaggcagacctgccacagcgctcccccggcgcacgccccgagcagcacgaacaggcgccactgtccggcggcgtttacgatcgcgaaccggaacgcagccgcaagcatcagcacgcagaacagcgcgtcgcacgccgtctcccccgccctgcccgggcagagcacgcgccgcgccgcgcggaacacatcatagcaaagccccgcccccgcgccgaacagcacgcactgcgccagcaggatcagctgctcgcggttgatattcgccgtcatcatgcgccgaacaggcggcgcagcacgcctccgcgcggcgggacggagtcgtcatattcgagcagcgagatctcgccgcgcacgaccgtttcccctgcatccagctgtaatttttccacgtgcagcccctgtccgcgcacaatcagcatgcccttccccgtctcgagcagcacctgctcctcgtcaaagctctgcacatcgctgactcccgtcacgcgcagcttttcgcgttcctccagcagaatgctgtgcatctgcgcgccgtcgttctctgccatcgacccgacccctttccgcaaagcaaaaactctctttacacagcagttatatgcgtgaaagagagttttcagaaccggttttacaggatttcgcggtacattccggcggcatctgccttgagtgcgtgctccgcgatctcgagcacctcgaccttcatcgtgcgctggccgaaggcgatctcgatgatgtcgcccgtcttgacctgataggatgccttggcggatttgccgtttaccgtgatgcgcgccgcgtcgcaggcgtcgtttgccaccgtgcgccgcttgatgaggcgcgaaaccttgaggtatttgtccagtctcattttgcgttcaccttgtccttgagtgtgcggcctgccttgaacaccggcagcgtcgcctgttcgatctcgatcacctcgcccgtgcgcggattgcgtccgctgcgcgccgcgcgcaccttggtctcgaacgagccgaagccgctcagcacgagcctgtcgccctgcatcatcaggtctccgatcgccgcgaacgccgcgtcgatgaccttttccgtgtcctttttggacatatcggtccgctctgccacgagcgagacaaattcatttttcttcatctttatctcccggatctatgttattctctgtgttccttctttttcgcctcgtcccagagcgcgtccatttcctcgagcgtaagctcggaaagctgtctgccctgcgccttcgcctgctgctccatgtccgcaaagcggcgcacgaacttgttgcaggtcttttccgccgcacgctcggaatctaccttgacaaagcgcgaaacgttcgtcaccgcgaagatgagatctccgatctcctcctcgacgtcgccgtcgccgccaatcgccgcgcggacctcggcaagctcctcctcgaccttgtcgagcgcgccggaaacatccggccagtcaaagccgaccttcgcggcctttttctggagcttctgcgcacggataaggctcggcaggctcttggagacactttcgagcgtcgaggtgtcggtctcctgctttttctccttgcgcttgaggtcgtcccagttggaaagaatctcgtcggtcgagccgaccgtcacatctccgaagatatgcggatggcggaagatcagctttttgcagatgccgtccgccacatcatccatgtcgaacacgcccttttccttctccatctgcgcatggaacacgacctgaagcagcacatcgccaagctcctccttgagatgctcggtgtcctcgtcgtcgatcgcctcgcagacctcataggtctcctcgatgaagttctggcggatggaatgatggtcctgcgcccgatcccacatacagccgtccggcgcgcgcaggatctccatgatgcgcagcaggtcggctacgctgtacttgtctttctgttcaaaatcaaccattttcgtgtttcctcacttcaaatgtaaaatatctgcaatttttgcgccgtgcggcagcagcagcacatccgcccgctcgatggcgcggagcgcgagcagcagcacgccgtaaacgagcgccgccgccgcgatgatcgcaagagtcgcgagcttgtcgagtgcgctgcccggagcaagacccgcaaggcgcacgagcgtctttccgatgacgaccaccgcgcccataccggccgttgccgccagaggacgcacgagcgtccggccaaccggcggcagaccgtgcgacaaccgcgcgatatggaacaggttgagcagggcgatcagccagtagcacagcgccgtgctgatgggcgcgcctgcgatggaaaagcgcgggtctccgatcatgaaatagtccccgcacagcttgaccgccgcgccgaggcacatggagacgagcggcaggtcgatgcggctgtacgcctgaagcaccgcattcgtcaccgcgacgagcgcgactgccgggaccgcaaagccgagtatgctcatcagctgaccgccgagcaccgtgcccgaggacagaaagatgcgcaggatcgggccgccgagcaggaaaaagcccgccccggccgggagcgtcagcatgagcgtcatgcgcagcgtggtcgaaagcgtccggttcgccccggtctcattgcccgccgcgcgggcgctcgcgatggtcggcaggacgctgaccgcgagcgcggtgatgagcgtctgcggcagattgaaaaagttgatgacgccggtgtagatgccataggtctgcatcgcctcgtccgccgccatatgcaccgccgggctttgcaggcggctcgaaatgagcgcgacgtcgatcaggtcggtaatgctcatgaccgaggacgagatcgtgatcgggatagacaggctgagcagcgttttcgcgagcgtcagcgtcggccgaacggccgggtcgagcgcgcgcacccttgtctcgccgcgcgagagcgccgcctgcacgagcatgtacgccgccgcgacgacctctccgatggtgacgccgagcacggtcagcgccgcgacgaccggatcgtcaaagccgcgcccgaccgcccagcaggcaagtccgagaccgatgaacagcttgccggccgcctcgatgacctgcgagaccgccgtcggcaccatgttggagcggccttgatagtagccgcggaacaccgagaggatcgcgaccatcagcacgctcggcgcgatcgccatgaccgcaaggcgcgagtcctcgctcttgatccatgcggcgaacgtccctgcgccgaagaacagcgccagcgagcacagcgcacccaccggcacgaagatcccggccgccacgcgcacgatgcggcgcacctcgtgctcccgtccccgtgcggtcgcctctgccaccattttggacagcgccgccggcagaccgacggtcgagaccacgagcatggcggtatagatgcggtacgccgccgagaacatgccgaacgccgggcttttttcgccgccgatcagattttgcagcggtatctggaaaaaagcgccgatgaccttgacgacgagacttgccgccatcatgataaaggcgccctgcaggaaactctgcccctttgattttttatgcaacgatgcactccctttcaagcaaagcaggcgtgcggacagtatttcatatccgcacgccgttcagacgattatagctccgtgccgcagccgggacagaaggagtcctcgcggctgcaggttctgccgcaattcgggcagatgctgaccgaacgcatggaggcgagctggtcgcgcagctcggcaagctgctccttcttcgcgtccacttcctcgagcttcgcgtccatgtcctcgctcgtcacctcatcgccgcggtgcagctcgtagaccatgcggccgatgtcgcggaacagcacgtcgcactcggtattgagatcgaaaatgcgcagattgaggcgcgtcgccgccgccatctcgctcgccttcttgcccgccgcgtctgctgcgcggccgaccgaacggcccgtccgggacgccgtatccttcactttatccagaaaagactgtaacttcgtgtccattcctgtcactccttctgacgagacttccggcagaggtctcccctgcctgtttcaagccgattatatcctatcttccgaaaaattgcaatgtttccgcctgtctttttacccgataaattcatgcagcacactgtcctcgggtatgcgcccctgccattcgatgggcgtgatcgtgccgaggatatcgtctatcggcgcaagtcctgcgtgctcgagcgcgtctctgtgctcgcggagcacggacgtcagacgcggcatcaggatattgacctcatacggcaaaaaagtatcgatcgtgaggttggcctgcccgcggtagggcgagatatacagccgctcgccccggcggaccgagttccactgccgcagcgtcgcctcgaccggcgaggagcggaacaggctgtcgcgcatcgcgcggcgcagaaagcgcagcatgtacggctccaggcgcggccccttcggcggaacgagcgcactcgcgaccgagagatagatgctcgtcgcgcggtttgcaaggtctcccatgatgaccgggttgaacgagtggatgccctcgatcatgatgacctcatcccgtccgagcctgaccgtgcggtcatgcgggatagaggtgcgcgtttcgaagtcaaagcgcggcaccgagacctcttccccggcgacgagccgcgcaaggtcgtccgacagccgtgcaagatccatgcactccggactttcgagatcgggtaccccgttctcgtcatccatcggctgctcatagtcggccgccgtgcggtaatagtcatccatcgagagcatgttcgcgtgcacgccggccagctcgacgatgcgtgcgatccggtcgttcgtcgtggtcttgcccgaggacgaagggccgttgatgagcacgatcggacagtgctcgcggttgcgcacgatctcgtccgccgccatgtgtatctggcggtgatagtgctcctcgcagtcgcgaatgaagcctgccgcatcggttctggcgcggcggttgatatatttgaccgtgtattcagacataacacgccctccttacactgaaatcgttattttttcgaaaacagcagctttttcttgccgtttgcgagccggtcggctgcgcggatatattcgagcgggtactttgggttgttcgcgcgctcgatccagccggtatcgcggtcgacgcgcttggaaacgccgcctgcgccgagcgacaggatggtctgcagctcctccatcatggtcacattgtaaaagcattcggtgcccggtctgcaccaaccgacgttctcgtagccgcctgccatgaatttctggcggtagagatagtacgggccgtagcctgcctgcggcagcgcatgataggcgtagtccagcatgcgcgagaccgtctcgtgctgtgcggcggccgccgccttgtcggtgaggtccgcgccgcgcttgatggcgagggtgtggaccgtgatattctccggggcgagcccgatgagcgtgtcgatggtatgcgcaaaggtctcgggcgtgtcgccggtcagtcctgcgatgacgtccatgttgatctcgcggaagccggcctgccgcgcctcgtcgaaggcgcgcagcacatcggccgccgcgtgctttctgccgatcgccgcgagcacgctgtcctccatggactgcggattgatgctgacgcggccgacgccggcgtttttcagcacgcgcagcttttccggcgtgatggtgtccgggcggccggcctcgaccgtatattcgcgcagcgccgacaggtcgaagctgtccgcgagcgcagcggtcagccgttcgagctgctccgcggacagcgtcgtcggcgtaccgccgccgatgtagatgctctgcacgcgctttccggcctgccggacgagcgccgccgtctcgcgtatctcaccgcacagcgtttcgagataaggctcgataagcgcgcccgactgcgcggtcgtcgaggaaacgaacgaacagtagtagcagcgcgacgggcagaacgggatgccgacatagagcgaaatatcgtccgggccgatctcctgatccagctccatcgcggtcgcggccgcgcggatggtgagcgcggtgcgctcgggcgaaacatggaagctgctgcgcaggatctccgccgcctcgccgcgtgtctttccccgctcgaccagaccgcgcgcgagctttgccgggcgcacgccggtgaggctgccccagaccggcggctcctcgagaaacggtacgaccgcgtcatagatggacgtcttaacggctgtgctgacggcacgcttgcgcgaaagctcatccagaccctccgtcagaacaggaatgctccctgcatgcgtctcgccgccgatcgtcacgcgggcggccgcgcacagacagccgtcccgctcggtgagcgcggatatgcagatgtcgccgtcctgctcggtctcgacgcgcgtcagcgtctcagtcggcagcaggtgcagcagcatctcctccgctgcgtgcttcatctcatgtccttccagtatgtatttcatcggcctctcgcctgcagcatatagggatttgccgcgcgctcctcgtcaagggtggagatcccctcgtgaccgggcagaaccttgtagtctccctcgagctcggaaaggcgcttcagcgagcgcagcatggcggaaaagtcgccgccctcgagatcgcagcggccgcattcatgacggaacagcgtgtcgccggtgaacaggcagtcgccgatcctgatgaccgacgagccgggcgtatgaccgggcgtgctcatatagacggcggtcaggccgccgaaggtgacggccgtgccctccccggccaggatatccggcgtatcctgcacatagctgcgcgcgagcgagcggaactgccccatattgtcgcggctgagcagccaggtgtccgcctcggggcagacgaactgcgcccctgtcgcctcgagcacatcgtgcaccgcgaggatatggtcaaagtgcgcgtgcgtcagcagaacgtacctgaccgtgagcttttcctccgcgactgcgtgcagaatggacttcgcgttgtcgcccgggtcgatgaccgcggcctcgcgcgtcgcttcgtcatatacgatatagcaattcgtgccgacaacgccgacagtgagctgcattactttcatagtgatgtgattcctttcttatcttctcatgtccttcgtgtccatccagagcgtgaccgggccgtcgttgagcagctcgaccttcatgtccgcgccgaactcgccggtctcgaccggcagaccgctctcgcggcagcgtgcgatgaacgcttcatagagcggaatagcggtctcgggccgcgccgcgcccgtaaagctcgggcggttgcccttgcggcagtcgccgtagagcgtgaactgcgagacgatgagcagtccgccgcccacatccgcgagcgagcggttcatcttgtcgttctcgtccgtgaacacgcgcatcttgaccgtcttgtcggccagatagaccgcgtcgtcctcggtgtcgccgtccgtgatgccgagcagcaccagaaagccctgcccgatttttccgtgtaccacgccgtcgatcgtgaccgaggcatgggaaacgcgctgtaccaacgctctcataaagtatattctcctgtcctgttttataatcagtaaaataccaaaacgccacagccgcttcgccatgacgtttcagcatcgtaaaatcagtttgtgtcgaccgttctcgtcacgtccaccacgcccttgaccgagcgcaggcggctgatgatgttgttgagctggtgcacgctcgtgacgtccaccagaacattgatcacgccgtagccgccctccagatcgcgcgcggacatatcgcgcacgttgatcttgccggtcgcgaacacgagcatggcgtcgctgagaacgccgatgcggttgcgcgtggagatctgaaggccggtcgagaagcggttgcggctgtcgctgccctccgcgacgtcctcatcccaccaggcgcgcacccaacggtccgggtcctccttcatgtggacgttgacgcagtcgcggcgatggatggacacgccgtagccgcgcgtgacgaagccgacgatctcgtcgcccgggatcggcgtgcagcagcgcgcgaacttgaccagacagctgtcgatgccctcgacgaccacgccgtccgaggacttgcccgaacgcaccggctgctgctcctgcggatgggccgcccgttccgcctgctcgcgctgacggcgcagcttgccgacgtcgtccttgaccttgttgaggatctttgtgaccgtgatgccgccgtagccgatggcggcgtacatctcgtccagactcgagaacgagaacttgttgaatacgttgcggcggacttcctcgttttcgtagaagccgttgtacagcaggtttgcgcgcagctcgcggtcgagctcctctctgccgttgacgatattctcctcgcggcattccttcttgaaccactgtttgatcttgttgcgcgcctcggtggtcttgacgatcttcacccagtcgcggctcgggccgtgcgcctccttggaggtcaggatctcgacaatatcgccgtttttcagctggctgtcgatcggcgcgatgcggccgttgaccttgcagccggtcatgcggttgccgacggcggagtgaatggcgtaggccaggtcgatcggcgtcgcgccggctggcatgttgactacgtcgcccttcggggtgaatacgaacacctcgtccgcgaacaggtcgaccttgatattcttgataaagtcctcggcctcggtgtcctgctgcgcctcgagcagctgacggatccatgcgaacgtctcctcgcccgccttcttatccaggccctgcttgtacttccagtgcgccgctacgccgtattccgccatcttgtgcatctcggccgtgcggatctggatctcgaacgggatgccggcgcggccgatgacggtcgtgtggagcgactggtagccgttcggcttcggggtggagatatagtccttgaagcggcccgggatgggcttgtagaggtcgtgcacatagccgagcacgttatagcagtccgccacggtatccacgatgacgcgcaccgcgcagatgtcgtagatttcgttgatggtcttgtgctgcgcatacatcttgcggtaaatggagtagatatgcttgacgcgcgcggaaatggtgttgttgatgtgcgcctccctgagcttttcggagatacgctgctgaatgcccttgaggaactcctcatgctgctcgctctgcgccttgaggccctcgacgatctcgttgtagccgatggggtcgaggatcttgagcgaaagatcctcaagctcccacttgatgcggctcatgccgagacggtgtgcgatcggcgcatagatctccatggtctcgagcgccttgtcgcgctgcttgcgctcgggcaggaactggaacgtgcgcgcgttgtgcaggcggtcggcgagcttgataaggatgacgcggatatcctttgccatcgcgaggaacatcttacgcagatcctcgaactgctcctgctccttggagtagcgcagcatgcccaggcgcgtaacgccgtcgacgagctccgcgaccggcgtgccgaacttgttctcgatctccttgtagccgaattcggtgtcctcgatgcagtcatgcaggagtgcggcgcagatggaatcggtatcgagacccatctcgaccacgatctccgcgaccgcgaccggatggatgatatacggctcgccgttgcggcgcttctgcccctcatgggcggcggcagcgcactcgtaggcggcgcggatcttcttgatattggcctgcgggttctgtttgctcacccgctcgagcaggaattccagtttgttttgcatagtttgttcccccattcgctcaccccgccatgctttgcagtgtccgcagcacgacggagccggaaatatccgccttaccctcgtaaggcttgaggcagacgtttatcatgccctctttgaaatggtagctgatgaggccggactcggaaaagacgtcgagcgagacgaggagcttgccgatgttgatctcgcgtctgctctcccaggaaacgcggcgcgagagcgccccgtcgggcacggagagccgtccgtcctccgcgcggcagacgatatgccgccagacggcgacaagatccttgcgctcggggagcagccgccgcgcctcgagcgcggtcagcggaccgtcctgcatcagaatgttgtaaagattgaggatcagctggtcggcgcggtgctcgcactcgctcagctgcacgtcgcagatgacaagctgcacgctgcggcggttatggtattcgttgatctcgagatggaacgccgcgtccaccgtgctgcccgggacaaagcccagtccgccggcgcccgttccgaaccagatggcattaaaccgcgtcccgtccttggagagcgacaggcgcacatggcggtcgctcgaaagcggcgtgatgtcctcgacgatcaggtccttcatgcagaacacaggctctgcgttctgcattccgtacggctcgagcatggaaaggccctcgatattctcgatggtcagccattccttttcgaccatgcagtcgatatgcagctgcggaatgagctgctgccgggtgacatgggtctcggcatatgccttgaggcgcgccttgagcgcgtcgatattgctctcatcgatcgtaaggccggctgcgagcgcgtggccgccgtagcggtcgagcaggtcggagcagctcgtcaaagcgtcgaacaggttgaagctgccgatcgagcggcccgagcccttgccgacgccgtcgctgtcgatcgagatgagcaccaccggacagccgtagcggtcgcacaggcgcgagcagacgatgccgatcacaccctgatgccagccctttccggcgagcacgatcatcttgtccccgaccggatcgtattcgccccgcagctgcgtgagcgcctggttcaggatctcgttctccgtcgtctgccgcagcttgttctgctcacacagctcgacggcgagccggatcgcgcggtccatgtcctgcgtcaggaacagctcggcggcgaggtccgccttgcccatgcgcccggcggcgttgatgcgcggcgcgagcacgaaactgatggtcgaggcggtcaggtggcgctccgccatgccggcctccgcgagcaggcgctgcagaccgatgttgcgcgtcctttccattctttgcagaccttccgcgacaagaatgcggttttcgcccacgatgggcatgacgtccgcgaccgtgccgagcgcgacaaggtcggcgtagcggtcgagcatcgcgtccgtgtcgccgtcgagcgcgcagatcagcttgaatgccacacccacgcccgcgaggctgtcgaacgggtaggtgtccccggcctgcttgcagtcgatgaccgcttcggcctcgggcagctcgtcgtggcactcgtgatggtcggtgatgacgaccttcatgccgagctcgcgcgcgagcgcgatctcctcgttcgcggtgatgcccgagtccacggttatcatcaggcgcgtgccgcgtcggtacagctcctccatcgcctgccgcgtcagaccgtagccctcgctcagacggttcgggatataatattcacaggctgcgcccgccgtgcgcaggtaatcgaccagcgtgcaggtcgcggtgatgccgtcgacatcgtagtctccgtagaccacgatgcgctcgccgcgctcgatcgcgccgcgaatgacaccgaccgcccggtccatgtcgtgcatggcgaacgggtcgtgcagaccgctgcgcgcacagctgagaaacgcccgtgctgcggctgcgttttcgatgccgcgggcggaaagggccgccgccgtgagcggcgcacagtgcatttcctgcgcgaggcgacgcactccgccggcatccggctcagcgatcatccatcgtttcgctttcatagctctccctcttttggtttttttattacaactattataccaaaacgacgggataatctcaacatttttatgcacatagtcgaaaacgggtgatttcttccgaaaccacccgtaattttgtacattttattcacttttcgcctgcattgcggctattgttttcgcgagaacagggccgagatagcggccggtatacgatttttcgcactgtgcgacctcctcgggcgtgccgctcgcgaccagtctgccgccgccgtcgccgccctcaggaccgaggtcgaggatataatccgcgaccttgatgacgtcgaggttgtgctcgatgacgacgaccgtgttccccgcgtccacgagcttttgcagcacatccacaagcctgtgcacatccgcgacgtgcaggccggtcgtcggctcgtcgaggatatagatggtcctgccggtcgagcgcttggaaagctcggtcgcgagcttagcgcgctgcgcttcgccgcccgagagcgtcgtggaggactgaccgagcttgacgtaaccgaggccgacctcgcgcatggtctccagacggcgtgcgatcttcggcacgttcgcgaagaactcgcacgcctcgtccaccgtcatgtcgagcacctcgtagatattcctgcccttgtagcgcacctcgagcgtctccttgttgtagcggcggcccttgcagacgtcgcaggggacgtaaacgtccggcaggaagtgcatttcgatcttgagcaggccgtctcccgagcaggcctcgcagcggccgcccttgacgttgaaggaaaagcggctcgggccgtagccgcgcgccttcgcatctgccgttttggcgaacaggtcgcggatgtcgttgaacacgcccgtgtaggtcgccggattggagcgcggcgtgcggccgatgggcgactggtcgatatcgatgaccttgtcgaggttttccagtccctcgatgccgtcgaacgcacccgggcgggtttttgcgccgttcagctcggcggcgagcttcttgtagaggatctcgttcacgaacgaggacttgcccgagccggaaacgccggtcacgcaggtcagcgtgccgagcggaatggtgaagtcggtgtgcttgaggttgttgaccgcgcagccctttaccctgagctttttgccgctgcccttgcggcgcacctcaggcacggggatgaatttccggccggaaagatactgaccggtgaccgaatcgctcttcagcagctcgtccaccgtgccctgaaatacgacctcgccgccgttacggcccgcgcccgggccgatgtccacgatatgatcggccgcgaacatggtgtcctcgtcgtgctcgaccacgatcagcgtgttgccgaggtcgcgcagacgcttaagcgtcgcgagcagcttgtcgttgtcgcgctgatgcaggccgatggacggctcgtcgaggatatacagcacgcccacgagcgacgagccgatctgcgtggcgaggcggatgcgctggctctcgccgcccgacagcgtgccggacgagcgcgagagcgtcagatattccagaccgaccgactgaaggaagccgaggcggtccatgatctccttgatgacgcggtcgccgatcttgtgctgcatctcactcagccggagcgtgtgcagaaactccatcgccttgacgaccgatttttccgcgaattccgcgatattcagtctgccgagcgtgaccgcgagcacctcggggcgcaggcggcggccatggcaggccggacacgggctttcgctcatgacctcctcgatctcgccgcgcgaccagtcgctgttcgtctcgcggtagcggcgctcgagattggggatgatgccctcgaacggctggcgcatcacgccgcccgaaatgcggctgaccgacagctcgagcacctcgtctcccgtgccgtagagcagctcgtcgagcgcctgcccggacaattcctcaatgggcgtttcgagcgaaaagccgtgctttctgccgagcgcagtgtagtacatataggaaatgctgcccggctcggcgttcgtccaaccggtcgcgcggatcgcgccctgcttgatggacagtctgcggttggggatgacgcggtcggggtccacgaccttctgaatgccgaggccggtgcagaccgggcacgcgccgtagggattgttgaacgagaacatgcgcggcgtcagctcctcaatggaaatgccgcagtcatcgcaggcgtagttctgcgaaaagcgcagctcatcgccgccgatgacatccgcgatgagcagaccgcccgacagcgcgcacgcggtctcgaccgagtcggtgatgcggccgcgcgcgtccggacggatgacaacgcggtcgacgacgatctcgatgctgtgctttttcgtcttggcgagcttgaactcttcggaaaggtcatgtacctcgccgtccacgcgcacacggacatagccctgcctgcgggcatcctcgaataccctgctgtgctcgcccttcttgccgcggatgaccggcgcgagcagctgcacgcgcgtcttttccggcagcgccatcagccggtcgatgatttggtcgatggtctgctgatggatctcttttccgcatttcgggcagtgcggcgtgccgatgcgcgcccagagcagacgcatatagtcgtagatctccgtgaccgtgccgacggtcgagcgcgggttctgcgaggtggtcttctggtcgatggagatggccggggacaggccgtcgatatagtccacatccggcttgtccatctggccgaggaactgccgcgcatagctcgacagcgactcgacatagcggcgctgaccctcggcgtagatcgtatcgaacgccagtgacgacttgcccgagccggacaggccggtgaacaccacaagctcgtcgcgcgggatttcaatatcgatgtttttcagattgtgctcacgggcaccttttattttgatgatgtctttcattcgtgttttctgtacctcgttttatttttcctccagcgccttgatctggtcgcgcagctgggcggcgatctcgaattcgagcatcttcgccgcctccttcatctggcgggtcagacgggcgatctcctgctgcttctcgcccttcgtgcgcagctttttcttgctgctcgtcggcacgttggaggtgatctcgatcacgtcctgcacctttttgcgcacagacctgggggtaatgtcgtgtgccttattgaacgcatcctgcaatgcgcggcggcgctcggtctcgtccatcgcgcgcttcatcgagggcgtgatgctgtcggcatacagcacgaccatgccgtgctcgtttcgcgcggcgcggccgatggtctggatgagcgaggtctccgagcgcaggaagccctccttgtccgcatcgaggatggcgacgagcgacacctcggggatatccagaccctcgcgcagcaggttgatgccgacgagaacgtcatacacgccgaggcgcaggtcgcgcacgagctcctgccgctcgatggtcttgacgtcgtggtgcatatagcgcaccctgatgccggcggtctccagataatcggtcagatcctccgccattttcttggtgagcgtcgtgacgagcacccgctcgcctctggccgttctcgcgttgatctctccgatgaggtcgtcgatctggccgtctaccggacgcacaacgacctccggatcgagcagaccggtcggacggatgacctgctcgacgacctgacccgagcgcgagagctcgtattcgcccggcgtcgcggagacataaacgatctggttcagccgctcgttgaactcatcgaagttcagcggacggttgtcataggcgctcggcaggcggaagccgttttcgaccagactttccttgcgcgcgcggtcgccgtgatacatcgcgcggacctgcggcagggtaacatggctctcgtccacgatcagcagaaaatccttcgggaagtagtctatgagcgtgtagggcgaagagcccggcgcacggcgcgacagcacgcgcgaatagttctcgatgcccgagcagaagccgatctcctgaagcatctcgatgtcataccgggtacgctgcgcgatgcgctgcgcctcgatcagctttccgttttcctcgaagtatctgacgcgctgctccagctcctcttcaagatccttgatggcctcctcgagcttttccttcggcgtgacatagtggctcgccgggaaaactgcaatgtgaccgagctcaccgagcggaacgccggtcagcggattgatgcggctgatgcggtcgacctcgtcgccgaagaactcgacgcgcaccacatcctcatccgagtataccggccagatctcgaccgtgtcgccgcgcacgcggaagcggttgcgctcgaaggcgatgtcgttgcgctcatactgaatatcgatcaggcggcggatgagcgtgtcgcggctgagctccatgcccggacgcagcgaaatgaccatgcttttgtagtcgatcgggtcgccgagcgaatagatgcacgacaccgaggacacgatgataacgtcgcggcgctcagcgagcgcggaggtcgcggaatggcgcagacggtcgatctcgtcgttgatggcggagtccttctcgatataggtatcggtcgaggcgatgtacgcctccggctgatagtagtcatagtaggagacgaaatactcgacggcgttgtccgggaagaactcgcgcagctcggtgcacagctgcgcggcgagcgttttattgtgcgcgagcacgagcgtcgggcgctgtgtctgctcgatgatgttggccatggtgaaggtcttgcccgagccggtaacgcccttgagcgtctgctcctccagaccgttgcggatgccttcgacgagcttcgcgaccgcctgcggctgatcgcccgccatcctgtacgggcttacgatgtgaaattccggcatttgcctgacctccctctgtttctcttatacgtcgtggatgcgctgcatcgcctggcggagcgcacggctcacgagcgggctgtccgagatctccgggaacggcacggtcggctcgggcgcgccgtcgtgcggacgcaggctcctgcccatccagagaacgtcgcgccactggccgaacttgtacatgctctcctgataggcgcccgaaatgacaaagcccatcgacttgtggaacttcatcgagcgctcgttgggcgaggtgatgccgacatagatattatagtagccctgcatcgcgagcacctcgaacagcgcggcgtagatcgcgccggcgatgccgtggcggtgccagtcctgcgcgacatagatcgaggtctccaccgaccactggtatgccgcgcgggtgcggtgcggagaagcgtagccgtagcctgcgacctcgccgtcgatgatgcacacgagccacggcagcttttcggtgaacgtgcggatgcggcgcgtaaactcctcgagcgtcggcgcatcgtattcgctcgacacggtcgtctggataacgtagggcgcgtagatggcgagcatttcggcggcgtcgtctacggtcgcgggacgcagaatgatttcagacatatgttttccctcttttcgcttttctccgtgcagacggatggtttcgtcggtctcttattcttctattatatctcctgcgccgccgctcttcaactgatttctgcgcaccccctgccaaaaatcgcacatttgttcgtgtcatttttgtgcgcttttgcccgtcgaaaaccgtacaaactgtgcctctcctcgttgcaattttccccctcgggtagtatacttatagtcactaagcaaatttccggcaagtgtatttttccgcgccgcgcgccctgttttcctgtgtcggcgcagcgcgcggatgagtgcaggaccaaaggaggtatcccgtattatgatccgttacggctttatccataccaaggaggacatcaagtttcttgtgctgttcgcaatggatcttctccccttccccgttacgttcgagacggtggtcgatctgattacatggtgtgacgacggcttcggctatttcgagctgagcgaagcgttttacgagatgatccccaccggccacatcgacgagagcatcgaaaacggcgcaaagctctacgccatcaccgacaagggccgcgaggcgacgcgcatcttcgagaagcagctgccctatccggtgcgcgaggcggcgcagcgttcggcgctccgcgtcgtgcgccagatccgccgcgacgccgcgatccatacctcggtcaccgagcacggcgagcacgacctcaccgtccgcatggagatggagcaggtgttcgctatcgaaatggcggtcgtcagccacgaacaggcgaccatgctcgagcgcaccttcaaagccaacgccgaagcgatctaccagaagctgctcggcgttatgacgcaggaatatcccgattaaatatcccgattaaaagaaagaagcatccccgtgaaacacctcaaacaactcgcattgctgctcgcgtgctgcgtcggcggcaacctgatctctgcgctgctgcacggcgcccttcccggcaacgtgctcggtctcaccctgctgctcgtgctgctcatctgccgcgcggtcaagctgcaccatgtggaagacaccgccgattttctgcttcagaacatggcgtttttctttctgccggcgtgcctcggcattctcgacattttcgctgacatcaagggcgagatcctcgccattctcgcggtctgcctgctcacgacgctctgcaccgccgccgcgaccgctctgaccgtacatatcgtgctcaagctccagcaccgtgaaaatgaggaggcattcgaccgtgactgaaattctgacttcccccctgacatggatgttcctgtccatcttctgctacgccatcggcgtggcgatccagcagaaaaccggctcaccgctgtgcaatccgctgctgatcgcgtccgttctcgtcggcgttctgctcatcgtgagcggcacgacgtaccagacctatgaggaatccggtcagctgatctcgttcttcctgacgccggcgaccgttgcgctcgccattccgatctaccgcaagctcgatgtgctgctgcacaatctgctgcccatcctgctcggcgcgttcgtcggctcgtgtgtttccatcggcagcgtgctgctgttctgtcatctgttcggactgagcgactcgaccacgcgctcgctcatcccgaaatcggtcacgaccccgatcggtgtcgcgcttgcggatatgatgggcggcgtgacctcgatcaccgcgatcgccattgtcatcacgggcattttcggcgctattctgctgccgacgtttctcaagtgcatcggcgtgcgcaatccgatgcagatgggactgtccatcggcacggcggcgcatgcggtcggcacctcgcgcgcgatccagctcggcgagaccgagggcgcgatcagcggtcttgcgatcggcgttgccggtctgctgacggcgtttattgtttcggcgctgtcggtgtttatgtaaaaattgccgccgtctgacggcggagacgccggtgttcaccggcgggaacaagaggggacaggacaccaaacatggtttcctgtcccctcttgactccccttaccttccttctggacgcgactcccttcggtcgcgcgtctaaatgcgagggtcccacagggacgtttggtgccccaaggcacaacccttgatcgaagcgaagcctttcgcagcgacggcgttcgcgccctgcaccgaatggccgcgcactgttatgcgcggcaaatcgcgcaagctgacctcagggccttacagcgtcccaaaagcgaaccgacgcccggaaccgagcccccgtttcccccgtttcgccgcgcgaccgaagagtcgcggcgcaaaggagggtttgggggagtcaagagggggcaag

SEQ ID NO: 12934 - DNA, 29305 bp, Unknown
  gut microbiota DNA sequence
actttcggacgtccgtgttttgcgaagtcaaaacacagattgtcggaaaaacgatagtttttcgacagtctcgtctatcccctcttttcccggatattatcaacattttaaggagagaaaccaaatgatctactgcgtggaggacgatgcaggcattcgtgagcttgttgtctataccctgcaaaacaccggcatggaggcgcgcggcttcgccgacggcacggcgctgttctccgccctgcggaacgaaaagcccgacctcatcctgctcgacatcatgctccccggcgaggacggcatttccatcctgcgccgtctgcgcagcctgcccgacaccgccgcgctcccggtcatccttctgaccgcgaagaacaccgagtacgacaaggtcatcggtctggacagcggcgcggacgactacatcgcaaaacccttcggcatgatggagcttgtcgcgcgtgtacgcgccgtactccgccgcacgcaggacgccgtttcgtccgccgagcacgttctgctttccgacggccccatctcgctcgacgagcgcgcgcatacggtctgcgtttccggtcagcccgtccagctcacgctcaaggaatatcagctgctgacgctgctgatgaaaaaccagggcgccgtgctcacgcgcgacgtgctgctcgaaaacatctggggctacggcagcgagagcgagacccgcaccgtcgacgtgcatatccgcacgctgcgtcagaagctcggcgacggcggcgcgctcatcgagaccgtgcgcggcgtcggctaccgcatgggaggaaacgcatgagaaagcgcgttttcggcagcattttcctcaccgctatcgtaacgctcctgctgaccgcaggtctgttcctgctcgtggtacacgcagggctgacccgcgacctgcgcggcaggctcgcacgcgagggcggatatatcgccgctgctgtctccaccgaccgcggcctggaggagatcaaagcgctcggtacgctgtgtgcggaccgcatcaccctcgtgaagaaggacggcacggtgctgtatgacaacgaaacgccggccgccgaaatggaaaaccacggcacacgcccggagatccgcagggcggcagagaccggcgtgggcgaggacagccgcccgtccgaaacgctcgagacccagacgtattattatgcgctccgtctcgcaaacggcgacatcctgcgtattgccgcgaccgccgacagtgccttcggcgcccttgcgagcgcgtccccgtggatcgtgctcgtcgtgctgctcgcgctgctcgtggcggcgctgctcgcaagccgcctcacacacgtattcctcgcgccgatcgtatcgctcgacctgcatgatccgctgaaaaacgaggcatacgacgagctttctcccctgctgcaccgcatcgaccgccagaaccgccgcatcaacatccagatggatgagctgcgccgccgccaggccgaattcgatgacatcaccgcacgcatggacgagggtctggtgctgttctcctcctccggcgacattctgttctcgaacaatgtcattcatcagctctttccgcaggataaggccgccggcaattatctgacgctgtgccgcgacgcggcctatgtcgaagcggtcgagcaagcgctccgcggcggaagcgcgcacacgagaatggagaaaaacggccgtatctggtcgctcgcggccagctcggtcgctgaggacggcgcaggccacgccgccgtgctgctcatcgttgacatcaccgagcgcgagcaggccgaacagcagcggcaggagttcaccgcgaacgtttcgcacgagctgaaaacgccactgacgagcatcatgggctacgccgagatcatcgaggcaggtatcgcaaagcctgccgacgtcgttccctttgccgggaagatccgcaccgaggcgcagcgtctgctctcgctcatcgaggacatcatccgtctctcgcagctcgacgccggcggcgaggatatcccgttcgagccgatcgagcttcagccgctctgctgcacggtccgcagccgtctgcaaagcaaggccgaccgtctgggtctgaagatcgaatgtacgggcgaaaacgcgaccgtttccggtcagcgcagaacgctcgagcagatggtgttcaaccttgcggacaacgctctcgcgtataaccgcccgaacggcagcgtgacgatcgaaaccggcacggacagcgacggcgccccctttgtccgcgtctcggataccggcatcggcatcgccccggcggaccagaagcgtgttttcgagcgcttctaccgcgtagacaagagccacagcaaaatgaccggcggcaccggtctcggcctgtctatcgtcaagcacggcgcggccctgcacggcgcggcgctcacgctcgacagcaccctgaatgtcggcaccaggattacgctgacgttcccgaaaaacaggaaataacgaaaaaagtttattttcatgcaggaacggcagccgcgcggcagcgcgcatgaaaaagcgtttgctgcgcaaacgcatgagcccgtaggcctctatcctcaaaaatattcaatgagagaaaccgggggcgtgtacctcggtttggatactttgagagggagaaagtttccgtatgggaactttcggacgtccgtgttttgcgttcgtcaaaacacagattgtcggaaaaacgaagtttttcgacaaactaaaaaggcacgcctgaggcgtgccttttgattgcttttcgagttcttagcgagtcttgcggttagcagcgaacagctttgcggtgcccggatcgtttgccagctcgaacattgcggaacccatcaggaaattgtgaaaattcttcttcatttttcattacctctttcttgtggggaagcactctttcgtgttccctcagctcattttttattctggtagtattatagcgcggcgggacgcaatgcgcaagcgcaaacgtgtacggaatatacaatcggcgaaaaatatttttagatagtataaccaaacagtcccattaaatccactttcacaattaaattcatatgatttttaataccagaaaacgtttgcgtaaattgaattcctatgaattttcatattcatcggtcatttgtgctattttttgctctaaaaaattgtaacttgcgtcattgacaagcagcgttccttgaattattatataatatatccaatcgcaaacgtttgcgaatttgtaaaatacagcgtattgtgcaaagacgctgcccagaaaggaggctctcccaggcaatccccccgcgctgaaacgcacattccccccgtgcagaccgagtcgaaaacacagtttcgcgctccgctgcatcaccgatacggaaagaaggtcaggttctatgatgaaaaaacgattgacaagtctcgcactgtccgccatgatggtgctgtcaatggttcccgcaactgcattcgcggcgaaggacgcaggcactccgccgacctacaacagcgcaaccggctgctatgagatctccaccccggcccagctcttatatctctcgggcaagtggaaagacggcgccccgcgcgatggacactatgttctgaccgccgacatcgacatgaccggcgtcaagggcttcaagccgatcgcatccaaaaaagagcagggctttaccggcacgttcgacggccagttccactcgatcaagggccttcgcattgaatatgaaaagaaatatgctggtctgttcggctatgtcggcaatcaggacgaccaggcgtatatcaagaatgtcgctctgctcgactgctatgtaaccggtcagcagaacgtcggcgctctggccggcgtaaactacggcacgatcaccggctgtgccgttaccggtgaggtcaagtgcctcgatctgtccaactcgcataccgcgggcggtatctgcggcaagctgaaggagggcgaaggcccgatcgtcggccatgtcgaggactgctacgtcaacgccgatgtttccgcgccgtatgacgcgggcggcatcgcaggcattcaggacggcggcggctatctggcccgctgcttcgcagccggcacggtcgataccatcgcgacgagcggcacggtaggccacgcaggcggcatcgcaggctccttcaacgccggcgagacgctcaaggacagcgtttccgcacagagcgtcatcaagggcgtgcaggacgttgacaagatcgttggccagctcgacgacgaggcagcgaccaacatcaccggcaacatcgcttgggaaggcacgcagcttaccggcaacgagccgaccgagcagcccatcaagtgggaggacgtttccactgagaaaatgaccagcaaggcgacctacgaaggtctcggctgggatatgagcaaggtttgggactggagcgaaagcagcaagcagcctgtcctgcgcggctttaacgcttctatcttcccggctgtcgattacaccgtaagcggcacgcgcatcgtttcccgcgcactcaacaccgctccccacaacggcaaggctgaggtatccgcgcgcatcgtctccaccgacaagatcgagagcgctaccctgtactacggctacgattccgccaaggtcgataccgctgttgccatgaaggcctccggcgatacctacaccgcttccctgccgaccgacaaggtaggcgatatgttctactacatctcggtcaagaccaacaaggaaaccatcaccaagccgaccaacagcgcagagcccatcgttctgaacatcgacgacggcaaggtaaagggcgaccccgaccagatcaccatcaccccggacaccaagcagggcggcctccgcttcaactggctgaccgatccgcgcgtcaccaagaccgtgatccagtacaaggtaaagggcgcttccaagtgggagagcaagaccggcacctcttatgttgagtccgtaaccgcaggctacaaggaaaaggctgctcaccgcgttgagatcaccggcctgaccccgtccgctgagtacgtttaccgcgtcggcgacggcggcgagttcatgagcgacgaaaagtccttcaccgctccgaagtccgcagacgacaagaatttcaaggttatcttctactccgacccgcagtccgagtccgttgagaactacatgagcttcaagtattctatcgaccaggcgctcaaggtttgcccgaaccccgacctcatgatctccgcaggcgacaccacccagaacggctacaagtccaccgaatgggaagcatgcttcgaagtcatgcatgactactacgcgaagtacccgaccgttacggtcgcaggcaaccacgagatgaagggcgactggaacttcatttccttcgcacagcgcttcaatatgtccggcgcaaagaccggctacccccagtttgaccgcaccatgggttactttgagtacggcgacgcgatcttcgtcatcctgaacggcgaggttactccggccgacaagaagcctgaaatcatgaagaaggagctgcagtggtgcaagagcgtgctcgacgcttccgacaagaagtggcgcatcgtcatgacccacgcaggcccgtacacctccaaccatgatccgctcgacgtccgcgactactacatcaacgacagcgagtattcgctcgataagatgaacgttgacctgttcctcaacggccacgaccacatctacatccgctccaccgtcaagaacgacatcaaggttaacaccggcgacggcaccacctacctcaccggcggcacggtcggcaacaagttctatgagtacattccggcacgttcggattactccaccgacttctatgtcgacgaagaggataagcaggtattctccgtcatcgagttctccgaggattccatcaagggcaccgcttaccagaagcaggacccggacgactggaacagcttcaaggctgtcgacagctacgagatcctcaacaacctccagaccggcaagcaggtcaccgattacaccgacgtttccaagaacgcatggtactatgacgctgccaagtacgtcaccgacaagcatctgatgagcggcgagaagccgtatgtattcggcgcagacgaggctctgacccgtgcagaggtcgcttccgccctgtacaatctggcaggtcagcccaaggttgaactggcgtccttcaccgacgttcccgtgacccatcaggcacgcaccgctatcgcgtgggcggccaagaccggcatcatgaagggcgttggcgacaacaagttcgagcctgaccgcagcgtatcccgcgaagagatcgcgaccctgctcacccgtcagcgcaagctgtccggcgtggatgtaacggcagacaagaacgaggtttccgctttcgttgacagcgcgaagatctcctcctgggcagtagacggcgtcgcttactgcaccaagtccggcctcgtcaagggcaacccgggcaaggtattcgcaccggccggcaacaccacccgtgccgagctcgcaacgatcattcagcgcatcgctgcataatctcattcatcctttctgacaatatcatttctccttacatgcgatccccttttgcagcctgccgtccgatacactcttcccgtatcgggcggcaggcacttttttatgtctgtcgaaaaacttcgtttttccgtaaaaaccggacatgatcgacagactgttttttaccgaaagcagtcgagcaggtacaggcggaactcgacggtatcggtattcccctccctcgcactctcgcggcaggctatggagaacgccgttccccaccacgctgcctttctctgttccatcggggcaaacgccgccgtcacgagcacggtcagcgccgtcatcagcgcgcaggccgcctgttttcttctgttatccatgcaaaaaaccgccctttccggtaactgtgttcacagtctgcccggagggcggtctttttatacgtatttcgcgcttactgcacggtttccgtgaggaaagtctcggagaagcggcgcgcgagcacggtcgcggcggcgtccgccgcgatgcggtcggagaacaggccgtaaacggtcgggccagagccgctcatgagggtcgcgtccgcgccgttctcgcgcagcacgctgcggatttcgccgatctggcggcgcttggtcgcggtgacggtttccataacgttcatcagacggtcgcagacgcccttgtagtcgcagctttcgagcgcttttatcatgccgtccgtgtccggacgctgcgtcagcggcacgctgtcgatctcctgatagacctccttggtcgaaaccgcgaacggcggcttgcacagcacgacatagcagggctgcatgggcgaaagctcggtcagtttttcgccgatgccctcggcaagcatcgtaccgccgatcaggcagtacggtacgtccgcgccgagcttgaggcccatttcgcacaggcggtcgcgcgacaggccggtatcatgcagctgattgagcgcgcgcagcacggcagccgcgtcggtcgagccgcccgcgagtcccgccgcgatggggatgcgcttttcgataaagatctcgcaggtttcgagcggcacgccggtttccttgtagaacagctcagccgcgcggtaggcgaggttgctgctgtcggtcggcagaaacggcatgctgcacgaaagcacgatgccgcgcggctttttctcgccgcgcacgatggtcacgcgcacatcgtcatgcaggtcgaccgactgcatcaccatcttgaccagatggtagccgtcctcgcgctttcccgtcacatcgagcgtcaggttgatcttcgcgcgagcctcgatcatggtgcgctcgcgcgtttcctgttgtttttttccgaaaatcatgaagttttcgccccttttcccctttttctcagccaagcggcacgaaatgcggctttctctcccggaacacggtaacatgagtgaagccggcgtcctgcgcgttccttacgctgtcgtcaaagccgcgtccgacagcggcgagggtatgtgcgtccgaaccgatggagatgcgctcgccgcccatgcgccggtattcatacagcacgttctgcggcggcccgacgcgcttctgccagccgcccagaccggccgcgttcagctcgagcgcgtacccgcggtcgatgcacgagcgcagcacctgctcgacacggtccataaaatggtcgaacgagggcgtatagccgtcgtacttcatcacgcgcagcggatagtcgatgtgcgcgagcacatcaaagccgccgtgctcctccattttgagcacctcgtcgaaatactcgtgcagaaaggcgtcgcagtccagcttctcgtattcatggaagtaaatatcgagatcgtccggcatggcgtgcatcgagccgatgaccatatcgagcggatgcgtgcgcacgaaatcgtccgccgccgggtcaacatggatctgtccgatctcgatgcccgcaagcacctcgattccgccgttcccggccggacggcgcttttcccatgcctcgcgcacgcagttctccgcgtcgcggttctcctccggcggccggcggcggaaaaagtccagatggtcggtcagaccgatgatgtccagcccggcccgttcgcaggccgcgatcttgtcgtctatcgtctgcggaaagtcggcgtccgccgaatatccggtgtgcatatgcaggtcaacacgcatagatttccctcgtttcgctaagggcaataccgcataacggtgctgcctcaaatattaaaatgtgagcgcggtttcgacaaagcagcccacgatgaccagtatcatgccggcgttgccgaacacggcgcgcatatccggcgcgcacgggccgtgcagccagatctggtctttgcggccgcgcacgagcaggataacgcccagaacgaccgacaccatccagaacgcgccgagcgccatgtcggacgccgcgcagtcaggcagcagcagcgacacgacggccccgaaaaagttcagcaccatgtgaagcgcgaccgaaacgcgcagcagccctgtgcggtagtacacataggcgagcagcagaccgagcaggaacgcatagaaaaactgctccagattggcgtggtacagcgcaaacagcagggcggaaacaaaggcgccgggcgcctgtccgtagcgtgcgagccgtcctgcgaccagaccgcggaacagcagctcctcgcacagcggcccgagcaggcacacgcagacgatgttgaccgcgagcggcatcgcgtttaccatatcgtccacgatcggcgcgggcgcgcggcctgtgaccagaccgacgaggtcggtcacggcgctgccgatgagcgagccgatccacatgagggcgaagccgatcaccgcccaccggacgaacgtccgcgcgcgcggcagctctttgcagaacggcatgggcggcatacccttgcagatgcggaacgccgcgggcagcgaaaccgcgtagccgccgaccagaataagcgcgtaatagagcgtatccggcatgcgcacgggcaggatatacacatcgagtgcaatgatgccgtactgccacgccgccgtccagatcagcacgaaaaacagcgccgcgccgatgcgcgagcagtagcgccgctcctgtttcagatccatatcttccatatttttctcccagagacgaaaaaacagggctgagccgcagcccgccccgttttttctgaaattactgtgcagcgcttaccagacgctcggtgtccttcgcaatcatcagttcctcgttggtcgggatgacaagaacgcgaacgcgagcccagtcgatggagatatccatctgcttgccgcggtacttgttcttctccggatcgatcttgatgccgaggtactcgagatgctcgcagacatcccagcgaaccgaacggtcgttctcgcctacgcctgcggtgaagatgatcgcgtctacgccgcccatttcagcaacgtaagagccgatgatcttcttaacggacaggttgaacatatcctttgccagagctgcacgagcgttgccgtcagcaacagcagtgtccaggtcacggaagtcggaggatacgccggagataccgagcataccggacttcttgttcaggatgttgatgacctcatgtgcgtccatgttctcgtgctcagccaggaactcgatgatggccgggtcgatgttgcctgcacgggtgcccatcggcagaccgtccagcggggtgaagcccatggaggtatcgaagctcttgccgccgttgatcgcgcagatagaagaaccattgccgaggtggcaggtgatcaggcgcagctcctcgagcggacggccgagcatctcagcagcctgctgggatacgtacttgtggctggtgccgtggaagccgtagcggcggatcttgtacttctcgtagtactcgtacgggatagcgtacatgtaatgggactggggcatcgtctgatggaatgcggtatcgaatacagcgaccatcggaacgtccggacccataacctcgcggcaggcctgaataccgatcaggttgggcgggttgtggagcggcgccagcggtacgcagtcctcgatcgccttgaggaccttctcggtgatgataacgctgtcagagaagaactcgccgccgtgtacgacgcggtggccgacagcgtcgatctcgctcatagaggagataacgcccttttccggatcgagcagcacgttgataacggactggatcgcttccttatgggtcggcattgcgatgtcgaacttgaacttctcgtccgacttgttgccggtgtgggtcagcacgccgtcaataccgatacgctcgcacaggcccttggccataacctcgccggaggcggtgtcgagcagctggtacttcagagaagaactgccagcgttgataaccaaaactttcatttgcaaaaactccctcatgccgtatttggcggcttgcacaaagccgcggaagcctatataataatgctatattcctattttacacgatttcggtcaaatgtacaagacctttttgcgcttcgcgctcgctgtaaaacccgttttacagcgaataagtgtccggacttcgccggacacggacggaaaatagttcccatgcggaaactattttctctctcaaggtcaaaaaaccgaggtacacgcccccggttttttggaatttgcaaagcaaattctattttatgacgcacaaatgtgcgcagttttcgcgcttccgcgcgagatgcgctgaatgtaactctttacgggaggtttttcgcttttataatggatactgcttttcctgtctgcggcatcgttgcagaatacaacccgtttcacagcgggcaccggtttcatattgagcggacgcgcgaaatgcttggagagcacacaataatcgtctgcgcgatgagcggaaatttcgtgcagcgcggcgacttcgccgtgctcgacaagtacgcccgcgcagaagcggcggtcagaggcggcgcagacctcgtgctcgagctgccgctcgcggcggcgctcagctccgccgaaggctttgcgcgcggcgcggtcgcgctgctgcacggcatcggctgccggtatctgtccttcggcgcggaaaccgcggatctttcgctggtccggcaggccgccgaggcgctgaatgcgcttccccctgccgcgggcaaccgttccggcctgtcctacgccgcataccggcagcaggagcttgcggcgctgaaccccgcggcggcggcgctgctcgcgagccccaacaacaccctcggcatcgaatactgccgggcgctgcgcgatttcccgatgcagccgctcgcagtcgcgcggcgcggcgccggtcatgacgaggccgctcctgcggacggcttcgcctcggcaagcctgctgcgcggatacctgcgcgagggcggcgaggagcggtgcgccccctatctgccggaaagctccatcgaggtctggcggcgcgaaaaggcgcgcggcgcggcgccggtgacgctgccggagggcgccatgctcactctgctgcgtgcggcgctctttcgcggcgcgctcgcgaccggctcggcagacggctttgatgaacgctgcgcagccgcggtctattccgccgtttcgttctcggatgctgtcgaaaaggcgcagacgcgccggtttccggccgcccgggtgcggcggacgctgctccgcgcggcgctcggcatctctccggacgcctcgcccctgccctcgtatgcccgcgtgcttgcgttcagctcgcgcggcaggacgctcctgcggcagcaggtcggcctccctctgatcgtcaagcctgtcaccgaaaagcagctgccggatgcgcttcagccgtctctgcggctcgacgcctttgcggacgacctgttcggccttgcccgccccgcgccgctccccggcggcgaacattaccgcaaaaccccgttttatctcacataagaagaaggaaccatcatgatcggactcggaactatcatcaactgcggctcagtgctcgccggcgcgtcggtcggcatgctgctcaaaaacggcctgtccaaacgctttgaggacaccatcatgcagggcatcggcctgtgcaccatgttcatcggcatcggcggcgcgctcagcggcctgctgacgctcgaaaacggccagctctccacgcagcacaccatgctgctcatcctctcccttgcgctcggcgcgctcatcggcgaggcgctcaacatcgaaaagcatctcgaggacttcggcattttctgtcaggacaggctgaaaagccaaggcgacagccactttgtcgagggcttcgtcagcttttcgctgcttatctgcatcggcgcaatggccattgtcggctcgcttcaggacggcctttcgggcgacgcctcgctgctcatcgcgaaggccatcatcgacggcatcgcggcggtcgtgttcgcggcctcgctcggcaagggcgtattcctgtccatcctcccgctcggcgtgtatcagggcggcctgacgctgctcgcgcgcttcatccgcccgtggatgaccgacgagctcatcgcgcagatgtcgtgcgtcggctcggtgctgatcttcgcggtcagcctcaacatgatacgaaaagacaagatcaaggtcggcaatctgctcccggcagtctttctgccagtggtgttctacctgctgagccggtttttccctgtattcgcaacgctgtaaatcccaatccaccggaagtttccacaagctgtggataattcctgtgcatcacccgctccccctgtttttgaaaggaacgcccctcatgaaaaaaatcacctctctcctgcttgccggactgctctgcgcaaacctcaccgcaccggcgctcgccgccgaggacacggcggacaccgccgcgcccggccagaccgccatcaccttcaccgacatgccgtcaagcccggaattcgtcgagtcgatcacctgggcggtcgaaaacggcatcaccaccggcatgtacgacggtcagttctggcctgactacacctgcaatatctcgcagatcctcacgttcatctggcgcatgagcggctcgcccgagccggccggtgaaaaccccttccgcgatgtgccgaacggcaaatggtatgccgccgccgccgtctgggcgcacgaaaagggcatcgcctccggcgacacgctgcacccggacgcgccctgcacgcgcgccatgaccgtcacctatctctggcggcttgccggttcgccgcccgagtccgactccccgttcagcgacgtcaagagcacggacaattatgctgccgccgtcgcgtggggcgcggcgaacggcatcatcaagggcatcaccccgacgatcttcggcccctacaacacctgcacgcgcgcgcatatcgtcaccttcctgcaccgttacagcgcctccctcctcacagaagcaccggctgaaacgtgaagatccacgaaaaaagctcccgttccgaaaaagtcggaacaggagcttttttatgctttttaatctaccagcttatccagctcggcaacgtggtgcgtaccggtcgcgacctgatgctccgcctgctttgcgtacatattgaccgcaaccgacgacttcttgatcgactgcatcgtgcctgcgccggcgacacagccgcccgggcacgccatgccctcgagcagatagccgttatacttgccggccttcgccatcatcatcagcttgcggcattcgctcaggccctccgcattcgcgactttgatctcgcggtcggggtacttttccttgatgacattgacgaccgcctgcgcaacgccgccggaaaccgcgaaattacggccgtctgcggatgcgtcgttgacgccgtgcgggtcctccttgagcgtgttcacatcaatatgacgcgcctcgaaaatgcccgccatctcctcgaaggtcagaacaaaatctacctcgcttcgaaccgtgcggcgcattgcctcgagctttttcgccgcgcaggggccgataaaggcgaccttcgcgcccggctgatggtgcttgatgagccgcgcggtcagcgtcatcggggtcagcgccatcgagatggagtttgcctgctccgggaacagctttttcgccatcacagaccaggccggacagcaggacgtcgccatgaacggcagcttttcggggacctccttgacgaagtcctccgcctcctgcgccgcacacaggtcggcgccgatcgcgacctcgatgatgtcggcgaagccgagctgcttcatcgcggcgcgcagcttgcccggcgtgaccttggggccgaactgaccgacgaacgccggcgctacggcagcgtaaacgcgctcgcctgcctgaatcgcgcggatcatctggaagatctgcgacttgtccgcgatcgcgccgaacgggcagttgaccagacactgtccgcaggaaacgcacttgtcgtaatcaatatccgcgcggccgttttggtccgagtggatagcgtccatgccgcaggccgcggcgcacgggcgcttctgatggttgatggccttgtacgcgcatacatcgacgcagcggccgcacttgatgcacttatcctgatcgatgatggacttgcgggtgaacggatcgatggataccgcgcccttcgggcagacctcgacgcacggacgcgccatgcagccctggcacacatcggtcacgcggacctgattttccgggcaggcgttgcaggcaaacttgatgatgttgatgagcggaggggtgtagtaggtctcctccttggtcgccgcgtcgatgttgtcggacagcggcgcatgctcagccgcgctgcggcacggcagacccatcgccagacgcaggcgttcgcctacgatagcgcgctccagaaaaatatcctggcgattggatgctacctcgcccggcatgatgtcatacggcagcgcctcgatgcggcggtcggtcggccactcggtatggtacgccatacgcgcgacctcggtaaaaatacggtgtcgaatgtctcgaattcgagtttccacgcctctcatgaaatcaaatcctccttgtgtgtgtcccctgtaatcattcttatcccttgaaaagccgcagagtctcaaaagaagctctgcggcggacttttgtccttatagtgccgccttgcgtgcggacataacgatctattatcagaatacagcatcagaggaaggatgtaaagaggaattgtagattttttaacaatatctttcgtacaattttcgctgttctttttgtatgttttgcccagaatctcttctgtgcttatctgtgctcctccgcgccgttcgggaactcgcgcaggatctcctgcgccggggcggcgatcgcggacggcaccgcgctgggacggctgaggaaatagccctggaacaggtccgcgccgagcgctcgcgaggtgcgcagctccgctgcggtctcgatgccctccgcaacgatctgcatgccgcgctgatgcgcataggatacgatgttgcgcacgacctcctgcttgttcgggtcgctttctatgccgcggatgatggaaatgtcgatcttgatgaaatccgggtcgagcgtgatgaggttgccctcattgctgtagccgctgccgtaatcgtcgagcgcatacaggccggacagcaccgtggagcgccgcttcatgttcagtatttcgaggtcgagatcctcctcctcggtgatctcgatgacgacattgcggccgatgccgctcgcgcggcggcgcatttcctcgacgtccgcgccgatcaggcagacgctcgcgatcgaattgacgaacagccatgtgttttccgcgagcaggccgctctgctgccgcaggcggaagatctcgggcacggtgaacatggtgagcttttcgatgtcatacagccgtccggtctcctgcgcgagcctcatgaccgtgccgggcgagcggagattgggcatttcggggcgcatgagcgcctcataggccgccgcctcgccgttccggtcgaaaattggctgaaaatgataggtcacgcggctctccgcgagcatctgctcgaattcctgcgcgatctgggtctcataggaggcctcgttgtatacgccgatgtcgaattcctgcatgccgcccttgtgtgagcgcttgacctgatacatcgcgaaatcggcgtatttcttgagcgaggccatatcgttcccgtcctcggggtaccacgccacgccgcccgagatgctgacggcgaacgaatcgccgttcggcaggacgatggacgcgcggcgcaggcggctctgcaggctgttgaggtcgcgcctgagctgctcacggctgtcgtagccgtagaacagcaccatgaactcatcgcccgacagacggctgcataccgagttcccggtcatcgcgtcgtgcagcgtgcgtccggtctcgcggatatagcggtcgccggtgtcgtggccgtaggcatcgttcagcgccttgaggttatcgaggtcgagcatcatgagcgccgcatggcccagacgggacggtgcgcggaacaggcgctcgcaggtgcggttgaacgccttgcggttgtaaaggccggtcagcatatcgtagtcgcgctcgtgctcgatgcgcagccgctcctcggtcatggccgtcacgtcctcgagcagaccgacctgcgtctgattttcaaaggcgatgtgcagccggatgtagcgcacgctgccgtccttctgcgggatgcggaacacgcagccaccgtccggcaggccgaaattctcctgttccgtgacgatcctttcgatcagcttttcaaaatcgtgcggcgacagctcgccctccggctctttgaggccgagcatagcgaaaaagttgtccgtcgtatagaccggcgcgcccttccgcagctcgtagccggccagcttgacgctcgccatgtcgatgatgcgctgaaagcgggtcgaggtgttgatgatgctgcggctgaggtcggtgaaggcggccgcaaagcggtccagctccgcgatgccggtgcgcgacagacgcggaaggtttcccggggcgagcttcgcggatgcggcgacctcgtccgacaggcgcgtgatcggcccggccagtctgcggctggaaaacaggcagccgagcagaccgacgagcacggtcagcagtatggtgatgaccagccactcctgcgcgctgcgcgaaaacgcgaacagccgggtcgtcgagaccgttccgaccagcatccagtggcttccctcggagaacggcgcattgcggctgtacagcgagagcggcaccacggaagcatagcagcgccagccgtcaaagcgcgtccagccgccgctctcgctctgcatatcgaccgcaaagacgcccgactggcttctgtcgctgtctgcggcggaggtcaccacgcggtgcagcgtcatgctgctgtcctgcgtggtatccggggaacgggcgagaaggtaggcgccgaagccgtcgttctgaagctcggaatacggcagaaggctctgcacgtagcgcgtgagcagctcgacgccgatcacgccgtagactgtcccgtccggatagatgagcggctgcgtgtaggagatgaccgggcggctgtctccggcgagcgtgtagctctcggtcgaccatcggccgtagtctgcggcgttctgaatgccgccgtcctcgcgcgcgcggtcatacggcaggcggaaaaagtcgtcctgcgcgccgcctgtgaccggaatgcccggctcccagttttcgctcgtcgaaatgctcattctgcgcatgaccgccgccggcgcgtgctcgaacagcagatcgtcgttcgtgacggaggccggcgcggacgggtcgaggtcgcgcaggtaaagacagggcagcgaaccgcctgccgtgcggctgatctcgcccgtatgcagcacgatatacacgcctgtcacgttcttttcgcgcagcgtgcgcaccatctggccgctgacctcatcgaacagcggcgtgcttttctcgttcgacgaggtgagcgaagccacggtttcgccctcctgaacaagctgcgccgccgcacggtttaccgcgctgtccagatcagaaaggtcttgcgcctcgatcagctgtccggagatataggcggcgcggttgacgacctgcttgtccaggatctgctccgcattgctgttcaggcgcgaggggaagccgctcagcgtgaacgacagcaggagcatggcgatctcgaccgcgagcacggcaacaagcgcgagaaagaccgtgctgaataccgatctctcgcgttctttttccgtctcgttttctctttttatgtgcatgatattcaaaggccgtgcattcctttcgccgccgtccggtcagccctcgcagctcctgagcttctccagtgtctcgttataccagttctcgaagcatccgtcggtcagaaattccgcctccgcgtccgcagcgctctgtcccgccgcaatgcgctcctcgaccgtcctgcggtcggccgatgcacggtcgctcatgcaggattccagtatactgcgcgcatcctttgcgccggtgaacgccggcatggtatacagctcgcagctgttcaccgtgtcgatcgcagtcgagaggatctccttcatgctgccgctcagcggcagtccgctctgctcgatggcgtccatatcgcacgccgcgtgcgtgaccggcatatagcccgagccgaccgaaaagctgatgttgttttccggctcggtgatccatttgagaaactcgaccgaagcctcgatctgctcgtcggtgccgcgggtcacgaccatgcctgcgccctgctgcaccgccaccggctcgcagccctcgaacgtcgggcagggcagcgcgcgcatcgtgatgtcgtagctccggccgtcgtcccggatgacctgcgtcggcaggaaggtcgcgctcgcgttcgagccgacatatgcaagcaggccgccgctcttgatctcgtcgctgcggaaacggccggacgcagagaaatatcccttgataaagggcacatagtagttgtcccacagtctgcgcacggcatcccggtcgaaattcagcgtcatcctgccgttctttatgcggaagatcggggcgcccagctccttcgcgcctgcgaggatatagttcgccatcgcatcgcggccgaacagcgccctgccgtcggccggcgcatcggtctgcgcgtccgtccagtcgtaatacttctccgccgtccgcacaacgccctcgacggtcaaaagatcgctgtaatccgcgcccgctgcctgcgcgaacttctgccagtcggtatcgttgaggaacagcagctcggtgcatttggcggtcgggaagatcttgatgctgccgtccccgtcgaagtcgccctcctccagataggcttcgatatacttttcgcgctccttctcatcgagatagggcgcgagatccacgaccagccccatccggtcgatggcatacgccgtgtccgcataagcggagaaaatattcggcagcgcctccgcgccgaccttgccctccgccgcattcatcacattggtctcgagatcgttcacgcttccctgaccggacgcgatgacctcgatattgcgttccctgccgaccgtgtcgttgaactcctcgacgagccggttgaacgtctccagctggtcgccgttatagtacgtccagacggtcagctcgaccggagacgcaaaggatgccgttccctgcgtaccgcaggccgagatgccgagcagcagcgcgcccgcgagcagcgccgccgcaaatctggattttctgttcatgttcttccatcttctctccgaaattacaatactcagtctggcgaaaaaacgaagttttcgccagagtcaatactgccctattgtatcatattctgcggcagatgaaaagcaggtgcgcctgccgaaaaaacgttttcggcaggccgtgctctgactgcacacagcgaaaatagtccggaaacagaaaaaaccgaggatattccccggtttttccagttttacacagttttcctcctgcaacgcgctttaccgtccgactgccgcctgcagtacggcggacgctaccgtaccggcaacgcgcgcgccgccgccgccgttctcgaccagaacgataaaggcatacggcgtgtcctcgtcgcgcagaaagcccgtgaaccatgcgttcggggtcttgtccgcgccgacctcggcggtgcccgacttcgcgcagatgtccatgcccgggaagcggtcctgaccgtaggtctcgataacattgttgtgcatgaggtccgcgatcgtgccggcggtcttttcgtcgatcagctgcgccgagtttttcgtgcggtagatgccggtcggcagaccgtagtcggtcgtggatttctcgatcaggcgcggcacggccgccttgccgccgttcgcgatcgcgcccatatactggagcatgctgatcgggcacatggtgtcctgtccctgaccgacgcctgcccacgcgagctggttttcgctcacgtcgaagtcaaaatgtcccgaagcggtctggatgccgtccacgcgcagcgactcggtcagtcctgccgcatcggcatattttttcatggccgccgagccgagctcaacggcaagctgaccgaacacgccgttgcaggaatttgcgagcgcagactcgatatcctgttcgccgtgcgcatacgggcaggtcacggtgtcgccgccgatctcgactgagccggtgcagttccactttctctggaacaggtcggggatgttctcgatcgcggcgttcagcgtcacgaccttgaagatcgagcccggaatggagttcgcggacagcaggcggttgacgtaaacgccgtcccacgccgggtcatccgccgcgatattcggcggatcagccggatcgaacgtcggcgtcgagaccatgcagaggatctcgccggtcttgtagttgtaaacgccgaccgtgccgctctgaccgccgagcgcctcataggccacgcggttgagctcggagtcgatggtcagatacacgctgttgcccgtgccgagcggcgaatacgcgcccgtgagcagattgtagccggacagcttgtccgcgaacgcagtcagcgcgcccgcgccgatgttgccggccgggtcgccgacggcatgcagcgtcgcacggcggatcgtgccgtcctcattatagacgcgctcgccgtcctcggagagcgtcgagagcacgacgccccggctgtcgatgatcgtgccgcccttgagcacgccctgattgttgtacagatggcggttgtaggggtaggaggcccagtcgtcgccgtccgcgacgaagcggaagcagaaaaacgcaaggccgatgccgagcagcgcggccagaatgaggcagaacacgcttcttttttcgattttacgcatggcttagtcctcccctctcagctcgcggcggcttggcaggcgcaccgcgaacgaagcgttctgacgggtgtccgtcgccttgaggaaggcgagcatgccccatgccgacagcatggacgagccgccgttggacacgaacggcagggtgacgccggtaaacggcagaatgtcgaccgcgccgaacacgttcagacaggtctggaacacgagcaggctggtcgcggcgcacgccgcgatggtgtaaaaactcgaacggcctgcgcggcaggcgcgcaccgcgaacaccgcgagcgtgatgatgcacagcactgtgagcaccgcgatgaccagaccccactcctcgcacagcatgccgaaaacgatgtcggtatccgccgccggcaggccggagagccagcccttgcccgcgccgacgccgatgagaccgcccgaggccgccgccgtcagcgtatgggtctgctggaagcccttgtcataaacgtcctcccagatgtgaccccacgacgcgaagcgcgccgcaacatgcggcttgatggtcagcatgaccatgccgccgccgaagcagccggcgcacaccagaccgagcgtcgcgaaatcgcccgagcgcaggtacgcgatgacgagaaaggtcacgaagaacacgagcgcggtgccgaagtcgttctgaagcgccagacagccgccgcacacgccggtaagaccgatgaacatccacaggttgcgtttgttgaacagacggtcaagcgtcgccgcaccggcgaaaatgtagcagatcttggcgatctccgaggtctggagcgacagagagccgaggcgcagccatgccttcgcgccgccctcgctcgagccgatgagcagcgtgatggcgagcaggccgaccgccgtcgcgcccatgaaccagcggaccttctgcgcgcgcgtcaggtcgcgcaggaaaaatccgagaatgaggaacatcgtcatgcccatcaaaatcgcgatgagctgcttgggcagctcgtccggaacggtcgagcccgtcaccgcgagcgacaacgtacacaggaagaacgcgatggtctccatctcgaagccgatgcggcggaacaggcgcatgaagatgaaatagccccagcagacgcaggtgaacacgaagaacgtcagcggaatggtgacgttcgcctcgccgccgcctgcaaccacgagctgcacggctgtgagcacctgaaacagcgtcagcagcaccagactgccccacatgccggccgggcggccctcctcgcggcgctccgccatctgccagcgcttttcctctgccgagatcggcaccatcgtggtcgggatgccgccgaacgagaccgtatcgccgtcctcgacaatcgcgtattcgtctaccggcagatcgttgaccttgatgccgcccttggaattcaggtcgtataccgtccagctgccgtcgttttcacggataagcgcggcgtgctgccgcgagaccgacggatattcgagctgcacatcgcaggccgcggcgcggccgatgatgttttcccagtgcgtgagcggcaggcgcacaccgttgccgagcgtgagatagccccagacctcgtccggatgcttgaccttccacagcgagcggatcgcgcccactaggatcatcagcgcgagcagcgggaacacgaagcgaacgaccgtcgtgtaccacgcgcccacgagcggattttccgcaagaaaacccgacagcacgtcaagcgcgtgctgcagcgcatctttcataacatttcctcctcccaaaacggagcacacaataagccattttactttgttattataccacagcggcactgaaaacgccaacacgtgacatccatttttaccgccgctggtggtataattgttaaataaccggtataataaccgttttgcggttattgtaccacagcggcattgaaaacgccaacacacgacatctatttttaccgccgccggtggtataattgttaaataaccggtataataaccgtccagcggttattataccataagtgtcaagcagaagaaaatccataaaggtttcgcggcagtccaggggataatcttctttttccccgggcaaacttccccaaaagggggaatagacttgctaaaactcatttctgcgagtaaaatatatgacagcagcggtgtcaccgcactgcaccgcatcgatctccatgtcgcgcgcggcgactacgtttcggtcaccggcgcgtccggctcgggaaaatccaccctcatgcacattcttggcctgctcgacacgctgtcctcaggctcctacctgctctgcggcacggatgtttcccatctttcgcccgccgcgctcaccgcccggcgcgcctccgagatcggctttgtttttcagcagtttcagctgctccccggcctgaccgcgctcgaaaataccgcgctgccgctcgccatcggcggcattccgcgctctgtgcgccttgcacgcgcccgggcggcgctgctctcggtcggtctcggcgaccgcatggagcatctgccgaacgcgctttccggcggtcagcagcagcgcgtcgccatcgcgcgcgccatcatcacgcgcccctgcgtgctgctcgcggacgagccgaccgcgggcctcgacccggtctccgccgccgatgtgctcgcgctgttcgacagcctgcacgagagcggccacaccatcgtcctcatcacgcacgacccggcggccgcccggcgcgccacgcgccgtctccgtctggaaaacggcgtactctttaacatacaataaatacccctgcaaaaaggagaaactcccatgaacagacgcgataagaccaactattatctcgatatggcgcaggtcgcgctcgagcgcggcacctgtctgcgccgcaacttcggcgcggtcatcgtcaagaacgacgtcatcgtttccaccggctacaccggcgcaccgcgcggccgtgccaactgcatcgacatcggcacctgcgtccgccagaaaatgggcattccgcgcggcgagcgctacgagttctgccgctcggtccatgccgaggcgaacgccatcatcgccgcgccgcgtgagcagatgctcggtgcgaccctttatcttgtcggccgcgatatgtccaccggcgagatcatgcgcgatgcgaattcctgcacgatgtgcaagcgcatgatcatcaacgccggcatttctcaggtcatcatccgccgcgacaacgatacatacgacacgatcgacgtcgcggactgggtcgcgcacgacgatgtgctcgacggccagaccggctattaaccgtgacgcccgtacagacagagaaggaggcgttttcatgaccgaaaccacacagctttccggcaagatcaagcataaatgcagcaaaaccatgcttttgacgccgcaggagctttttgagctcgaccgctatatcgagtccctgcgcgcgtccgacagcttcaccgaggacgaaaaacgtgccgtcacggagaacgatttttcccgctgggagacgctttcctgcggtctgcgcacatggatcgcggaaaagcattacgcggagtttctcgccgcgccgaccgtccccgtggacgaagcctacctcgagagcagcgttttcgagctgtcgctcgaaaaatgggcgctcgacccggcgttccgtcttgcgctcagcgcacgcatcctcgcagaccgccgccgcagtccgaatacggtcggcgtttacgagcgctgcgagcagaagatgaacgcttatctgatggagcgtgcgctcaccccgggtgcggtaaacgatacgcagcttgcgcttgctgaggcgctgttccttgcacagctcggcggcgtcgagatcgttcagaccgcaagaggtcagaccggctcgtattttctcggcgcggaggcgaccgtcaccgagccgttcgcgcacggcggccgcgtggccttcctgctgcctgcggacacggatttccgggcgctccgcccctgccctgccgtgcagcatttcgcgctccgcaaggcggacggcaccgtgctgcgccgccgcgcacgcgagaacgagcatcccgcccggcagtacagtgccgatctggcggataaacacatctatctgcgcccgtacaagggcggcgaaggccgctatgctgcgctgacgctcggcatccagagcgacgccccaggcggcgtttcctctctcggccacgcgcacagcgactgggcgcattccgagcgccagagcggctttctcgcctgccgcgagaccggcgtcggccagcgcatcggcggccgcatcatcgacctcacgccgctctcctccgcgcagctgaccgcgctcatgcaggcatttgcgcacggataccgcgcccttcaggcgcagccggaggtgccggatgccctgctccgcgtgggcagcctgctcaccggcgcaccgctcacgcgcgaggaaatgctcacgctctggtcgcatctcgatgcagacgacgcggaagcgctcggcgcagcctttgacgcctgccgcagccgcagtctggaggcgcccatcaagccgcctcagctcaagaccggcgacggctgcacattcgcgccgctcacgcctgttcatatcgagctcaggcagaacgaggtgaactggtacaaccgtgtattcggctggctgccgttcgtggacagcgcgaacgacatccgccgcgaaaaccgccgcctccagaacgaataccgcgccgcacagcgcgcgtccgacctgtcgttcggcggcaatcccttcgaggacgagatcgaatacagcgacgcggtgctcaagccgcgctaccgcctgcaccgctgcggtctgccgaaggaacggctcgctatcccggcgcagcctgtcgcgcccggcagagagcggccgctcgaccgcaagggcatcctgtccctgctgctcgacgaccgccgcgagcataccccggagcaggagcttttccttacctatgtcaaggggctgtccggcgtgcagcgcatcgtcgacggatatctcggcaagagccagagtgcgctcgtcaaaaatctgcgcagcaacccggactcgtttgcccgaactatcatgcagaccatttacagcgatgcccgccgcaacggcatcgaccacctgccaagtctcgcgcgcgagctgatcgaacccgagctgcgccgccatgaggccgcgcgtcccaagccctcgtccgagccgaagagcgaggaataaaaaagcggtagactttattattgtgctgccgcgcggcagcgcgctttcaaaagcgtttgcacagcaaacgaaaaaaaacgaggacatgtgcctcgtttttttcactttaagaggtagaaagtttccgcatgggaactttcggacgactcgtgttctgcgcagtcagaacacaacctgtctgcgaaacaaagtttcgcagacaagtcaaatcccctcctgcgatgcgcttgcaggaggggatttcagctttatatggtgcttttacttcatgatgtccttgtcatgtgcagcctttgcgaccagaccggacagcgcgaggagcgcgatgaggttcgggaataccatcaggccgttgaacaggtcggacaggttccagaccagatcaacgtgcagcgcggagccgatcacgatgcaggcaacaacgatcgcggcgtaagccttgaccgccttgtggccgaacagcgcctttacgttctgctcaccgaagaaataccagccgataatggtggaaaacgcgaagaacagcatgcagatcgcaacaaatgcgccgccgatcgtgccgagggaggcggagaaggcagcctgtgcgagctcggtgccctgcaggccgtccggagcgcccggattgagcatgccggaggtcaggatgaccatcgcggtcagcgtcagtacaacaaaggtgtcgatgaatacggaaacgatggcgatctcgccctgatcctgcggacgctttaccttggccagcgcgtgtgcgtgcggcgtggagcccataccggcctcgttggagaacagaccgcgtgcaacgccgtagcgcatcgcctcgcgtaccgtgatgccggctgcgccgccgaggatcgactgcggatcaaacgccgcaacaaagatggacttgaacgccgggatgatcgccgcatggttgaagcacaggatgaccaggcagcctgccatgtagaacagcgccatgatcgggacgaccttctcggtaacggaagcgatacggccgacgccgccaaggaagatgaacgccgcgatgatcgcgcagacgatgccgacaacgatctgcggtgcgccgaacgcggtcttgaaggcaacgctgatcgagtttgcctgtaccatgttgccggtgaagccgagggcgaaaatgatagcgaccgagaagaagccggcaaggaacttgccgaagccgccctggaagcgtgcacggatgtagtagatcgggccgccggtaacgtgacccttgtcgtcggtggtcttgtacttctgcgcgagcacggcctcaccgtagatggtggacatgccgaagaacgcagacagccacatccagaagatcgcgcccgggccgccggaatacagcgcggtagccgcgcccgcgatattgccggtgccgacctgcgctgcgatcgcggtggtcagcgcctggaacgggctcatgccgtccttgccggccttttcaccgttgagcgagaagtgaccgaacaggtgcttccagcctgcgccgaacttgcggacctgaacgaagcgtgtgcggatggtaaacacgatgccggtacctacgaggagatacagcagcaggccgttccagacgacgttgctgaccctgcttacccagtctgccaatacttccattgtcattttttacattccccttttttgtctgcgacaaacaaaaaaccgaaacccatgggtaaaatggatttcggctcaaaagaacgacagcagaacaggatttcacgcgctgatgaaacgctgacctcctgtgcattttatcgatccatactctgtccttttgcctgagagattgggcgcggctactcttacccccgcgcgcgttgcaccttcggcagtccccttacattcgggacgttctccagagccacatccgctgacagtcctcatccgggtacaccggacacctgagagtttcgctccttcggcaagtcttgtggactttttcctgccagcttcgtttgtcgctttatggttttatgggattaagtttaacatttctctgcatgaatgtcaagttttccttcccgtcggattgcacaaattaacttcacatgaaaaaaagtaaaccgtcggagaacgatttctccgacggttttcccagggtaataccgcataatggaacaagagcgatttgcgagtaaattttgcgtactgacgaggcgcggttttgcggtaatacttgatgtattacc

SEQ ID NO: 12935 - DNA, 313 bp, Unknown
  gut microbiota DNA sequence
aataaatcggtaaggattttattagacaccgccgatttgcacgctttcaaaaaccatggcttctgtttccatgatacccgtaaacagcctaccctgtaaaaacaggggaatggtgcagcggacaaagaaaaagggcggccggggagccgtccttcgtgccgcagccgggaggtttcgttttccgtgcacgacaaccagccatgacgcttgtcatggctggttgtgtacttaatcctggtactcgccgcgggcaatcgcttcttcacggcggcggcgtgcctcggccttctgtgcgagccatgcctgctcccag

SEQ ID NO: 12936 - DNA, 3421 bp, Unknown
  gut microbiota DNA sequence
ggtgtccagccacgcgtagccgcggccgagcagctgcacgttgagcgtgccgtcctcgaggtacatgcggttgagatcagtgatttccagctcaccgcgcgcggacggcttgacctgctttgccagctcaacaacgcgcttgtcatagaagtacaggccggtgatcgcgtaattggatttcggctgtttgggcttttcctcgacagaaatgacacgccaattattatcaaactcaacgataccgaaacgctccggatcgttaacgtagtagccaaatacggttgcctggccgttctgagccgcctcaacagcctttttcagatgatcacccagaccagcaccatagaaaatattgtcaccaagtaccattgcacacggttcatcaccaatgaaatcctcgccgagcgtaaatgcctgcgccagaccatccggcgacggctgcactttgtacgacagattgacgccatagcggctgccatctccgagcagacgctcgaaattcggcaggtcagtcggtgtcgagatgatcagaatatcgcgaattccagccagcatcagcgtggaaagcggatagtaaatcatcggtttgtcgtaaatcggcagcagttgcttgctcgttaccatagtcagcgggtacagtcgtgtaccgctgccgcctgctaaaacaatgcctttcatctatatatcctcacttttctatctatcctagtgctctgagtggtcttcctccacccacttcttaaacgtctgatgcgtcacgccgaggcgtcttcctgcctcacgcagcgagacctcgccgcgctgccactgctgctttagcatttcgaactccgcgccgcgctccttcggcttgcggccgatatgcacgcctttcttcctcgccgcacgaatgccttcgctctgcttttgacggcgctgctcacgctccttgaggatagtcgcatcgaaaacctcaaacatcaagtcgctcaaaaactgctgcgatttctcgtcgtgctcctgcacgctcagcggaatatccgcgattctcagccgaattccattgtcgcgcatccagtgcagctcatctgccagtccctttttgaggtcactcaggcagtaaagcgaggaaacggtcagtgtgtccccttctcgcaatgcaagctgcttcagcagccgcaagttgttcctctgtgaggatttttcaccgatggtatcaatgaaaatctctccgtcccgtgctccgagcgcacgaaaacgctctgtctgtgcgtcactttcttctggctttacgcaggaatagtagtaatttttgcctttcatggacacatcctcacagagctaaagtgttatcatggttactaaagtacaatttgatgcaaaacaaagaaaattctgatttacagcgtgttaaccgtataatctagtttattatatcaaatctgtctctaaactacaatactttcataggataataaagtgtacttttttcaacatttggaattatcctgtccaatccatttcatgaaagttcgatgcgttacgcctagctgctgcgacgcagcacgtgcggacagactgccctcacaccacgccttcttgatgatttcgtagtccgcagggcgatttttcggtcgacggccgaacttgacgccgcgcgctttggcggccgcaatgccttccgcctgccgctgatggataaactcccgctcggtctgcgccacatacgaaagcagctgcaaaacgatgtcagagatcagcgttccgatcaaatcgcgtcccttcctcgtatccagaagcggcatatcgagcaccacaatatccacctgcttctcttttgtcagcaggcgccactgctccaaaacatcatcataatttcgtcccaatcggtcgatgctcttaatcacgagagtgtcggccggttttaattttttcaccagtctgcgatagcccggccgcgcgaaattcttgccggactgcttatcgattaccatatttttctccggcacgccgaactcgcgcatggcgatcacctgccgttcttcattctggtcacgtgtagatacacgaatgtacccgtaaacttgctgcatattactttttccttccacatcagtgatgaagaaaaccctgatttcttatatcaaatttcattatatttgctactgccaaatttggcaacgacaaaattccttatactaaagcaagcgaagaagttggtgatgaggatgagcacacgaaaactggcacctagcaaccgcaatatcgccagcgcgcgcgtgaccgaagcactttctgcggcgggcatgctgtaaaaagacctgctcgcacgtttgcaggtctccggtgtggaaatcagccaccctgccctctcgcttcttaaaggacagaaacgcccggtatctgacattgagctcaaggcactgtccgaaattctgaatgtcgatgtccgttggctgctcagccagatttgaaatctccaaagagaaaatacatattataataatagcgaacccgctgaaactatcagcgggtccttgtttttctcagaaggcaatttgagatgaaaaatgtttatgttttgcagaaaatcgagtagcaattaccggaatagataccgcatcagctttggtatacactgaacaactacacctgttttcgcggcaaacggcagaagcgcctgcgtatcgtccagagaaagccgccttcagaacttgtcatgtcctttctcgctgaacagccggtgtctgcgtatcgtgatacggcgtcagggcgagcttaatccgcagaataacgcaacccgtgcagaggttgccgcaatcctcatgcgcttctgcgagatgagcaaataagctctcctatacaggcaaaacgcgcagcttcggctgtgcgttttctgttttctcgctattctattttcagcggagaagcagtggctctagttaaatcgccgacaaacatagaagctgctgcataattcttcgctctaacgatcattcccccttagcctcacaccgggaacaactatcgctgactgaagacttgaagagatattccctatactgatgttgtgatttcttgtctctctcaatcactgatactgccgataatcaaagaaagacatacaggctaaaaataataatcaccagagatacgaagttattcgtacatctggtgattatttttaagtatcaacttgaaacactgaactttatccactgatttttatgaaccacggcgaatagcagaaatcacatcaccatcgcaataggtagaatactttataatatatttattgtatgtcggtggttcaacatctttgagataggccaagtatccgaggatactctcaggcgatccattcccgttaactaaacgattatagatcatattctttattttctttcgagtttccaatccaaccgagactcggcctgtatct

SEQ ID NO: 12937 - DNA, 10710 bp, Unknown
  gut microbiota DNA sequence
actttcggacgtccgtgttttgcgaagtcaaaacacagattgtcggaaaaacgatagtttttcgacagtctcaaccgaggactctgtcctcggttctgcttttatattctcttgccgttgaaattctgcgcggcggcggcacagccgctctcgataatgcacgcggcggcgcttaccgcatcctcgcaggccttgtcgatcgccttctgatcctcctcggggaacctgccgagcacccacgccgcaagatcatagtccgggcgcggctttttgccgacaccaatcttcacgcgaggaaaatcctcgctgccaaggtggtaaatgatgttcttcagaccgttctggccgccggcggagcccttcgggcgcacgcgcagcgtgccgacgtcaagcgacacatcgtccgacagcacgatcacgcgctcgggcggtatcttgtagaacgatgccgcgtcgcgcaccgcctcgccggacagattcatgaacgtctgcggcttgaggaacagcacgcgcttgccgccgagcatgccctcccctgcgagcgccttgaacttcatgcggtcgatcttctggccgctgcgcgcgcagtagctctccagcgcacggaaaccggcgttgtggcgcgtgttgtcgtacttgctgcccgggtttcctagaccgacaacgagccattcgatcggctgcgccgcttttgcggtcttttcttcctctaatttcttaaaaatatcgaatactgacatggtttactccgaaaaaattgacattctctgtcgtttctgatatattattgacggacatcgcttcgcggttggcactccttgtgaaaggagtgatgctttatgaagaaattcgtgagaattttagtctgtatcgcccttgtgctttacattcttgtcataaaagcgtactaaccgcccggttgcagccagacggttagtattttaaattactgtacctaaaggccaaccgcacagcggtgtccttctatctgtattatacccactcgcctcccgtctgtcaaggcgcggaagcgggtgttttttactctacggacaggatatagtagtacaccggctgaccgccgttgatgaccgagatctccatatccttgtttgccttgtgaagcaggttttcgacctctgcggcctgctcctccgtcacgccttcgccgaagatcacggtcgcaaaggcgctgtcatcggaaaccatctcgcgcacgagctttttcagcacgctcgtctcgcggccgctggcgcacagcctgccctcgctgagcgaaagatactcgccctgcttgatctttttgccgtcgaactcgctgtcgcgcgccgcatacgtcacctgaccgctgcgaacatgagacgcggcctcggtcatcgcggtcgcaagctcggtatcctgctcggcgtccggatcgaccgcgagcatcgcggaaatgccctgcggaatggttttggtcggaacgacgaccagctttttctcctcagacagatgaaccgcctgctcggccgccatgatgatgtttttgttgttcggcagcacgaaaacgacctctgccggaaccgaatcgaccgcacggatgatgtcatcggtcgaggggttcatggtctgaccgccctgaacgacggcatctgcgccgagatcggtgaacaggctcttgaggccctcgcctgctgcgacggcaacaaagccgtactttttctctgccggcacgatcacgcgctccttcggcgtgtccgccgtgccctcgatgaccttcgcggtgtgctgctcgcgcatattctcgatctttaccgtgaggagcgggccgaatttcaggccctcctccagcgccttgttcggctggtcggtgtgcacgtgcacctttacgatgtcatcatcctcgaccacaacgagcgagtcgccgatatcgttcaagatcgcacgcagacggccgacattgcgcgccttgtccttgcgttccgcgataaattcggtgcagtatgtgaacgtgatgtcctcgtcgcggatcgcctcgaagttcgccgccgccctggccggctgctcgaccgtacgctccttatggatgccgcgcatcgcatcaagcattccctctaagatcgtgataaagccaaagccgccggcgtccacgacgcccgccttttcgagcaccgggttctgatgcacggtctccgcgagcgcagctctgccgtgctcgacgatcgccgcgagcacctgctcagcggaaagcgagtcatctgcctgacactgctctaccgttttctgcgccgcaacgcgcgatacggtcaggatcgtaccctctgccggcttcatgaccgccttgtacgccgtatctacgccctcgcgcagcgcaagcgccagatcgcggccgttcgccgcctcggtctcgcgcagttttttcgccatgccgcggaacagcagcgacaggataacgccggagttgccgcgcgcgccgcgcagcagcgccgaagccgtcgtatccgccgcctttgcaagcgtcggctcgctcagcttcgccagctcgttcatcgccgccgtcatggtcatcgacatgttcgtgcccgtatcgccgtccggcaccgggaaaacgttcagctcgttgatctgttccttctgttcggtaatggcgagtgcgccctcggtcaccatggactgaaacagcgcaccgttgattttcgtatctgccatctaaaaaactctcctaaattccccttccgggtcttttaccgcgtcagagcgcggtcattccgtaccgttttactcttttctgcctgtctcaggcacggatgctctcgacgtaaacgtctacattctttacgtccacgccggtcaggcgctcgacatggtagcgaacctcgctgatgatcgagcggcagacggtcgcaatatttacgccgtgatcgaccgcgatatgcaggtcgatattgaccccgccgtcaggcgcttcggtcacctttacgccgcgcgactggttttcgcgtccgagcagatgcgccagtccgtccgtcatcgagcggatggtcatgccctttacgccgaagcagagcgaagctgcgtagcctgcaatgccggcgagaacctcggtcgtgatttcgatatatccgagatcggtcttgatcgtcataaaaaaacctccctgcgtctgctttcgcatcaaatgatcttccgccttttcggaacccattcgtagtttactatatcatatactaaattcacagaaaatacaagtacatgcactgatattgaacatcccgccggcggaatgcaggacaaaaccgtgcagcaaaagtacagtttttctgtttttcttcaaacaaatgtttgcatttactcgcgaaacacgatataataaggtataattccgaacacatgttccaacggtattgagagggagaccgcagcatgaaaaaaatatccgataaacagcagaatattcttgattttataaactcgttttccatggagcacggctatccgccatccgtgcgcgagatctgcgcagaggtcggtctgcgctcgacctccaccgtgcacgcccatctgaaaaaattgcaggaggccggctatcttgaggcgagcgaccacaaatctcgcgcgctcgcgccgatcagcggcgcctccatggtgccgcgcgtgcccattctcggccgcgtcaccgccggcatgccgatcctcgcggtcgaggagcacatcggctatgtgccgttcgagccggcggcgagcggcggcaaatactacgcgctgcgcatccgcggcgactcgatgatcggcgtcggcatcatgaacgacgacctcgtcatcatccgtcaggacgccgaagcgcgcgacggtgacatcgtgatcgcgctgctcgaggacgaggcgacctgcaaaacgctctgcctgacgccggacggcgtatggctgcgcccggaaaacccggcgtacccgctcatcgacggcaccggctgccagatcctcggcgttgtcaaggcagtttacagagaatattgataatgaaactgtcggcgaaacctgcgtttcgccgacaagctgtgttcttacttcacaaaatatctgaatgatttttatgaaaaaccacatatttttcgtataaccagacagattttattcgaaaatttcagcaggggagacatcatgccagccatcacagacagcgtacagttcgtcaagggcatcggcccgaaaaaggtgaagctgttcgaaaaactgcatatttcgaccttgcaggacgcactggagacctatccgcgtgactatgaggaccgcacgcagatcacgcgcatcgcggacatcgcagatgaggaccgatatgccgtgcgcgcaattctcggcaccgagccgaaggtcagccgcatccgtaagggcatgacgctcgtcaaatgcacgatctttgacgaaagcggctctctcggcgtcacctggttcaatcagccctatatcacggcgcagctgcgcgtcggacaggaatatctgttttacggcagggtgcagggcttcggccgggcgcggcagatgatctctccgcaggcggaaaaagtcgcggaaaacgaccggaatcccggccgtatcgtgccggtctatccgctgaccgccggtctgacgcagcgcgacatggcgcgcgtgaccgaagctgcgctcgacgcagtgccgggggactggcccgacccgctgcccgaggtcctgcgcgtcaaataccgccttccggacgccgccgacgcgctcgccgccatccatcgcccgaaaaccagggaagacgtgaacgaagcgcgccgccgcatggtattcgaagagcttttcctgctctgctgcggccttcagcagctcaaggagcgccgccgcgcagacagcggcattctgttccgtggggaccgtctggaggaatttttcgcagctctgccgtttgctccgacgggcgcgcagcgccgcgccatcatggagatcgcggcggactgcgcctcaggccgtccgatgaaccgcctcgtgcagggcgatgtcggttcgggcaagaccgtcgttgcggccgcgctttgcgcgctcgcggcacagaacggctggcaggccgcctttatggcgccgaccgagatcctcgccgcgcagcatgcggaaaccctctcgcccatgctcagcaagctcggtctgacctgcacgctgctgaccggctcgatgaccgccgcgcagaagcgtgcggcgctcgccgccatcgaaagcggagccgcgaacgtcgtggtcggcacgcacgccctcatccagcagagcgtcgtttttcaccgtctcggcgcggtaattgcggacgagcagcaccgtttcggcgtcgcacagcgtgcagcgctgtccgccaagggcgagatgccgcacgtgctcgtcatgtccgcgacacctatcccgcgcacgctcgcgctgatcatgtacggcgacctcgatgtatccattctggacgagacgccgcccggcagaagtccggtcgagacctacgcggtaggggagaatatgcgccgccgcatcaccgccttcatcgagaagcagctcgccgcaggcggacaggtttatgtagtctgtcctctcgtcgaggacggggaaggggacagcaggctcaaaagcgccgagcagcacgcgaaggatcttcaggcgcagctgccgcaccgccgtgtagcagtgctgcacgggcgtatgaaaaacgccgaaaaagacgcggtaatgcgtgattttgcggcgcaaaagtacgatattctggttgcgacgacggtgatcgaggtcggcgtggatgtaccgaacgcgaacctcatggtcgtcgaggatgcagaccgtttcggtctgtcgcagctgcatcagctgcgcggccgcgtaggccgcggtacgcggcagtcctactgcgtctttttcggcgcagacaagggcgcgaccgcccgggaacggctgaaaatcctctgtaagacgaatgatggctttgaaatcgcgcgcgccgacctctctcagcgtggccccggcgactttttcggccgccgccagcacggtctcccggcgctgcacgtggcagacctcgccgcagacctcgcgctcatgcagaacgcacgcgaggaagcggaggcgctgctcgcggccgacccgtccctcagcggctggcctctgctgaaggagcgcgttcaccgcatgtttgccgagcgcgacgacgaagcgtttaactgaaacaggagaagaagcttccgcatgggaactttcggacgattcgtgttctgcgaagtcggaacacagcctgtcggaaaaacggagtttttcgacagtagaaaaagccctcgtttgcattacatcaaacgagggcttttactggatgatttccatagatcctcttttctcaacgggatactcgccgttgttttgtatcagaatttctatagcattattatttttttcgcatggccttcagtttttttctttcaacgttctgcgaaagctgttgcctttgccggtgagagatcaaactgcggttttggttttctcctgaaataaggggaatgatcatcgtgacttacggcattggagttcgtcctttacatttcatttgacagatggtgtaattatcctgctttttacgagtctcacccgacttgatgaatatcaattcgagtcttacactttcaaactttatataaatgggaaaatgtgcggccgcatcagtgttgttgtctgcctgccgccgaaaaaacgtattgttctgccgctttgatatcatctccgcgtgctgcgttcttcctgctccaccatgctcatcagcatgcccatcggccactgggtgcgcagttattcggcatcttgcaggtatcaatcggatactgttttctaccattcggcgcatcatttgaggtttatggcctttgttttttgtttacgaaccttactttcccgctgcctcgatccgtgttcatcgtcagtcgtcattccggatatttcataaaggggatcgcttccccaaagctgccgtgcgaactttggtcagaaaccgatcgcgcttttcaggcggttcgtccgtgtagtctggaacccgcgttcttttttaatagctatcaccttgatcgtttcggtcacagcgtcctggcgagcctcgtaagcttgcaggatatttcttctgttaccattggactcacctctttcaaaagatttggctttcgccatctgttcagaaaagtttctgtcgggtgtcgcccgggcctgtgagataggactttcggctttgggtgtttgccctttccttttctgtgacctaataatatcatcaattctgcacaacgtcaagcgttttttgcatagtttttctttgcataatgcactaaatattccgatcattttcgttgcattttactcttttctttgaagccgcagtttgctataatgatattgttgggcgctgtatagacagacgcctgcatatcaaatatccacgaagtgcaggggggccgctcggctcccttttttaaggaggctgcaacatgagtgttttcagtttttacatgccgacccggctgttcttcggcagcggcgcggtgggcaagctctcgcgtgcgcgtctgcccgagggccgcggcctgatcatcacgggcggctcgtccacgaccaagctcggctatgtggcgaaggtcgccggcattctcaaggaagccggtcatgaaacgctcgtttacgacaaggtaaagcccaatccgaccatcgaaggcgtgcgcgaatgcgcggcgctctgccgcagcgaaaagatcgcgttcatcgtcggtctgggcggcggctcgtccatcgacaccgcgaaggccgtcgcgatcatggcgaccaacgacggcgactggtgggactacatccacggcggcacgggcggcggcaaacgcatgacgaaggacggtctgccccttgtcgcgatcccgaccacggccggcaccggcaccgaggccgacccgttcaccgtcatcaccaacggcgaggaaaagatcggcggcggcggcgaaaaatgcttcccggcggtttcgatcgtcgatccggacttcatgatgaccgttccgccgcatctgaccgcatatcagggcttcgacgcctttttccatgccgcagagggttatctcgcgtcgactgcgacgcccatgagcgatatgttcgcgcttcaggccatcgagctgatcggcaggtcgctcgcagccgccgtcagggacggatcgaacgccgaggcgcgcgcggacgttgcgctcgccaacacgcttgccggttttgtcgaaacgctgtccagctgcacgggcgagcacgccatcgagcacgcgctcagcgcgttccatcccgacctgccgcacggcgcgggtcttatcatgatctcgaacgcctactggaagcgctttgccgaggtcgcgggcgcacgtatggcggccatcgcgcgcgcgatgggcaaggctgacgcgacccgtcccgaggacttccttgcggcgctcgcggagatgcagcaggcctgcggcgttgatacgctgcgtctcgcagactacggcgtcagggaagaggactgcggaaagatcgcagaaaacgccgtcgttacgatgggcggtctgttccgtgccgacccgcgcaggctcgagtcgggcgagatcgaggacatcatccgcgaatccatctgatcgttaccgagaccgcagagggaattcccgtccttctgcggtttccttctgtccgcactgcggggcagcgcacttttttgcgttagaaaccgctaatcccgttagcttttgctactttttcgttagcatatgctacttttcgccgttctgacttcctttgaccggacggttgtgctaaaattgggagaaatcccggaaacggaggttctgtctccatgcagaacgtgttatactacttcatcgcagtcagcgtgatcggcgctgtcgtctgtgtttacgacaaactcgccgcagcgcgaagctggaagcgcgtgcccgagcgcacgctgtttttctgggcgctcgtcggcggcggcccgggcgtcttcgcctgcatgctgctcatccgccacaaaaccctgcaccgcattttcatgctcggcattcccgccgttatggtgctccaggctgcgatcctcctcgggatacaccatattttacttgcgaggggatttttatgacaaaggcactcattcgcctttttatcaaaaacgcggaggacacccgctcggcggccgtgcgcgaacagtacggcattctttccggtgcggtggggctcgcgtgcaatctgttcctgttcgcgctcaaactgaccatcggtctggtgacgggcgcgatttccattgcggcggacgccttcaacaacctgtccgacggactttcctgcatgatctccatcgtcggcttcaaggtctcaaaccgcgaaccggacgaaaagcatccgttcggctacggccgcacggagtacatcgccggcctgatcgtttcgttcatcatcctgctggtcggcttcgaattcttcaaaacgtcgctcgaccgcatcattcatccgtctgccgtcgcgttttccgcgcttctgaccggtattctggcggtctccatgctcgtcaagctgtggatggggctgttcaacaccacgctcggccgccgcatcgactcgccggttctcatcgcggccggtcaggacagccgcaacgatgtgatcacgacctcggtcgtcgtactcggcatggtcgcgggccgtttcaccccgctgccggttgacggctatgtgggcattttggtcgcggcgttcatcatctggtcgggcatcggcatcgcgcgcgatacggtagcgcctctgctcggcgaggccgccgatccggtcatggcgaagaatatcgagcatatcgtgctcgactccgagcacatcgtcggcgttcacgacctgatcattcacaactacggcgcaggccgcgctcttgcctctctgcacgccgaggtgccgagcgacagcaatttcgtcgccgtacacgaggagatcgacgaggcggagaagcgcgtctggcagcagaccggcgtttatctcgtcatccatatggacccgatcgacgtcaacgacgagcacatcaatgcgctgcgcgagcaggtggacggcgtgctgcgaggcatcgacgaaaagctctccatgcacgatttccgcgttgtggacggcgagcggcagatcaatctgatctttgatgttgtcgtgccgttcagctacgacgatgagggtaaacgcaggctgctcatgacgatttacgacgatctcaaggcgatcgaccagcggtttaacccggtggtgacgcttgatcacgcgatgtgagtttttccgccccctcggggcagggaagtgatggcagccgaacggctgccgggggatgccgccgtctggtggcagagactgccggtgcccaccggcaggggcaaaaggggaaaggacaccaatggtttcggccgtagcccactatcctctttcccgcgtcttgcgcggattagatgagtactttcccctcttgactcccctgaccttcctttggccgtcgcaccagagatgcttggctaaaaacgaaggagagcacggatttttgtctgtgctctccttttgctttatgccggggaattttgctgccgtgatttgccgcgcatatcagtgcgcggccagccggtgcagattggatagatctgcactgcgagttgttttggctggcagctcaaatatcgcaatacactg

SEQ ID NO: 12938 - DNA, 699 bp, Unknown
  gut microbiota DNA sequence
agctcggcgtcctcgtccggcgtgaggctgatgcgcccgtcggccgtgggcgaaaactgcgccacaccgccgcgccggtcgaacacgacctccttgacgctgttggggaagcgctcatccgccacgcggttgagcacaacattgccgaccgcgatctgcccgtccatgggctggttgccggcctcggcattgataatgtggctgagccaatagacatcgcgcgcaccgtaatagctctcgccgctctcgagcagcgcctgctccgacgcgtcgacacgcaggctggtatggtccgcgctgaacgcggccgtgacaccgaagatcttctccagatccgccagcggcagcaccacttccccgtcgagggcatacacgccgtcgggcgcgtagaagcagcggccgttggccgtgtaatacatcgcgccgtaggtcgccgtgatgtccgcaccgtcgaccgtaacggtctcggtgtcgccgtcggtgaccgtgtcgctctcgaggccgagcatctcggcaaacgcatccgccgggagccagaccgcatcatcgagcacgtagcagtagccgccgaagcggtcgtccacgtacacgggcgtgtagtcgcaggcgacggtctcggtgtagtcgccggcgtccatgccgacggcgaccgtgcgcacgaccggcgaggtcgcctgtgcggcggcctgcaccgcgagc

SEQ ID NO: 12939 - DNA, 22477 bp, Unknown
  gut microbiota DNA sequence
tgggggagtcaagagggggcaagggaaccatacggtgcccttgcccccttttgcccccgccgtgggcacggcgtcccccggccgccgaagacggccactgtgcatgctcactttgagcgtgaatctcgcctccagcggcgcgccgctgtatcggcgcaaggtctgccatcagcagacggtaaaaaaacggcacggccgacggaacagcggaaaggcttaccctctgctgagggatataaagtaaaaaggctgccaaatggcagccttaaaagccctcccggcggatcagctggtacagcagcgcattgacaatcgccgccgcgacattcgagccgcccttgcgcccccgcgcaatgatatacggcgtttttccgccgataaacagctccttcgcctcgacaacattgacaaaacctaccggcacgccgatgacgagcgccggcttcacctcgtccctcccgatcagctcgtgcagtcggatgagcgctgtcggcgcgttgccgaccgcgaagatcagcggcccgtccagtctggcggcatgctccatcgagaccaccgcccgcgtcacgccgcgctcctttgcctcgtgcgcgatgtccgggtccgccatgagacaaagcgccttcgcgccgagcttcgtgagcgacggcttgctgatgcctgagagcgccatgtttgtatccgtgacaatggtcgcgccgctgcacagagcggccttagcttgctcgatcacgtccggcgaaaacgcgagattgtccgcataatcaaaatccgccgtcgtgtggatgacgcgcttgacgacctcggcgatgccgtccggaaacgcgcgcgtgcccagctcctccgtgatgatctcgaacgagcgcttttcaatgtcctgcggcttcatgtatccgttcaaaattcaatcccctcccgtgcggcgacgcccttttcataggggtgccgccgtttctgcatttccgtgatgtaatccgcgtgcgccgtcagtcccgccgacgggctgcggcctgtgagcacgacctcgagcatgtccggacggttttcgagaaagcccgtcaccgtcttttcgggcagaaagccgccgtttactgccgcgcatacctcgtcgagcacgagcagcgtcgcgcccttccgcaccgcatagccggccgcggcatcgaacgtgcggacgagcgcggcggcggtctctgccttctcctcgtccgtcatgcggaaggtgaacttgccggccgggttcgccgcgagcacggtcacgccaagcttcgcgagcacgcggcactcccccgatgagccgtccttgagaaactgtgcaaaaacgacctttccgccgtgtccggcgtggcgcaccgcaaggccaacggccgctgtcgttttgcccttgccgtcgccgcagtagagatggaccagtccgctggttttcatgcttttccctccatgatgtcgtagatccgctgcatatccagactgcgccgcacggtatccgcgagcaggtcatactgccgctcccggtagactgccgggtcctctgccgcgccctcgagcgtcacgcccttccgctctgcgagcgcctgcgcaagccgctgcgcggcctccggtgcgtcaaacacgccgtgcaggtaggtaccgcaggcgttttccgtcacgcagccgtccggtacttcgtgttcgccgtgcttcagcgtgacaaacggctgcgcgtccgcgtcgcgcacggtctctcccatgtggatctcatagccctcgactgcaagtccggacagaccatgcagcacgcccgcagtgtccgcgaccgtaccgtgcgtctgaactgtggtctttgccgtgcggaacacggtctcgaccggaagcaagccgatgccgcgcagactgccgccaccctcggtgttttcggggtcggacaccgtccgccccatcatctgatagccgccgcagatgccaaaaaccggcgttcctgccgcgtgcgccttgagcagcgccgcctccatgccgctctcgcgcagccagcggagatccgcgatcgtggacttggtgccgggcaggatgatgaggtccgcaccctccagccgcgccgggcggtccgcatagcggacaccaacgcccggaacacgcgaaagtgcggaaaaatcggtaaaattggacagacgcggcagcttgaccaccgcaatattcacgagcgcaggtgcgcttttcgtttccagacgctcggaaaggctgtcctcgtcgtcaatgtcgaaatggccgtaaggtaccacgccgagcacaggcttgccggtcagctcctcgagctgtgtcagacccggccggaggatttccacgtcgccgcggaatttgttgatgacaaggccgcggatgcgcgcctgctcgtcctcgtcgagcagcttgaccgtgccgtagagcgaggcgaacacgccgccgcggtcgatgtccccgacgagcagcaccggtgcgtccacgagcttcgcaagtcccatgttcacgatgtcgtcctgcttgagattgatctcggccggactgccggcgccctcgatgacaatgatgtcgttctcggcggcgaggctgtcgaacgcctccttaataaccggcagtagcgcctttttgtgtccccagtattcgcgcgccgtgcggtttccgtgcgcctcgcccatgatgatcacctgtgagccgatgtcgctcgtcggcttgagcaggatcgggttcatgcgcacatcgggcgcgatgcctgccgcctcggcctgaacgacctgtgcacggcccatttccctgccgtctgccgtgatgaatgagttgagcgccatgttctgcgacttgaacggcgcgacccggtagccgtcctgtctgaaaatgcggcacagcgccgcgcaaagcagacttttcccggcgttcgagcacgtgccttgaaccatgatgagttttaccatgacagccgtccttccctatatttcctgtatctgccgcagagcgtgcagcagtttttcactcgcgtctctcgttttgaccgccgtccggtaaaagccggggccgagtccgcggtaatttgagcagtttcgtatcatgataccctgttttcgcagtttttcatcgagtttttcgtccgaagagtgaaaaagcagaaagttcgcctcacccggatagaccttgacgccgcacgagcgcagaccgtccgtgagataggcgcgttcctccgcgatgcggcgtgccgtctgctcacgccatccggtctgcttcgcagcagcctccgcgcacgcctgcgcgatgaccgacacgttccacggctgcccggcgcggtaaagtccatcaatgaccgtcctgtctgcggtcatgcaccagccgaaccgcacgcccgggacggcgaacattttcgtgtaggcgcggagcaggatgaggcagggaaatgcttcgagcagtccggagagggcatgctgctctgcatcgagcagaaaatcgttaaagcattcgtctgcgaccagataaacactgttttctgcacatttttgaactattttgcgcatcagttccggttctgccgtgcggccggtcggattgtttggattgcacaaatatattgcgtcatatttagacgaaatgtcagagagcagccgctctgtgaccgccaaatcctcgctctcgcggagcatgtgaaagtcgatttccgcgcctgtgagcgttctttcgtattccgcgaaagtcggtgcggtgagcagcacgcgcttcggcctgagcaccgctgcgaggcggtcgagcacatctgccgcgccgtttccgcagtaaaccatatccgccggaatcccctccgcttccgcaacagcctgccgcgccgcgcggcagaacgggtcggggtaatgcgcgcattcatccacagccctgtgcattgccgcacggaccgcttcaggtacgccgaacggattgatatttgcggaaaggtcgatcggctgtgcaccgaattcgcttacaaaagtttctatatctccgccgtgacagtaggaataagccattatatcacctctgaagtgtcagtctgaccgcgcagcacagcgcaagagcgagcacgctcgcggcgttcatcaggtcgatcgtcgcgaggatatccgtgcggttcacacggcgcagcgggtctccgaacgccgcttttctgacggttttcccgaagtagctcgcgtcgccgccgagctggatgtgcagcgccccggcacacgcggactcggtctggccggcgttcgggctcttgtgcagattgcggtcgcggcggtagatacgcagcgcgctgcggttgtcgagccgcagcatgcccgcgccggcgatgatgcagagcgcagacagccgtgccgggataaagttaaaaatatcgtccattttcgcagaaaacttgcctaaatactcgtatttttcgttgtgatatccgaccatcgagtcaagcgtattgaccgccttgtagagcattccgagcggcgcaccgccgatgagcatatagatgagcgacgaaacgacaccgtcagtcaggttctctgcgatggtctctacggcggccttgatgacgccttcttcggaaagcgcagcagtgtcgcggccgacataccacgcgacggcctttcggccttcctcgaccgactccttcacagcacggtaaacatgctgcccggcttcagacaagctttttcgtgcaaaaatcagccagcaaaggatggaattcgcggcaaatccaagccagaaattgattctggcgagaaatcgaaggacgaggaacggaaccgcgaagctgacgccgcagacaacgatccaaagcacgacacctgcgaatatcattgcaccttttcggggcggaaaaagccgtctaagcagtttttccatgcaggaaatcaactttcctacagcacagaccgggtgcgggaaccactttggatcaccgagcagtgcgtcgagcgcaaagccgagcatgacggcacaggttacagccatttatttcaactctcctttaataaactgcggcacgccggcccagacacggatgaccgcgtccgcctccgatgcgagcgcacagcacagccgtccaacggcttcgcgccagttttcgtcatttggttcgatcggaaccacgccgcagccaatttcatcgcaagtgatcacatggccgcgcagcgttgcagaaagttccagcgggtcctgctctttttgcagcatttcacgcactttttcatgaagattatagattttcggttcatcaggatacagcttttctgcaatttcgcgttttccctgaaacgaaccgcctatgataagtacagtcataacacaagtcctccgaacgctgcaacagctaggcataaaagttctgaaatcgagatacaaaagcctgccagatcaccggttatccctccaaaagttcgttttgaaagtttttcgtgaaaggcataccacagcatgaggagcacggtcagaatcagcgctgccgtcgtaccgtgcggaacgccgaaaagaagcactccggaaatcagcaaatataccattgtttccagcaataaaacgaccgaaaccgcacgtttatcactgttttccgcaaaaatatgtgcgagtccgctgtccttcgcacagggagaagctaccaccttgcgtccgcctattgcgcgcgcggccggaaatgcgacaagaacaagaggaaacagttcggaatattcaaaaatctgtgaaaagcaggcacattcagcaagtaaaaatgcacaaatccacatcggaccaaatgcaccgacgtgagggtcttttagaatagcgagccgcttttcacgatctccgaaagaacaaagcgcatcgcaggtatcgcacaggccgtcaagatgaatgccgcccgaaatgcacagcggtatcagtgtcgctccaaccgcataaaacagcgaattcgcacgaaaaaagctgcaaaaagcaaaccagatccaggataccgtgctaatgatgactccgacaaacgggagaaaaatgagcgcccagcgcatcgtctttttttcccagttcacctgcggaacagggatagcagaatacatcgaaaacgctacaaaaataccgctgattacgcttttcaccttgttttcacttcctttatcggcaataaaattccgcaaacgctttcgtaaactgcatctgcatcccgtgtaattttttcatgaagctccgcaagtttttgcagataattttccgtttccggcggataacttcctccatccgaaaagatttcattggaaacgatcaccagcgtatcacaatatgatttcaatttttctacgccatcaagtatggattttacacagttttgtgccgtgccatccggagagaaaatttcattagcgagcagattgcccaaatcctcaagtaaaatcccgtcataatgacgatcaatttgcagacctttcaaatcgagtgaacgttctacagtatgaaaaccttttccgtctcgcagcttacgatgccgcgcgattcgtgccctggcgcttttaccaaacggctgcatcgtcgcaaggtacagtttgctgtgtgctcgcgcacatatgattttttcagcatgttccgattttccggaggctgctcctcctgtcaccaaaacgagcatattctcgcctccttcgccgttttaattattgaaatcatattgttaatttgttcaagcatcacttcaatggtttatatgcctcaacgccgatttcgtcgaatgtaggcattgctctatatggtgcgagcgcaagatcaagcagtgcaatacctgccgcagcgccggttccttcccccaggtgcatgcccgctgttataaatgcctttttcccaagttcttgaagcagcaaagcgcttgcaggctcttccgagcaatgtgctgcaatcaaatagtccgcgacaaggggacacaagcgcactgcggccagcgcagcagtgcaggaaatcacgccgtcaagcacaatcggcagaccacatgccgccgcaccgagataaaagcctgtcagtccagcaatatccagtccacccaccttgctgatcacatcgatcgggtcgtcaggattcgcgcgatttattgcaagagccttttcaacaacctgcatttttttgtggaggccttcagaagagagtccggcgccccgtccggtaacgtgcgatgccggtgcacctgtgagcgctgctgtgactgtcgcgctggttgtagtattaccgattcccatttcaccaccacagaccagacggaagccctgctgcgcgcacttccccgcaagctcaatcccggttttcaccgctgcaatagcttcagcccttgtcatggcggcgtttttcgcaatattttctgtccctttgcgtatttttttatcaataactcccttaaacgagaatttttcggctactccgatatccaccgggaacacatccatatcaatcgatttcgccatcatgcacatggtggatcttccctgtcccatgtttcgggtgactgttgccgtgacgtcctgcccgcactgcgtcaccccctctgctacgactccgttatccgcacagaaaataaccgcagcccgcggtcgaataatcggtattggttcgcgctggattcctgcaagctgaataatcgcgtcctgcagcaatccgagtccgccaagcggcatcgcaatatcagaaaaacgtttttctgctgccctcattgctgctgcatccagcggtctgacgcgcgatacagcctccttgatcgtcattttcttctctcactccattccatgcatgtacgaacaaatttttcggagaaatcaatgtttgcccgaaaaaataaatgcggaaatccagcataaagtgacttcgtagcgtgcacgcaaggccattttctcccgtttggtttttctgctacaaaatcatgtccagcattctcagatttggcataatgaaactcatgcgcacggatttgtcctctacatgcggacagcatattgtcatcctgtgcagtcagtgtcacatacccaaacggctgtagttttttagtcaaaactgcgtttccgcgaacaacgccgaccatctccgcaccttccagatgctcatgaagatagagaaatccaccacactccgcaatcgtcggaagtccctttttgattgcatttttgatcgtttttctcatgtttgcattgtttgacagctcagtaatatgcaattccggatagccgccgccaaggtacaggccgtcagtattttcaggaatgcagctgtcggaaatcggagaaaattcaaccagttcagcgcctaaatcgcgcaatacctcaaaattatcctcataatagaaacaaaatgccttatcccgcgcaacggcaatacgtaccggttttttcgtcaccgggctgatctttttcgtatcatccgacagctgtaatgcggtgcgtgatatttttaatatttcttcaatatcaattctattatcagccgcatctgcaagcagatccagtctgtaattcaaatcctttaattcatctgcggttacaagtcccaaatgtctgtccggaatttccgcctctggtaccgacggaagatagcccagaaccttcaatccggatttctgcacaatatcacgataaaaaggatacattgcatccgaaatcccattcaaaaccacaccgcacagcgtgttttctgtgaaattacgaaaccccgaaagcatagctgccagagaaagtgactgtcccttcggacgcacaaccagtatcgcaggcgtacctgtttcgcgcgccagatgcgcggcggaggccgtgtcggtcgtgccggaaacgccatcatagaagcccattacgccttcgattacgccgagaccattttgcggaatgctgcgcacgatctgaccgcgtacttcacgctcactgatgaaaaaaaggtcaaggtttcggcttggaatgccgaggactgccttgtgaaacatgggatcgatataatccggtccgcacttgaatgctgcaagcggaatattttttcgctgcatcgcacgcagaacagcaagcgtgaccgttgtttttccgcagccgctgcccgttccggcaatcatgatcctcggtgcattactcgccatatttatccccttttcccgacaggataaacaccggattgtttgctgtcatcatcgtgtagcacccgatgctttttcccctcgccgcagaaagctgcgtgatttcgacctgctgcagaccgaattctgcaaacagcctttgcgtttcctgcaaagtctccagtgcgatcgcattcacaacaattcgtgccttcggattttttatcaatgcggtttcaataattttacgcatatttccgccgcttccaccgacaaaaacacagtccggtttgggaagatctgcaagcacttcgggcgcatggcctgggacgatatgcacattaaagcctccgagtttttgtctattctgcgcaataagctcgactgcttccgcattgcgttcgaccgcaaagacagctccgtccatcgctttccgcgcgagctcaaacgtcaccgcgcctgtgcccgcgccgatgtcccagacggtatcccccggctgtacgccgagacgcgcgaccgacacccatcgcacttcctctttggtcatcggaaccttcgcgcgcatcagcatttcgtcccgaacaggctcaaacggatttacagaattcggattgaggacaagcatcacggcaagacctgcgcaggggatttctgcaagctccgatgccgttcccttcaacactctttctccgggtgagccgagattttctccaatgtatacctgcacgccgccgagtccggcgtctgccagcgaacggcagacgaactgtacgttgttgtcaccgcctgccagcgcgaacgttttctcatggtagctgaccgcgccgagcagatctccttttctgccgtgaaggctgcgaatgcacgcattttcgtagctgattccgatttttgcacacagatactgcatacttgacagaccgcagaacagccgcacttcaccatgcgcgagcagcttttcccgcagttttccggcggcgctgaaaaatccaacatcgcccgaaaccagcagtgcagttctctccgctccgcatgcgatcgcccgttccgcaagctcggaaaacaggcagatctgtgcattttcgcagatttctgcaaggcgctccgtcgcaaacaccatttctgccgatacaagcgtctgcgcggcctcgccggtcagcgtttcccgtgtgcccattccggcgcctatgatatcgaaccggcgcatccgtgtccctcctttttatgccatctcgctgagtgtttcttctgccgcctgcaccgtgcaggcgaggtcgttctgcgtatgcacggacgaaacgaacatcgcctcaaactgactcggcgcgagataaattccccgcttcagcatgccgttaaagtatgccgcatatcgttttgtgtcacttttcttcgccgcagcatagcagtttaccggcgtttccgtgaaatacggacacagcagcgagccgatctggttgacctgcatcgcgatgccgtgcttttccgcacttgcgcgcagatggttcgcgatatagctcgcagaggtctccatgaccgtgtagatctccggatgatcggtgataatattcagttgggcgagacctgccgccatggcgaccggattgcccgacagcgtgccggcctgataaaccggtccggtcggtgcgacctgctccatgagggcgcggctgccggcataagcgccgaccggcataccgccgccgatgatcttgccgtaggtcacaaggtcggcctgcacgccgaaatattcctgtgcgccgcctgccgcaagacggaagcccgtgatgacctcatcgaagatgagcagcgcgccatgcctgtcgcagagcgtgcgcaggccctgtaaaaagccgtcctcaggcggcacaacacccatgttcgctgcaaccggctcgacgatgaccgctgcgaccgcgccgtcattcgcctcgagcagacgctcgaccgatgcgagatcgttgtactgcgccatcagcgtgtcctgcgctgcgccctttgtcacgcccttggaatccggttcgccctgcgtgagcgcgccgcttcccgctccgacgagcatcgcgtctgaatgaccgtgatagcagccctcgaacttgatgatcttgtctcgtccggtcgcgccgcgtgccagacggatcgcgctcatgaccgcctccgttcccgaattgaccatgcggaccatctcgacgccgggcagcatggagaccatcttctccgccatttcgacctcaagaccggtcggcgcgccgaaggaaaggccgcagaccattcggtcatacaccgccttgaggatgtcggggtggctgtgcccgaggatcatcggcccccacgagccgacatagtcgatatattccagtccgtcagcatccagaatgtggctgccgagcccctttacgataaagcgaggcgtaccgccaaccgcacggaacgcgcggacaggcgagttgacgccgccgggcagcaccctgcacccccgctcaaacagcttttccgagttcgtcatatcagccgatgtctcccttccgaatggcgtccgccagctcgcacgcaaaataagtgatcagaatatccgctccggcgcggaagatcgagaccgcgctctcacacatcacgccatattcgtcgatcagaccggccttcgccgccgccttgatcatcgcgtactcgccggacacctgataagccgcgacgggcaggtcaaatctgtccctgcacgcgcgcacgaggtcgagatacggcatcgcaggcttgatcatcagaatgtccgcgccctcctgcacatcgagctcgcattcgcgcatagcctcacgtccgttatgggggtccatctgatacgaacggcggtcgccgaacgccggggcagagcctgcggcgtcacggaacgggccgtagaaagtagacgcgaatttcgcggaatacgccatgaccggcgtgttgacaaagccgttttcgtcgagcgcggcgcggatcgccgccacacggccgtccatcatgtcgctcggcgcgaccatgtccgcaccggcgcgcgcatggctgaccgcagtccttgccagcacctcgagcgtcctgtcgttgtcgacatagtgaccgcacaggatgccgcagtggccgtgcgaggtgtactcgcacatgcagacgtccgtgatgatatacagctcgggcgcgatggcgcggagcgcacggataccctgctgcacaacgccgttcgagtcccatgcggacgagccggtctcgtccttgtgcttcggcagaccgaacagcagtacacgcgacacgccgtgtgcgcgcatgcgctcgaccgcccggccgagcatatcgggcgaatagtgatactgtccgggcagcgacggaatttcgtcgcagatgccctcgccctcgatgatgaagatcggccagatcaggctgtccgcagaaatgcgcgtctcgcgcaccatgcggcgcagcgtatccgacgtccgcagccgccgcggccggaaatccttgttgaacattgatattgtcacccttccagaacagttttgcaaagcgcgagaagggcggtctcggtcgcctcctgcgcgataaatagtttcatttcatagcttttcgcagcttcggccgtgaccgggccgatgcagagcgcggcaagtccgcgcaggttttcccgccccgcggcctccgcgaagctgtgcacggtggacgcgctcgtaaaggtcacgccgtcgagcgcccggttccggatgcgctcacgcagctcatccgccttcgcgcagcaccgtacggtatcgtaaagcggtacatccgtgacacggatgccgctgtttttcagtttttcggggagaatgcggctgccctcggccgcacgcagcaggagcgccgcgccaccgccctgcatttcccggcagagcgcgtccgcgaggtgttcgctgtcgtaagcctcgggcacgaggtcggcgctgatgccgcaggaagcgagcgtctccgccgttgcgctgccgatgcaggcgaatttcatcccgtacagcgcgcgcagatcgcgtcctgcgcgaaacagtgcgcgtaccgccgcctgtacgcctgccggcgaggtaaacaccgcccagtcatgcttttcctcgagcgcccctgtgagcaaagccgtgtccccgcgctcatgcagctcgatgcagggcgcggcgatgacctccgcgccgagcgcacgcagaccgtccaccagtcccgcgttccgtccctccgggcgcgttacggccagtgtctttccgtggagcggcagcgccgtccaccagtcgagcgtaccgctcagcgcgcagacgcgcccgaccacgatgagcgccgggctgtgcaccccggccttttctgccgcatccgccagctcacccacagtcgaaacgaccttgcgctgtgtgccgcgcgcgccgttttcgatgaccgccgccggcatatccggcggcattcctgccgccgtgaggccgtccgttacctgccggagcgcggtcagccccatgaggaacacgagcgttccgcccgtgcgcacgagcgcttcaaagtcgatgcaaagcgacttccccgcccgtgcatgcgcggtcacgatgtgcaccgatgagcagaaatcgcggtgcgtcaccgggataccggcgaacgccggtgcggcgagcgcactcgtcacgcccggcagcacgcggaacggcacgccgtgcgccttcagatattcgcactcctcgccgccgcgcccaaacagatagcagtcgccgcccttgaggcggacggtgcgctttccctgccgcgcaaggcgcaccagcagggcgttgatctcgtcctgcggcacggggtgatgccccattttcttgccgacgcagatgcgctccgcgcccttcgggatgaggtcgaggatgctctcgtccaccagacggtcatatacgaccgcgtccgcctgtctgagcgccgcaccgccgccgcgcgttaaaagctccgcgccgcccggccctgcaccgaccagagttaccgtttccgtcatgtttcctcctccgcctgtctgcgcaggcgttccgcgagtatgcagccgagctgctcgcccgtctccggtgcgcctgtcagctctccccggatcaggctccgctcatccgcgctgacgtacagtccacgcaggcgcagcgtcccgttttcgagcacggcatacgccgccgccggggaaaagcagccgccgccgagcgcccggatgaacgcccgttccgccagagcgcagacgcgcgtctccgcgtcatcgagcagctgcgccgccgcgcggcactcgccctcccgcgcctgcacggcaaggatgccctgcccggccgccgggagcatttcctccggcgaaaaataccggctgatgcggtctcgcagccccagacggtgcagtccggccgccgcgagcaccagtgcgccgtattcgccgctgtcgagcctgcgcagccgagtctgcacatttccgcgcaccggttttacctcgataccgggaaacagctgtgccagctgcacgcgccgccgcgcggacgagcagccgatcggcttttccctgtcccagctgccgtcctccggcagcacgagcgcgtctctcgcgtccgcccgcttcgggaacgcgatgagcggcagaccgtccggctgctccatcggcacatccttcaggctgtgcaccgtgaggtcgacttcgcctgcggcgagcgcgcggtcgagctccttgacgaacagtcccttgccgccgaccttgtccagcgtgcggtcgaggatcttatcgcccgtcgttttcatcgtcacgagctcgcactcgcccagacggcgcatgacctcctccgcctgcacgaccgcaaggcggctgtctctgctgccaacttttatcatgtcatttcctccagtacccgtcggatgcgccgcgccgcctcggcagtcctcgcgtgcgaggtgccgcgcgagaccacgccggccgtcagctccgcgccctcacagactgccgggaaaaagaacgtcgactccaatgcgctgtccgcgacgctcaccggaatgccgagagacgcgcagtcctccgcgatacggtggttgaccgcgcggtcatcggtcgccgcgactgccagaaaaacccccgaaagatcgcttttctcgtagccgcgacacagatttatctcgatttccgcgcgtttttccggtgctgtgaccgtgacgcacgcgccgaagcgccgcagcacagcagcacgccgcgccgcgatttttcctgcgccgaacaccgcgcaccgcctgccctcgagcggcacgaacagcggaaagcgcggcggcgccgtctgctttctctcctccgcaagaccgagctcttcgcgcagaaacgcctgcatttctgcaaggctgcggccgctctcctcgcgcggacgggcaatgatgagcgtttttatcccggtctcgcgcgcggccgcgagtttttccgcaaagccgcccgttgcgcccgtgtctttggtgacaaggatctccgcgccggtctgacggatgagcgcagcgttcatcccggcagaaaacggcccctgcatcgcgatgatgtgcgagccgggaaagccgagggacgcgcatttctgtatcacgccgacgctcggcagcacacgcggatacagccgttccgcaaagttttcgaccgccgtatacgcctcgagttccttgctcccggtcgtcagcagcacctttccggggtgtctgctgagccacgcgacagcggcctccgtgtcgggtacggtctcaccctcgccgtgccgcagcgccggacggagcagccgctcgtaccgcgcccccgttttcgcgcacgccgtgcgcagattgtcggtcacgagcgcggcataggggtgcgtcgcgtcgatgagcagcgtgtccgcatcgagccgcgccgcgatctcgtttttgtccagacgcccctcatgcaccgtgatgccgggcatcggctccatgaccgccgcgccgtactcggtcgcgacaaaaacctccgcaggaacgccgttcgcggcgagaaagcggctgagctcgtgcccctcggtcgtgcccgaaaaaacgcagatcctcatacgccgcggtacccccggggcgttaccatgcggccgtcgatgacgaccgtgcggctgttgccgacaaagaccgtcgtgagcatatcgaccggcgtgtcgcgcagcgcaccgagcgtcgtgagcgagaagcactcgccctcacggccgatgctgcgcaccgtaccgcacacggtctcgggcggcacgctctcgagcagaatgtcacacgcacgcgcgagatgatccgcacgcctgcggctggagggattgtagagcgcgatgcagaaatcccctgcggccgcgccgcgcagacgctgctcgatcttgtcccacggtgtcagcaggtcggacaggctgatgcacgcgaaatcgcaggtcagcggcgaaccgagcaccgcgccgcccgagcaggccgccgtgatgccggggatgacctcgacctcgacgcccgttccggctgccagctcgatgagcagtccggccatgccgtacacaccggcgtcacccgacgagaccaccgcgaccgttctgccctgcttcgcgcgctcgagcgccgccgcacagcggtccacctcgcgtgtcatgccggtctggatgcgctcctttccctcgatgaggctatcgataaggtcgaggtacaggccgtagccggccacgcagtcgcatgcttcgagcgcacgcaccgcgcgcagcgtcatctgctcctctccgcccgggccgatgccgatacagtaaattttcatctcccgctcccctttccgatgtgttcgagacaggctttcatggtttctacgtcgatcttctgcttcattccgccgaggacaagctccaccgcgcggtttgcggccagctctgcgagcgtttccgcgtccccgtccgcaacgagcgcatcatagtcccggatgtggcgcacgcgagaggcgaccgcacgcttgagctgcgcgatgagcggcagggcggcgcggtagttgagccacgcgaaaaactcgcgcgtctcctcgtcgagaatgcgcagcgcggtctcccgcgcagcgttgtctgcgtcaccgagctcaccgagatcatccagattgaacagtgccgtgtgctcgctcgccgctgcgctctcgatgtcgcgcggcatggccagatcgagcagcaggcgcggcggatggctgagcgcggcggtctgctccgccgtcaaggtgaaatgcggactggtcgtggcgctgacgacgagatccgcgccctcgatgcgctccatgcgccgctcatacggcacggtggcgcagccctgcggcacgacggtctcgccgtggcggtaggtacggagcgtgaccgtgaccgcgcagccggcctccacgagtgcacgcgccgcgagccgccccatctcgccgttgccgatcacgaccgcgcgttttcctgcgagcgtgccgaaaaagcgttccgccctgcgcacgccggcctgcgccgccgaggccggcaccccggtcagccgtgtctcggtgcgcacacgcttgcctgcggtgatggcacggcggaacagcgtatcgagcaccgcgtccgtcgttttcagctcgcgcgcgagtgcggcggcatccttgacctgcgaaacgatctggtcatccccgaagatctgcgactgcatcccggccgagacctgcatcagatgacgcaccgcctcgccgcctgcgcgctgcacgaggaacggacggcacgccggcgctccggcggcttcgcacagcacctccgccgcgtcaggcagcacgcgctccccctctgcgtgcaggtacagctcggtgcggctgcatgtcgcgagcagcaccgccgcgcagccggtccgctctgcgatgcgcagcagaaccgcctgcacctgtccccgcaccagagacagcttttcgcgctgctcaagtgctgcgctcacatggtcaatgcctgccatacagagtttcacgtttgttcctcctcggtcattcttccaggcagacgcggtatccgcctgccgcaaacgcggctgttacgccgtttttcgcgtatttccgcgcgatgatcgtgccgttcccggcatttacgacggcagcgcgctcgcatacgctgtcgacgcccaccgtgcttttcacgaactccgacgccgtaaattcgccgggcgcggcgttcagttcttctgccgaatacacggcaagcggcagcccgtgtgcggcgcagaaggacacaaggcccggctcgtccttcttgatgtcgatgctcgcgacagccttcaccgccgcaagcggcagacctgcccggtcgagcgcctcgcgcacggtctgctcgaccgcgcctgccgatacgcccttccggcagccgatgccgaggctgatcacgcgcggcaccagatgcagcgtatgcgggaacggctgcacttcggtgtcaaaaccgatgacaaaaccgctttccgctgctgttttcgtgttgatatgcgccgggagcaggccgtcgaccggaaacgccgaccgcaggccgaccgtgtcgccgcgcagcagcgcacccgaaatgtatttgatgttttccgggtcgaagaccacgcattcatgcgatttcgcccagctgtcgaccgcaaaaaccgcgcggccgtcggtcgccgtcgtgatgattgccgtcgcgcccagcccctccgccagccgttcggcaagctcgttcgcgccgccgagatggccggagagcagcgggatgacaaaccgtccctgctcgtcgatcacaacgaccgccgggtcatacgcctttccggcgagatacggcgcggccgcgcggaccgcgatgcctgccgcacccacgaaaacgatcaggtcgcagtccaccatcgcctgctgtgcaaaccgcgggagcgaggtgttcgagagcgacagatcgaccgcgcgcgcgtagcgctcacacagaaaatccggcagcagccgggcagctttcgcggccgtctgtgcaccgacttcggtaaaggagacgaatttcgcgtgcttcatcggcttgcctcacggaaaccggtggtgaacgccgggtcatacagcttagagcggtcgtagctgtcgccaaggaagccgccgaccgtgatgagcgcggttttggtgatgccctctcgcgcgcctgccgccgcaagctcgcccacggtcgtgcgcacgaccttttcgtccggccacgttgccttgtagacgatggccgcaggcgtttccggcgcgcagccgccctcgatgagccgcgcggacagcttttcgagctgtccagccgacagaaaaatgaccatggtcgcgccgtgcgcggcaagactctcgatctgctcgcgctcggggacgggtgtgcgcccctccatgcgcgtcaggatgaccgtctggctgacgttcggcagggtatattctgccttgagcgccgccgccgcgccgcagaacgacgaaacgcccgggcagacctcgtatgcaagccccagtctgtcgagcgcgtccatctgctcgcgatgcgcgccgtaaacgcaggggtctccggtgtgcaggcgcacgactgtctttcccgcacgcgccgcaggcgccatgaccgcgatgacctcctcgagcgtcattttggcgctgtcgtagatcgcacagtctccttttgcgtagtccagcagcgccggattaacgagcgaaccggcgtaaacgatgacatccgcctcgccgagcagcttcgcgccgcgcacagtgatgaggtcgggcgcgcctgagccggcgccgacaaagtagatcatttgcgctcctcctttaccagaatgatggaaaaataaccggaaggctcgtcgagctcgtccagatcgcatatcacgcgctcgccctccatgccgcagcgctcaacgagcgccgcctgttcgagctggccgctctcacgcagctcatcgcgcacgcgcagcacaccgcggcctgccttcatgagcaccttgctgcccggcagggcgaggccctcgcgctctctgccgtgcgaagccgggatgatgtgcagcatttcgccgtcctcgcacagggcgcggccgagcttggccgccgccgcacagaacgacggtacgccggggataagctccgcctcacagccgcgtgcggccacgcgcttatgcacataccacgcggtcgaatagaccgtcgggtcgccgagtgtgaggaacgcgaccgtctttcccttgtcgatgagcgcacagatggcgtccgccgccgcatcatggcttgcgttccgcgccgccctgtcgtgcgtcatgggcatggcgaacgagcggatttccttacctttcatatactgcgcggcaatatcgagcgcggtctggccgccgccgtccgattgcggcaccgcgacgatgtcgcactcagacaggatgcggatggcctttgcggtcagcagctccgggtcgcccggaccaacgccgacgctgtataactttccctttttcataaattcttcctcagtttttcgcaaagccgcgccgcgcctgccgactgcgcaagcacgccgtatttcgtcgtaaacatgataaattccgccgctgcacgccctttgaggcgcctcgcgatgcgtttttccatttcgtcctgaatgcgcgccatcacgcgctcccgcacgctctcccggtcgagcagctcgatgcacgcatcgaccgagaccgcctgcatgagcagctcgagcgtcttgcggccagccccgcacagcgccgcatgcgcggtgaagatctcctgccgcgcgtccgcgaccgaggaatgcgtattcatcacgcctgcggcgagcttgacgagctttccggcgtggccgacaagcaggatctccggatagccgcaaacgaccgcatgatcaaaggcttctccgatataatttgagcacttgaccgcgcgttccagatcgagttcgagcgtttcgcgcgcgaaatccgcgccgtagttgcccggacagaggaacgcgacgcgctgtccggcggcgtacagactgtccatttccagacagatcgtgtccacgagcgctttctcgctcatcggctctacgatgccgctggtaccgagaatcgagatgccgccgatgatgccaaggtgactgttataggtctggagcgcgagttcttcgccgttttcgaccgagatcacaaccgaaaatccgccttcatagccatttccctgtgccgcacgctcgagcgccgccttgatctgcgcacgcgggccgggattgatggcggcctcaccgaccggctccgcgagtcccggacgggtcacacggccgacgccgctgccgccgtcgatgacgatgccgctgtccgcgcgccggacggccgacgaaatgagcacgccgttcgtgatgtctgggtcgtcgcctgcatccttgcgcaccgcgcagaccgcctcgccgtcatgcaggctcgcctgctcaaccggcaggttgaacgtcacgccgcccggcgtgagcagtcggatttccgccggtgcactccccgtcagcagcaggatcgccgccgcctgcgatgccgccgcagcgcacgaacctgttgtccagccgcgccgcagcgtttccgtgccgcggtaaaccgtgagcggacccgtcatcgcgctccctcctttttcgatagaaatgcagtttatattatagcacagagatggatttttttgaataccgttcggcagttttcggacgattttgataatttgatagatcacaaagataaacacgaaaaatcccccatccaaaaggacaggggatttacattcatatcatgtgctttcgagcgggtcagccccggtcgaaggcacctttttgacaggaaggaccggacagatcgaggaaggcggcgaggccgcgtacatatgtacgcaacgaaccgcttgacgacgagctgcgccggtattccgcagtcaaagattacttagcttccttagcagccttgatcgcgtcgatcatcatcggaacaaccttgaacaggtcgccgcagatgccgtagtcagctacgtcgaagatcggagcggagtcagacttgttgactgctacgatgcactcggaatcctgcatgccagccttgtgctggatagcgccggaaatgcccagagcaacatacagcttcggatgtacggtcttgccggtctgaccaacctgatggtcagcagtcagccagccggagtcgatagcagcacgggaaccgccaacaacgccgccgaacaggccagccagctcttcagccagcttgatgccggtctcaacgtccttggagataccgcggccaacagaaacgactacctcggcgccggtcaggtcaaccagctccttagcttccttgacgacctcgagaaccttggtcttgatgtcagcgtcggacagctcgaaagctaccggctcaacaactactgcgttagccttagcctcgttgtactcgcccttcttcagaacgcccggacgaacggtcgccatctgc

SEQ ID NO: 12940 - DNA, 798 bp, Unknown
  gut microbiota DNA sequence
cgatgtgccgtgtaacgatgcagtagacgcgaaagtgtttgtcatcgacgatttgacgcattctactatgctgctcgctgaagaatattaagatttactaaacgaaatggaggaacaaccaatgaaggaaacgagaatttgtgcaaactgcggtgcagaacattcaatcgaagatatgtaccaggtagagggcgactggctctgcgaggactgcgccgaccggttgactgtcatctgcgaccactgtgccgagcgggtctacgaggagaacgctgttgaggatgacacgcacacgctttgcgaccactgctttgatgagtattacgtccgctgcgatgactgtggccgcattattcaccgtgaccgcgcgtactgggacggtgacgataacgcttactgcgcgtcctgctgggacgagcactgcgaggtcatccacgaatacagctatacgcccgaccttgtattccacggcaaaggcctgcgtcatttcggcgttgagcttgaaatcgatgacggcggtacagtcaacagcaatgcgcagaagctgctcgacatcgcgaatgccaacgccgaaaatctctacatcaagacggacggcagtctggatgagggtcttgagctcgtcacgcatcctatgacgctcgagtaccatttgaatgaaatgccgtgggcggaagtcctccgcaaggcgcagagcatggggtacctcagccacgcggcaggcacctgcggccttcacgttcatatctcccgcttggcgttcggctgtacatatgagcagcaggaagccgcaatcgc

SEQ ID NO: 12941 - DNA, 1382 bp, Unknown
  gut microbiota DNA sequence
ccgcctgttggacgttggtgcagaaggtatgccgcagcacatggggcgtgatccgagggacaggcttgccgtatgccttttcaaatcgcgcttgcagccctcgcatatagttctccaagtgcatcgcaaccttcggcatcccagacttgtccagaaagaggaacccgctgtgaccgtccaccagcaattccaccttcggggcagttctggctttcaccacccgcatcagcgccatgtaaaccgcatccgtcattgggacgtttcggatgccgcttttggttttgggcggtgtgacgaaatagggcttctctgccgtccggcatagctgccgccgaacgtgaatacagcgccggtcaaagtcaatatctgcccgtgtcagaccgtacagctcgctcacgcgcaagccggttcccagcaggatcacaatgtcatcatagtaattcccgccgcagtcctgcacgaattgcagatacttctcttgctgctccttggtcagcgcgtcgcgtacataggcatcctttggtatcacgtcggacagcttgaacttgaacggattcttgcgaatgatgtcatcatccaccgccatttcaaacgccggtctgacaacgctttgcggcacgccgatggtgttttgcttgatgccgctgtcgtgcaggaacacgaaccagccctttgcgtcggagagctttatggttttgatcggcttctgcccgaacggatcagcatgaatccgcttgaccgcagaaccatacgaccgcagggagttttgcttcaagccccgtttcaggttcatgtagcggtcgaccagctccgccacggtcatctcgcccgctgcatagtcgatgccgtccgccatgtcgcgccgcagctcgtcctccttcttccgcagctctgtcagggatttggcgtaaatacagcgccgtttcttgtgtatatcggtataacgatagtcataagtgccgtttgctctttggctttcgccgtccttcaaaacacgacctttgctatctttgcgcttttcagacaattcaggaactcctttctgtgaaaagcgcgattatagggattgatacaagtatatcataccgaatatgcgatttccactgatcttgaacggaaacagacaactttttcaaagtatcgctgtatcatggttttcacatcactttttcaaatagaatacgcctgctcgatgaactgatcgaacagtcggcgtttaatcaggcgcttgttgcccacccagaggacgaatttgcatcggtcctcgttggtgatctcacgcagcttgttgataccaatgccggaataagccgcagcctcctccaagctcagattgctcttttcccaaatcgggatttccttcataggcagtttatcctcct

SEQ ID NO: 12942 - DNA, 1197 bp, Unknown
  gut microbiota DNA sequence
atttgcaccggtcctcgttggtgatctcgcgcagtttgttgataccaatgccagagtaagccgcagccttctccaagctcagattgctcttttcccaaatcgggatttccttcataggcagtttaccctccttgtaaaaatagccagacagggcgaggcggcaacgaagtccggcaacggacttccaaaaacctcgaaacatacccggtctgacggttgatttacgattttccttttcttctacttttctgttgttttagttgtcaaaggtagaaaaaagcctgacaggacagggattctcccggcaaccagcccggcaacgggataacaacatgctttacaacaagccgctcttttcagaacggcatctcgatctgctccgtgatctccacaaagccgtccgggattttagcggctgaattgtcgctgcccgttgcagccctttcacgctcccagcccttttgcctgccgtacccgacaaagctgcgtggattggagaaatacgtccagccagtcacacactggttcataatctcgttgatctcgcggatctcccactgcttcggctcatcaaatgtgtgattcagcgcctccttgtaaagctgcttggagcagacggtatcgcctgcatagctatcaagaaatgcctgaatcatgccagctttcgtgtcctccggcatgaagtccttctgatgcgccttgagataacgtaccatttccggactgaacgtcagcttccaaccacctgcccggtagatgctcattgcctccgcccacacctgctgcaaataggttctggatgcggcttcgtcctccaaaatgtgaacctctgcctgctccggacagacctgcaccggcagaaagcgccggttgccggaacggtcgaggggcaggaagtccattgcgttggatgtgccgccgaacacgcattgccgcagccggtctgccgggtgggtttcatacgggattttgtagacctccttctggcggctcagaaacgatttgatttcctcaatgcttttggcgttggcggtggcgatcatctcggacatttcaatgatccagtgaccttgcagcttgcggtatacgttttcatcgtccagctttcgtagatcgtcagagaaccactcgtccttgcctgccagcaggcgaaagaaggtggactttcccgcgccctgcccacccaccagacagagc

SEQ ID NO: 12943 - DNA, 1717 bp, Unknown
  gut microbiota DNA sequence
tatcagtacctctattttatcacaccttcatgcgataagaaaggggttttatcattatgccaagaaaaaagcctgtgcgcaaggacaagcgctgggagtacaagctgacgctcgggcgcgatgtacacggcaagccgctgcgcaaatcgttttacagcacggtgagcctgtcggacgcaaagcgcaaagccgaggagtaccgcgtcgccgccgaggtgtcggcacgcacgggtgaggcgtttgtaccgtccaccggcaactttgccgactgggcgcgcaaatggctgcgcacctacaagcagccgtttgttgacgtcaatacctacgagctgacctatgtcagtctggtcgagggtcatctgatcccctatttcggcgcggctcggctgagcgacattcgtccggcggacatacaggcgtacttcgccacaaagacggaatgctcggagagccggctcaagaaaatgcggtcgattttgaatgctctctttgagtgcgcgatcgagaacgacctgtgctggaagaacccggcgaagcacagcaccttccgcagcacggcacgcaagcacgagaaaaaggtgctgaccgatgagcagatcgagcttgccaaggcgttcacccgcgacaccatgccggaggtcgcgctgctgctcgaaaccggtctgcggcgcggtgagctgctcgggctgatgtggtcggactttgacgagcgggagcggacgctcagcgtgcgccggtcgatggcgctcaagcacggcgttgtgaccgccaatccgcccaaatgggacagctaccgcacgctgccgctgaacaatgaaaccatgcagctaatccacacgctgccgcacgacagcctgtatctgttccccaatgcgaatggcgagccgcacagcccgaacagctggtcccagaagctcggcaggtgtatgtgccgcctgaacgaagcgcatccagaggtgccgatcctgaccgcgcacgagctgcgccacacctacggtacttacctgcgccggcatggagccgacatctacaccattcagaagctgctcggacataaggacatcaacgtcaccgccgagatctacgtccataacgaactcgacaccctgcgcgaagcggttaccgcgctggagaaccgcgctgctgctgccaaatagcagaacgcccctccggaaaaccggtttcgatgccggctcccggagggggctgtctttttattcggttggccgcggcgtatcgccgtcaaaaaccacatgggcaaagcggaaacgctgcgtaacatctggatatttcttgcggtccacttcggaggcgaacatctcatacggccgcgcatagattttgaagtcaccgtagagcgcctgatagatcaccaacggttcgccggtttccgtgtgcgtggcgatggcgaggacctgatatagtttgtttttgaagtgtaagtatttttcaccgaccagaatttttcttgagctcatcaatatctcccctgtcttttgcaaatattatagcatatcagcaagggaataaccagcagagaacccggccgtaaaaagtaccttttgtcgtcaaaatgtcgtaagttaaaaactgacatttccaaagcaaagaaaaagtgctgaaacccaaagatttcagcacaattcttggtgcggatggggggacttgaacccccacgtccttgcgaacactagcacctgaagctagcgcgtctgcc

SEQ ID NO: 12944 - DNA, 2173 bp, Unknown
  gut microbiota DNA sequence
cggcgtgaatgcgccataggttatacgtccgatgcggtcgattttcagaatttcaccttctttcggctctaagatgtccgttggtgcctttaaccggagctttttgatcgccttgcagagaatttcctgcgtggaggcatagagtagaaagccatcatagtacataatgcacagcggattatctccgaccacgaaccagatggagttatccttatccagaacggtaaacacaaaagaaccctcgaccttctcagccattgctttcaggctgtcaaagtcgagggttttctgctgttcaagaagctgcaccgcaacgtagctgtccgtttcaacactcgtgagcggcagattttcttccatgcggagttctttgtcattccagagaacgccgttgtgagcgagagcaaagctgtttccgtcaacgtgaccaagaaacgggtggttattctggttgaactgtgcattgccctgtgtggtcatgcgagtgtgtcccatcacgacatttacgccgtgcggaatatgaatcttcatttttcgagcgggaagagggcgcttatagatgcgcaggcggtcgttgaaattgtacgcgataccggtcgcatccgtgccgcgcacctgacattcgcgagccagcgtattcagaattttgtttttcgtatgggtactcaggcactccttaaaatcgattaaaccgaataaactgcacaaatttcattcctcctcattgttcacagtgacaggttcgttaacgtacagacggcgttctttgagatactggataagctccggctcgtgcaccgtgtctaagaagtcaaaccagctcatatcctgtacttcgctgtcggacaaagaaacagcgacttcacagaggtgattgaccatctgcaaagtcgctttcaaggtattcagtttgagcgtaccgcgaaacattctcatctccacggtatccgagttcgtaaggttgacggcggtgtagcgcccggcgcacgagttcttcgcgtggcacatctggtctgtcggcgtgagcttcataccgtagcgtgccgcctagcggttcatctgggactgcgtgcggcggctgaatcgcaagagttccgcccagaacttttcgacgaagtagagcaggcgcgcaatcgcggcctcttgctgttcataggtacagccaaacgccaagcgggaaatatgaacatgcaggccacaggtcccggcggcgtggctgaggtagtccatgctctgcgctttacgcaacacctccgcccacggcatttcattcagatggtatgtaagtgtcattgggtgcgtgacgagttccaaaccatcgtccaagctgccgtccgtcttgatgcacagattttccgcgttcgcattggcgatgttcaacaatttttcggcattgtaacggtctgtaccgccgccatcaatttccaattcgacgccgaaatgccgcaggcccttgccatggaaaacgagatcgggcgtgtagctatattcgtggattaccgagcaataagcgtcatcatcgtcccagtagacgcggtcgcggcggagaatgcggtcgcaatctgcacaacggacgtaatcctcatcgaaacaactttcgcagagggtgtagttactgtcctcaacagcatcttcggagtaaatccgctctccgcaggcgtcgcagacaacggtaagctcgtcggcgcagctctcgcacagccactcgcttccgactcgaaacatctcatcgagtgggtgctcggcatcgcagtttgcacaaattcttgtctctttcattggttgttcctccgtttcgtttgtagggttttaatattcttccgccagcagcatcgtagaatatgtacggtcatcgatgacaaatactttcgagtctactgcgtccggacactctacgtcaagctcgtagcggtacggcggctgctcctgctcatggacgatgtgctgaccggttggcgttttggtaaggataaacacttgcaggtaatcctttctcggcacttccatcgtcaaaaccatgtgccacatgaggttgatcagccacgatgggatttcattctccacgccgcgtgtcaggaatttttgattttcgaacatgtttcttctcctttcaaacaaaaataggccacagggaattaccctgtggccctcatgaatataatatatattttat

SEQ ID NO: 12945 - DNA, 184 bp, Unknown
  gut microbiota DNA sequence
caatttttagagagtttgatcctggctcaggatgaacgctggcggcgtgcctaacacatgcaagtcgaacggagtcgttttggaaaatccttcgggattggaattctcgacttagtggcggacgggtgagtaacgcgtgagcaatctgcctttaagagggggataacagtcggaaacggctgct

SEQ ID NO: 12946 - DNA, 2519 bp, Unknown
  gut microbiota DNA sequence
agtggacattgaaagcgtgctttccgaaaaaggcagtaatttctcagtaaaaacgacggttcatattcgtagactcttttgtgaatgctatcctaatagttggccacaggagatgcgggaggtttgacggttacgttataatttgaaaaatacgattgacatacgagataaacagggctatgcttgtattgcgaaaaagcaagctcttgacagtgcatgaggaggaattatcatggcatcactttttccaagagaggaacacgccgaagcactgttccacagaattctgagcaatccgggtgcagagcagcagttgtacgaaaccttctgcatggaacaggagaatgcatcgtttgaggatggcggcggtgcagagtgcagctttgcgaaggcgcttttgcaggcttacgagaaccgcgatatttccgcgctgacgattgcgctatgcaataacacgatgttcgatctgctgcgcacagcctatcttattccgtatcgctttcatggcaaaaacggcgggaatcccagactgctgaccgatgcgaacggtgaggtgcgcgaggaataccgcaatgccgtctcggcacgagagctgcgcaagttccacgatatttaccgtcagcacctgtctgtaccgcgtgcggcgctctacctggccgatggcagtcatctgcgccacaagtacaccaaggacatgcaggtgcgggagatgtattcgccgtcccgccgcggtgtgctgacgttgtacgcgctgccggatacggtcgagcagggtctgaccgaagcacaggcgtacaacatcgtctgggacgcattcaatgaaatccagcagaggtgtccgaccgcgatggtattctacggtcaggacaccggctacaagttgcagaaaagccacgatgaactgggcgttctgctgccgcttaaggagtttgaacataacatcctgcaccatctcgagcaggtggacggcattgtgctgcgctgtcgtgaggagatgatccatcaggctggcaaggactcgctgccgctgtaaaacgaataacaaaaccgctgctatgaggaaaactcacagcagcggttttggcttgtctgcagaaaatcaggtgcagtaacggaacatcttatccgtcataatgcgggcgaagatcagtccgagcggaagcgcgagaatgatcaatgtggcagacgcgaaccacgaagcggaaatgctcaggttcatcataccgagattgtaaattgcgcggtagagatacaggccgggcaccataatcacaatagacggcactgtaatcgcgatgcgcggaaaaccggagtgctttttgtacgcagaagccagcagtccggcgatcatggccgcgaaaaatgcggcagccgcaggcggcaaagatgcaaggtcaaccagctccagacgcagcgtgttggatattgcgccgataatcgcggcggacatcgccagtggtaccgggctgttgaacatgatcgaaaagccgaacacaccgcagaagctggtgagcaggcggaatacgatatactgcagcatgctgaggttcagcggcagaaaatctaccggtttgaggtgcagcgcgagcgccatcagccatgcggccatcgtggcaatcaatacgatcattaccgcgtagctgagccgttcgagacctgaccgcatatccagcttggccatgtcgatgccgctggtgatgaacggaaatccgggaatgatgaacagcatggagcagatgtagccggcttcgtgctggacattgatgccgcaggtcatctcggcaatcttgagacagcccgcgtacaccagacaggctgctgcgacagaaacggtcgtgcagagcacaagcgtcagatggtgcttggacagcttgcagcgcacggcgttgccgatacccgcgccaaagaatgcgagtatcatctcgacccagccgccgccgagcagaaacgtaaatgcaccgcaggcgagggcagccgccagaccgagcatcagtggcgaatacagtccgtgcacctgctcgatttcgtcaagatgggtgtgcagctgctcgccggtcatacgggagcagatgtcggcaaactcagcgacgaactgctcgagtcggttgagctttgaggtgttgacgcctgtgctggtcagcgtgagcgtttgcgaaaatgcctgttcaccgtcaaagcaggtgtattcgatcgaggtcaggccaatgtcggctgcacagaccaaccccagctcctccgcgagcgtgttcatcgaactgcggacacgccatgcaccggtgccgcatgagagcagcatcaagccggtgcggccgatgacggaggccttctcgcgcaaaggcgcggcagagatcggtagagtagcatcatgtgatgcgtaatcgtgccacgcaatgtgcatgtggttggggcgaaaagcagtttgcggcatagtaacgcacttccttatatggctgtattgtagtcgttctgtgcagtaaagtcaatagatgaatgtagaaaacgtctgttcaattatttgt

SEQ ID NO: 12947 - DNA, 467 bp, Unknown
  gut microbiota DNA sequence
aacgagcctaactgcgagaatgacggttcgagcagtaacgaaagttggagttagtgatccggcggtatgtgaatggaaatgccgtcgctcaacggataaaagctaccctggggataacaggctgatctcccccaagagtccacatcgacggggaggtttggcacctcgatgtcggctcatcgcatcctggggctgaattcggtcccaagggtttggctgttcgccaattaaagcggtacgcgagctgggttcagaacgtcgtgagacagttcggtccctatctgttgcgggcgcaggaatattgagaggagctgtccttagtacgagaggaccgggatggacgtaccgctggtgcaccagttgttctgccaagggcatagctgggtagctaagtacggacgagataaacgctgaaggcatctaagcgtgaaactcccctcgagataagtgttcccatccttcgggag

SEQ ID NO: 12948 - DNA, 75702 bp, Unknown
  gut microbiota DNA sequence
tcttcaaaagtaggtgttaatggtgacgagggtacacctgttcccattccgaacacagtagttaagttcgtttacggtgacaatacttggctggcgacggcccgggaagataactcaacgcctacatcatttcaaaccgatccgaaagggtcggttttctgttgtttaaaagacgttgacgctgccgtgcggcatcgcgcgtgaaataatatctgcaaagcaaataaaaccgggggcgtgcacctcggttttgttgttttcagagggagaaaaattccgaatgggagctttcgggtgattcgtgtctgcgtagtcagaatacaaactgtcgcgaaaatgatagtttttcgacagcctctcaatgcaggtgtatgctgccatcactttttccttgctttttttcattcatcgcagtataatgcgattatcgggcttcgtgcccggcaggcggatggtattcccttatggaaactgtaccggcacattttatccctgaaagccccgttccatcgggcagcaggatcgcatcacccatgaaaacgaaaggctgggtgatcgaatgaaaactggttttatcggagcaggcaaagtcggcttctctctcggcaaaatgtttgcggagagcggacttccgctgaccggctattacagcaggcagcgagaggcggcgcaggaggcggctgcatttaccggaacacgcgcatacagtgatctctgcgagttggtgcaggacagtgatgcgatttttctgactgttcccgacagagcgattaccccggtttatctcgaactgcggtcgttttccctttcaggcaaacaaatatgtcattgcagcggcgcactctcggcccgggacgcttttcccggcatcgaggagacaggtgcgctcggtctttccatccatccgctttttcccgtcagcagcaggtacgattcgtatcgggaacttgcggatgcttttttctgtctggagggcgaaaaaagcgccatcccggcatggaaaacgcagctggagtgctgcggctgcacggtgcagaccatcgatgcagcggtcaagccgctctatcatgcggcctgcgccacggcgagtaatctggtctgcgcgctcgtgcagcagagcatcgatgagctgacgcgctgcggctttagtcaggaagatgcgcttcgcgcactgacgccgctcatccgcagcaacaccgcgcgtctgcttgcggtcggcccgacagaggcgctgaccggtccggtcgaacgaaacgactgcgaaacggtgaaaaaacatcttgcctgtctcacggagggaaatgagagggcgctttacacagcagctacccgaaaactgatcgaaatagcggtcggccggcatccggaagcggattacggcgcattgcgggagctgacggaggaaggacaaaaatgaaaaacacagtagcaactcttgccgcgatgaagaggaacggcgagaagatctcgcagctgacctgttatgactactcgaccgcgaaactgatcgacgcggcgggaatcaacatgatcctggtcggcgacagcctcggcatgaccatgcagggctacaaggacacgcttccggtaacggtcgatgagatgatcgtttacggccgcagcgtcgtgcgcggctgcaaggagacgttcgttgtggtcgatatgccgttcatgagctatcagatctcggtcgagcaggcgatgcagaatgcaggccgcatcatgaaggagaccggcgcgagcgcggtcaagcttgagggcggaaaagaggtctgcccccagatccgcgccatcacggccgcaggcattccggtcgtcgcgcatatcggcatgacgccgcagtcggtcaacgccttcggcggctttaccgtgcagggcaagggcgaggcaaacgcacgccgcgtgctcgaggatgcgctcgcggtacaggaggcaggcgctttcgcggtaacgctcgaatgcgtgccgccgaaactctccgcgctcatcacgaaaaagctcgacatcatcaccatcggtatcggcgcttcgcccgagtgcgacgcgcaggtgctggtctggcaggatatgctcggcatttcggacttcaagcccaaattcgccaagcatttcgccgaggtaggcgagaccatgcgcgaggcgttccgcgcctatgacggcgaggtaaagtccggtgtgttcccggcgagcgagcacacctttgtcaagagcgactgcacggaggaatttctggcgtctctcgatgtggaatattaaggctgctgtggaggtaaatacagtgattattgcagaaacgattgcgcaggttcgtgcgcaggtaaaggaatggaaggagcagggcctgacggtcggtctcgtgccgacgatgggctacctgcatgagggtcatgcgagcctggtagacaaggcagtttcgatgtgcgaccgtgttgtcgcgtcggatttcgtcaacccgacccagttcggcccgaatgaggacctggagtcctatccgcgcgactttgaccgcgactgcgcgctgctcgaggagcacggatgcagcatggtgttccatccctcggtcgaggagatgtatgcgccggacgctgcgacctttgttgagatcctgtccgatatgccgaggcagctgtgcggcaagacccgccccatccacttccgcggcgtgtgcacggtcgtgtccaagctgttcaatatcgtcaccccggacaaggcgtttttcggtcagaaggacgcgcagcagctcgccatcatccgccgcatggtacgcgatatgtcctacggcatcgagatcgtcggctgcccgatcgtgcgtgaggcggacggtctggcgaagtcctcgcgcaacacctatctgagtgcggaggagcgcacggcggcgctcgtgctgtcgaaggcggtattcctcggcgaaaaactcgtccgtgagggcgaaacggacgcagacaagatcgtttccgcgatgaaggcctgcatcgaggcggagaagctcgcaaagatcgactatgtttccgccgtcgacgcggtcacgatggagagcgtacatcgcatcgaccgtccggtgctcgtcgcgatggctgtctacatcggaaagacccgtctgatcgataattttctgacggaggactgcgcgaaatgatgctgaacatgctcaagggtaagattcaccgcgcgaccgtcgtgcaggccgagctggactacgtcggctcgatcacggtcgatcaggatcttctggatgccgccggcattctggaatacgaaaaggtgcagatcgttgacgtcaacaacggcagccgcttcgagacgtacaccatctcgggcgagcgcggctcgggcatgatctgcctgaacggcgcagcggcgcgctgcgtcagcacgggcgacaaggtcattatcatgtgctacgcccagctgagcgcggaggaggcgaaaacgcacaagccgcaggtcgtttttgtcggcgaggacaaccgcatcgagcgcatcacgacctacgagaagcacggtctgctgcgcgatatggcttaaggcaacaccgcacaattaaagcggcggtgctttgcggaaattttgtgccctgactttgttgcagtttcacggtaatacatcaagtattaccgcaaaactgcgcctcgtcagtacgcaaaatttactcgcaaatcactcttgttcaattatgcggtattgtcttaaaaaaaatcaatacgattgccgctgtcccgggcacaggcttcggacggcggctttctttgttatgaaaaaaacaaagggatttcctcttgcatttttcacatgaaacctgtatgatgataagtagttttataatacgaaacgaagggagtctgtcatatggccgaacattccccggttcagtcgctcgaccgggcctttgacctgctggagattttatgccggtcgcgcggcggcatgacgatcggtgcgctgtctgcggagaccgggctgcacaagtccaccgtgcaccgtctgcttacgagcatgtgcatgcgcggctatgtgcagcgcgatgcggagaccagcatgtaccgcgcgggcatgcgcctgtgcgagatgtcgagctatatcgtagataatctggacgttgtcgaccgggcgcgcgccgtgctggagcgcctcggccgcgagacggacgagaccgttcatctcgtcatgcgggacgaacgggatgttgtctatatccataagatcgacggcggaaacagcgccatccgtatgttttcgcgcatcggcatgcgcctgccgctttactgcacgggcgtgggcaaggcgatccttgcgacatggccgaggtcggaggcgcgcgcggtctgggaagcgagcgacgtttacgcatggacggagaatacgattaccgacgaggaagcatttttccgcgagatcgacaaggtgcgccagctcggctatgcgctcgacaacgaggagaacgaggtgggcgtccgctgcatcgcggcggcgataccggactaccgcggccgggcattctatgcgatctcgctgtccgcgccgaccgcccgtatggcagacgagcgcatcatgcagctgcgcgggccgctgctgcgcgcgagccgcgacatcgcgcaggcgctcggcggcagcacgggacgctgacgagggggacggcttgcgcgggtgaactgcatcctgtgaagccggaacacagcccgaatattgacattgcggcgcagctgttgtaaaatagtatcaccatattgcaaacgcgatgaaggggaaagtacgcagcgaggtacggcaaagcgagtttcggacggtgggagcgaaacgcggagggcgcggcggaaaatggccccggagcgccgcaccgaaccgttcggcaaggctgcggcggcgctgtcctgccgttatcgaggcgaagggtaagtttttacctgctgaggcgcacgttcgcgaggacggcgcaaaacaaggtggtaacacggaagcgtgcggctcccgtccttgaatggcctgggcgccattggagggcgggagctttctgatgcagtctgacacaggataaggaaatcacgcaaaacgttatcaataaaggagagtatcaaccaatggagaagaaaccgtattatatctcgacggcgatcgcatacacctctgcgaagccgcacatcggcaacacttatgagatcgtgctggccgacgcgatcgcgcgctacaagcgcatgaccggctacgatgtctacttccagaccggcaccgatgagcacggccagaagattcaggagaaggcagaggctgccggcatcacgccgcagcagcatgtcgacaaggtcgcgggcgaggtcaaggcgatctgggatctgatgaacaccacctatgacaagttcatccgcaccaccgacccgatgcacgagaagaaggtgcagaagatcttcaagaagctgcacgatcagggcgatatctacaagggcgcgtacaagggcaagtactgcaagccgtgcgagtccttctggaccgagagccagctcaaggacggctgctgcccggactgcggccgcccgtgcgtggacgccgaggaggaagcatacttctttaagatgagcaagtacgctgaccgcctgatgaagcacatcgaggagcatccggagttcatccagccggagagccgcaagaacgagatggtcaacaacttcctcaaaccgggtcttcaggacctgtgcgtttcccgcacctcgttctcctggggcatcccggtcgattttgacccgggtcacgttgtctacgtctggctcgacgcgctgaccaactatatcaccttctgcggctacgacccggacggcaatcacgacgagcattataagaagttctggccggcagatgttcacctgatcggcaaggacatcattcgtttccataccatctactggccgatcttcctcatggcgctcggcgagccgctcccgaagcaggtattcggtcatccgtggctgctcgtcggagacggcaagatgtccaagtcgctcggcaacgtgatctatgcggacgatctggttcgcctgttcggcgttgacgcagtccgctactacgtgctgcatgagatgccgttcgcgaacgacggcgtgctctcctacgagctgctctgcgagcgcatcaactccgatctcgcgaatgttctgggcaacctcgtcaaccgcaccatcgccatgaccaagaagtatttcggcggcattgttccggcgccgaccgcaccggaagcgctcgacgatgaactcaaggcggtcgccctcggcctgccggcggctgtcgaaaagaagatggacaccctgcacgttgcggacgcgatcgacgaggtatttgcgctcctgcgccgctccaacaagtatatcgacgagaccatgccgtgggcgctcgcgaaggacgagagcaaaaaggagcgtctcggcacggtcatgtacaacctgctcgaggccatccgctttgcagccgttgagctgaagccctacctgccggacaccgcagacaagatcttcgcacagctcggcatcgagaacaagggcgttgagagccttgactccttcgacggcatgcaggccggtcagccggtcggcgaagcgtccatcctgttcgagcgtatcgacatcccgaagaagctggcagagatcgaggaggagaagaaggcagccgaggcagagcagaagccggctgtcgagttcctgccggatatcccgtttgacgacttctgcaaggtcgacatgacggtatgcaaggtcctcgcctgcgagaacgtcaagaagagcagcaagctcctcaagttccagctcgacgacggctcgggcacgccgcgccagatcctctccggcatcgcaaagtattacaagccggaggagctggtcggcaagacggtcgtcgccgtcaccaacctgccgccgcgcaagatgatggggcaggagtccaatggcatgctgctgtccgcagaaaaggacgagaagctgaaccttctcatgctgagcgacagcatcccggccggcgcaaagctctgctgaacatgccgcagaactacagttccgccggcaggtgtgttctgactacgcagaacacgaggcgtccgaaagttcccatgcggaaactttcttcctcttaaagtataaaaaccgaggcacatgtcctcggtttttgctctcattgaatttttaaggatagaggcctacgggctgcgtttgcgcagcaaacgctttttcatgcacgctgccgcgcggctgctgttttgtgtaaaattgaattttttcgacggactgagagcgcagacattttgtctgcgctcttttcttatgcgttccacccggttttctcctgctcagagagcaggagtttttcgtattcctcgcgtgcgagcgtcgaaatatcgtgcaggatatgctcctgcgtctgcaaatacagcttgcgcagacagcgcggcgtgcatttgcctgcctcgacctgcgcatcgtgcgcaagcgactgaatgagggcggtgacggtcgtgcggccgaccggcgtgccgcgccgtgtgatgaagatcggccccgacaggatgccctcgcgcccggcaaaatccagaagctcctccttcagacagccgcacagctgcatatcatattccggcagaccgccggcctgcgcggcgcttaccgtgaccgcatcgagcagatgcacgggaagtccggtcgtgccgagcagcttgacaagcaggtaggcgcgttccttttcgaggatgcgtgcggtctggagcagacgcagatattcctcgcgcgtcagctcgggctgctcggtctcgggcaggggggcgggcatgacctgccagccgcgccgcccgcagaaggcgagcaggctgttggccgcggagaccgcgctgttgatggtactcggacagtagccctgctcgcgcagcgcctcgggccatcggcgcatcgcttcatggctcagcctgcgtccgggcagaaagccgcacagcttgccgaggctgttgcggtagcatttcagcgtttcctcggtgcggccgcggctttgcagatcggtgagaaaggtttcggtcagggtatcgtcgagcaggataacgtcctcagaggcagctgtcattatgtgtacgctcctttgtgttaatttggattatgtgagctcattatagcgcagggacgggcgtgaaaacggtcgaatggcggcggcggacagcagtgtttttccggacgagccgctcatagaatggagcaggtgatgaaacatgggaaacagacaggatgcggcatggatgcaggcgatcgcgtgcctgccggaggagcgcgccgccgcgctcagcagggcggcggagcaggaacggatcgaggagctgcggctgcgctgcggcgaagcaccaagcgtgcgcatcggcggggcggagcgcccgctcgcgatggcgccggtcacggcggacgagctgcgcgaaacagtcggccgcgcggcgcggtactcggtacacagctatgcggagagtatgcggcagggctttctgccgctcgagggcggccaccggctcggcctgtgcggcacggcggtcgcagaaaacggcagcgtcacgggcgtgcggcggatttcctcgctcaatctgcgcgtggcgcggcaaattgatgcgctggatgatattcttgcgtcgtatatcggggagggcacgccgttttcactgctcgtgctcgcgccgcccggctgcggcaagacgacgctcgtgcgcgagtgggtgcggctcgtttcggacgccgggcacaccacagccgttgcggacgagcgcggcgagatcgcaggccttgccgagggcatgccgcagttccgtatcgggcgctgtacggacatcctggagggctgcacgaaaaagcaggcggcgctcatgctgctcaagaccatgtctccggcgcttgtcgcgatggacgagatcacctcgcccgaggacatcgaggcggtcgcgctctgtgcccactgcggcacggcggtgctcgccgccgcgcatgcggccgggcttaacgacctgcggcgcagaccgctctaccggcggctgctgtcgctcggcgtgttcgagcgggtgctgacgattgagcaaaaggacgggaaacgaagctaccgaatggagaaaacggagggaacgacatgctgaaactgatcggctcagtgatgatcttcggctcgtgcgccgcactcggactgaacgcgcggcgtgagctgcggcgcagagtcgcggcggcggacgccatgctgctcgcgctgcggctgatggagaacgagatcaccgcgcgccgcacgcccatgcccgagatcatcgacctgctcgcgaagaacgagaacgcggtcgtccggcagatcttttccggcgtgcgccgccggatgcgtgagcgcagcggactgtcgctcagctatctctggtgtgcaggcatgcgcgcggcgcaggcggacgtcggtctcggccgggaggagtgcggcgtgctgtgcgatgcggcgaatttcctcggacggtatgacgcttccgagcagaaggccgccatcgacacggcgctgcatcgtttgcagatgctgcgcgagctggcttttgccgagctgcgcgatcggggcagcctgtaccgcacctgcggcatcgcggccggtctgctcgttattctggtgcttgtctgaagcggagggggaaaacgatggacgttgatttaatcttccgcatcgcggcggtcggcatcctcgtcgcggtgctggggcagctgctgacgcggtcgggacgggacgagcaggcgctcatgacgacgctcgcgggtctgatcgtggtacttatgctgatcgtcgagcagatcagccggctgttcagcatgatgaagagcgtgttcgggttttgagcggcgccggactgctcgcgggcatcgtcgtgctcacgctcgtgctgtcgctcacgctcaaaaaggacgcgcccgtcatcgcgttcctgctcgtgctcgcagccggagtcgttctgctgcttcggctcggcgaggcggcgcagagcacgatgcagcgcttttccgcgctgctcgcgcggggcaatctcgacgcagagctgtacgggccggtgctgcgcgtcgtcggcatcgcggttctcgtgcgcatcctcgcggcgctctgccgcgatgcaggccagtccgcgcttgcggcgaaggtggagcttgccgggacggtgctcgcattcggcgcggcgctgcctctgctcgaacaggtgctgacctttctcacagaatggacggtatgatgaaaaaacggatgaaaattctggcggcggttttgctgctgccgcttgctctgtgcctgtccgccggggcggcggaggcggacgcgcagcgcgagcgggacgaggcggcgctgcggagtgcggtgacgggcgaggcgcagccgtatcttgcgggcacggacgggcaggacgttgcagactcgttcgcgcggctgctccgaaacaccgtgccggacgcgaaaagcgcgtgggcaaaggcggccggcagtctcggtacggcggccggcatcatgatcctgacagcggcggcgcgcggcttttccgaagcggcagggggagcggcgaacgatgcggtcgacctggccggggcgctcggcatctccgctgtgctgctccgggacttttcgggcgtgctgtcactctgccggtcggcgctcgacggcatcagtgtgttttccgcgacgctccagccggtcctcgcggcggcgctctcgatgggcggcagcgccgtgaccgccacgacgcttcaggtcgcctccatgttcgcctttgacctcgtccttcgattgatcgaaggcctgctcgtgcctgcggtgtgcgtatatctcgcggtcacggtcgtggatgcggccgccgggaacggcgtgctgcgcgggcttgcagagggcatcggcagcctgtcggccggagcgctcaagctcatacttacgctgttcaccgcatatcttgccgtagcgggcggcgtttcggggaacgtggaccgcgtcgcgctcaaaacggcaaagttcgcggtctcgggcgcggttccggtggtcggcggcgtcatgtcggacgcggcggagaccgttctgtcgggtgcggtgctgctgcgcggctcggtcggcgttttcggcatgatatgcgtcacggcgatctgtctcgcgccctttgtccgcgccggggcgtgctatctgtgcttcaaggcaggcgcggccctgctctcgcccctgtgttcggacagcctcaggcgtctgctctcgggcatcggcacggggttcggtctgctgctcggcatgctgagcgccgcctgcaccattctgtatctggaacttgtttatgctgttgcgatggtgaaaccgttatgaatgaactgctgcataccattctgctgcgcgtgacgcttgccggggcggcgtccgcagcggcactgcgcatggccgggagcggcgcgatgcgcgagacagtgcgtctcgcggccggtctgctcatgctcgcggctcttttacagccgctcggcagtctgcgctctgccgggtggagcgtgtccgccgcaccggacacgcaggcgatacgcgagaccaacatgcagaccgcgatgagcgcggtcgcgtcgagcatcgcaaaggcgctcgagagccgcgccgccgccgagggctacgactgccgctttacggtcacgatggcgaccgacgagagcggtattttacaggtagaccgcgtgaccgtgcactgcggtgcggacgatattgcgcatctcagggagatacaggagcttgtgacgagcgaatgcggcgtcccggcggagcggcaggaggtgatcgcacgatgaatacggaaaaactgcacgagctttgcgcgcggctgcggccgctcgcgaaaaaataccgcgcggcactcattgtcctgctcgcgggcgtgctgctgctcgtgtcgggcggccgggaggaaaaaacggacgccacgcagacgcagaccgatgcggacagcttttcgctgagcgatttcgagacgcagctctgccgccgcctgtctgcgatcgacggcgcaggccgggtcgagctgatgctctcgctcgagcagaccggggaggcggtgtatgcggtcaacacgagagagaccggcggcgcggcctcgagccgggagagcgatgtcgcggtcatttcctcgtcgggctacggcgagacccccgtgacggtcaaaaatgtcctgccgacgttccgcggcgcgatcgtgctgtgcgacggggcggagaacgccgcggtccggctcgcggtaacgcaggctgtcgagacggtgtgcggtctgacgagcgaccgcatcacggttctgaaacgcgcctccggcgcatagaacggtcatatggaaatctttcaccgcatcgaggagggcgagcgtgatgaaaaaaatcaagaaacgaggcgcggtctacggcgtggtcgcactgctgctgtgcacggcggcgtatctcaactggagctatgtcgagccgccggcggatctgctccagaccgacgggaacagcgcggacagcgctgctgctacatcggacgacggcgcggcggcgggagaggattatttcgcgtcctcgcgtctgacgagagaaaaggcgcgtgacgaggcggtgagcacgctgaaggagttgtccgagagcgcggatgcggacgagaccgcgaaggaggatgccgcctcgcagatctccgcgctggccgcggcctccgtgcaggaggcgaacatcgagagcctcatccgcgcaaagggctatgcggatgcggtcgtcatgctctcggacggctcggcgaacatcgtggtctcgccgccggagggcggcctgcaggcggacgatgtgacgaagatacgcgatatcgtggtctccgagaccggcatgagcgccggacagatcaaaatcgtcgaggccggcagctgacagcctcatatttttccttttcattttgcgcccgatgtgatatactcttgctaaaggagagtgagcactatggcggatcataaggaatactggtcgaccgagagtgaccagggctctattcgtatttctgaggacgttgttgcctctatcgcggcgcttgcggcctcggagaccgacggcgtgagcggtctttattccagcgtaacgcgtgacatcgtcagctttctgagcaagaaaaacctgtccaagggcgtgcgcgtcgagctgggcgaggaggataccgtaaaggttgagatcagctttctcgcgctgttcggtcataacatctgcgaggtcgcaagacaggtgcaggacaatgtcaagagccagatcgagtcgatgaccggcctgcatgtggtcgagattaatgtacacgtcggcggcgtgaccttcgcgcctgcggcagaggaaaaggccgcagagccggaggaaaagccggcgcagaccgcagagaagcctgccggggagcaggaggaaaacgcggccgagtaaattcggaaaaatgtgcggtgagcgtcggtctcgccgcacatttttttatgcccggtacgccggacgcggaaacgtcatgggcagcaccgcacaagggaaaacggcagcgctctgcggaaattttgcgttcctgtgcaattatgcggtattgcccttgcgtttttctgtaaaataggataaaataagatattgatagtataaaaaacatgaatatcagttaccttgataaataaaaacagagaaggagcctgccgccgtgaacgagaatgtgatgagcagaacaaaagcaagagagatcgcactgcaccttatctttgagatgggttttcagcagtttgagccggaaaatctggaggaacggctggacgagaacattatgcgctcgctcaaaaccgatgccgagatgtatgcaggcaggctgagcggcgagaacgccgactatatccgcgcagtcgtcaagggcgttgcgacccatgtggacgagcttgacggcgcaatcgagcgcaacgcaaagggctggaagctgaaccgcctgtcgcgcatgaccaaggctgtgctgcgcctcgcgatctatgagatgcgctatgtgagcgacgttccggtcggcgttgccatcaatgaggcggtcgcgctcgacaagatctacgacaccgaggaggctgctgccttcatcaacggcgttctgggtgcggtcgcgcgcgagaagcaggaaaaggacgagaccgatgcctgagcgatttctggggatcgatacgtccaattaccgcacctcggctgcggtctatgacgcggagaccggcgaatggtgcaaccgcggcagtctgctgaccgtgcctgagggtgcgatcggcctgcggcagtcggacgcgctgtttcagcacaccgtgcatctgcatgaaagaatcgaagctctgccgcagggcgaggtgcgcgccgtcggcgtcagcacccgtccgcgcgcggtcgagggctcatatatgccctgctttctggcaggaaaaagcgtcgcgcacagtgcggcgcatttgctttctgtgccgcttttcgaggtatcccatcagcaggggcatatcgcggcggcggcgctgtccgccgggcggctcgacctgctggacagtcgcttcctcgcgtggcatctgtcgggcggcacgagcgaactgctttacgtcgaatgcggcgcggacggcctgccggactgtacctgcatcggcggcacgaccgatcttgcagccggtcagctgctcgaccgggcgggcgcactgctcgagctgccgttcccgtcgggcgcggcgctggatgagcttgcgctgacggcagagccgcagaagggctttcgtcccagagtgacggactgcagattctcgctctccggtatgcagaaccaggtggaaaataaatttaagaccgaaaagcctgaggacatggcgcgcttcgctcttgaaaccgtggcgaatgcggtcatcaaggcgaccgaacaggcaaaggagcgctatgacgttccggtgctgtgcgccggcggcgtgatggcgagccgggtcatccgcgcgcgcatggagaagcgcttcggcagcggcgtcagctttgccgagccgacgctctcgggcgataacgccgtaggtgtggcggtgctcgcggcaagactgtaccgaaaaaccggcgcagacggacagtgagcctgtcgaagatctgcgcttttccgacaaacagagtgtgaaaccattatggcagcgatttataccgtatctcaactgaataacgaaatcaaggatctcctggacgccgttccgggctaccgcagcctgctggtgcagggcgagatctcgaactacaaggcgcactcgtccggccatcactatatgacgctcaaggaccgggacgcggccatcaacgccgtcatgttccgctcggacgccatgcggctcaaattccggctggagaacggcatgaaggtcatcgtccgcgcgcgtgtcagctcgtttccgcgcacgggtgcggtgcagctttatatctcggagatcattccggacggcgcaggcgcgctgaacgttgccttcgagcagctgaaggtaaagctcgcggccgagggcctgtttgccgaggcacacaaaaagccgatcccggcctgcccgtcctccattgccctcgtgacctcaccgaccggtgcggcggtgcgcgacatgatccgcatcctcgggcggcgctggccgctcgcgaaggtcgtgctctacccggcgcaggtgcagggacagggggcggcggagagcatcgcgcgcgctctcgcgctcgcgaacgcgatcggtgaggcggacgttatcctgtgcggccgcggcggcggctcaatggaggatctttgggcgttcaacgaagaggtgacggcgcgggcgatctatgcttcggaaatcccggtcatctcggcggtcggccatgagccggacgtcacaatcgcggattttgtcgccgacctgcgcgcccccacgccgtccggcgcggcagagctcgcggttcccgaccgcgcggactggaaggcgacgctcgaaatgctggacgcgcggctgcgtgcggcggcgggaaagcagactcaaatgcgcaggaggcagctgcaaagcctgagcgagcgcctgtccgtgcgcacgcccgtccgctatatcgcggaaaagcggcttgtgctcgacacgctgaccgagcgccttcagggaacggtcccggcgcggcttgcgcacgaaagacagcagctccggacggcgcaggaccgcctgcttgcggcaggcaggggaaatctgcaccgcgcgagactgcgcttcacgcagactgtcgcgtcgctcgacgcgatgagtccgctgcgcgtgctgagccgcggctatgcggtcgcgacaaagggcgcacggggcgcggtcgtgaccgatgcggcggcgctgaaggaaggggacgcgctgcacatccgatttgcaaaaggcgcggcagactgccgcgtgatctataccgaggaggaacaataaatggcggaaaagacgtttgaaagccagatggcgcggctcgaagagatcgtgcgcctgctggagcgcggcgaagcgccgctcgcggagagcatgaagctgttcgaggagggcacaaagctgtccgccgccctcggaaagctgctcgacaaggcggaacagaaggtgacggtcgttcaggaaaatctccagggcgaggtaacggagcgtccgttcgacgcagaggaggcggcaaaatgacattttccgaacagctgagcgcggatatcgcgctgatcgagccggcgctcgagggctatctctcgcgcgagacgcatgagggctacgaccgcatttttgaggcggcgaaatattccgcgatggcaggcggcaagcgtctgcgtccggtgatcgtgctcgagttctgccgcctgcacggcggcgacatcaaaaacgccctgccgttcgcgtgtgcgctcgaaatgatccatacctattcgcttattcacgacgatctgccgtgcatggacaacgacgatctgcgccgcggccgtccgacctgccacaaggcgttcgacgaggcgacggcagtgctcgccggtgacggtctgctgaccgcggcgttcgagaccgcttcgcaggcagacgttccggcggagaccgcgctgcgctgcatccggattctgggcgagaacgccggcatgaacggcatgatcggcggtcaggtgctcgacatgctcgcggagcatcgccgtatttccgaaaccgagctgcgcctgctccagaagctcaagaccggctgcctgctgcgcgccgcatgcgagctcggctgtgcggcggccggaaagaccgatgcggagagcatcgaggccgcgcgcgcctatggcgataagctcggccttgccttccagatcgaggacgatatcctcgacatcgagggcgacgagaaaacgctcggcaagtccatcggcaaggacgcggcaagcgaaaaatcgaccttcccgtccctgctcggtctggatgcgtgccgaaagctcgcgggcgagctgaccgaacaggccgtcgcggcgctcgcgccgtatgaaggacgcgcgtttctgaaaacgctcgcgcgcagcctgaccggccgcaggtcataaggcaatacggcatcattgaacaggaacgatctgcgagcaagttttgcggtaatacttgatgtattaccgtgaaatcgcagcaaagtcaggacgcgaaatctccgcaaagcgcccagttttaattgtgcggtgatgccttaaaatgttaaaattctgcgtattcttcgtataatgttgaaaaacactcgaatttatggtaaactgaaaacagtgacgtagtatcctagtcagtacatgcaattcccaagacgggcctaaaaatccgtagacgggcatatcgatgaagtctctggtgtttgcttcttacgcccagtttggggtggatgctggaggttaaggcttgcgggcgcgcttcaatggcatgaagtaccgaccctctcgccgtggagacccgtgactgtcggacacctatagcatccctttggggttgatggatgtccaacggcacgggatgaaacctgcaatgcggtgcggatgaccctgtgaggaattgatccccctcgcgctgttcagaaacgctgtgtgcagtgtagcctgccttgagtggccatggtgaatatcgtatccgcctgcggtttcccggccaggaatgccgcgggaattgacggttgaaaccatgtctgcaaaagaggctaagaattgtgttgactgctgtggaaatcacctaggctattcgtttacgaggcaggccgtggattgcagtgcggactcagtggcaattcggtcccggtgatggcaacatcccggcacggactttaatgggaaacccccacggcggcgacgcgtggcagttcgcggggaaatccaaccgaacctcaagccgcaagatttactcggcctgccgtcactgccttttatctatttccggcgtcgctctcctgcgtaaaacaggggagcggagccgtttgccatatgtgaccgacttgaaaaaagaactgaggagtcgtatcgttttggagtcaacagaaaataagcaaaagaaaaagccgccgcaaaagccgtccgttgttaacgtccgctgggtcgtgacgatcatggcggtcagctttgtgctgtcggtggtcatgtcgtatatctcgaatgaagcgctcaacagcgcaggcacagtcctgtcgtttgtggtgctgttcttctttatcggcctcggcatcgtgttcgacatgatcggcgtggccgcgacctcgggcacggaaaaggagtttcactccatggcggcgcacaaggtgcgcggcgcgcgcgaggcggtctggatggtacgcaatgcggaaaaggtctcgagcatctgcaacgatgtcgtgggcgatatctgcggcattatctccggtgcgacgggcgcgctgatcgtgacgcacatcaccgccggtacggacggcgcgaccaaggttctggtctcgctcctgatcacgggtctgatttctgcgggtacgatcggcggcaaggcggccggcaagggcatcgctgtcgctgcgagcggcaaggtgcttgcattgtgcggccgcgttctgtccgtgctgccgctcaagctggataataaaagataaaactaccgttccggtggggatattttcatgaaaagatatggaattttgaacaatataaccagtcctgctgatctgaagggactgtcgtatgacacgctcggcgtgctgtgtgcggcgctgcgcgagtttatcgtggactcggtctctcagaccggcggccatctcgcctccaatctcggcatcgtcgagctggcggtagcgctcgagcgggagttcgactcctcgcgcgaccgcatcatctacgatgtcggccatcagtgctacgtccacaagatactgaccggccgccgcgaccgtttttcaacgctgcggcagtacggcggtctctccggctttatgaagccggaggagagcattaccgacccgtgcatcacgggccacgcctcggactcggtttcggtcgcgctcggcatggcgcacgcgcgcacgctcagaaaccagaaataccacgttgtcgcggtcatcggcgacggcgcgctgaccggcggcatggcgtatgaggcgctttcgaatgccggcacgtcgggcgagccgctgctcgtcgttctgaacgacaacaatatgtcgatcgcgaagaatgtcggcggcctgagccgtcatctgtcgcgtctgcgcgtcagtcctcgttatctgggtgcgaaggtgcgtatcaaggaaaagctcgcgcgcattccgggcgggcgggcgctgacgcagtcgatctcgcgcaccaaggcgcgcatcaagggcttcctgctgccgacgtcgctgttcgagcagatgggatttacctatctcggcccggtggacggccacgacctcaagagcgtctgcgagttgctggcacaggcgaaaaagatgaaaaagccggtgctgctgcacgtgatgacgcagaagggacgcggctacgcgccgagcgagaacaatccggagaagtatcacggcgtatcgcagttcgaccgcgtgacgggcgaatttcttgcgaagaagaaggaggacttctcggcgcgtttcggagcggagctgtgcggtcttgcggacaaggacgcgcgcatctgtgcgatcacggcggcgatgccgtcgggcacgggtctgaccagattctccacgctgcaccgggaccgcttctttgatgtcggcatcgcggaggagcatgcggtcgctatggcggccggtatggcggcgcagggacttgtcccggtcgtcgcgctctattcaacgtttttacagcgcgcctacgaccagatcgtgcacgatgtcgcgatcgaaggattgcatgtcgtgttctgcatcgaccgcgcgggcattgtcggcgcggacggcgcgacccacaacggcgtgctcgatattgcgtttctgcgctcgatcccgggcgttaccattctctgcccgtcgagcttcgcggagctgcgctcgatgatgacgcgcgcggtctatcacgagaacggcccggtcgccatccgctatccgcgcggcggcgagggcgcatggcgcggcgacacttcgtcgcagccgctcgcctgtgtccggcagactgccggtcatgaggtcacgctcgttacgcacggcattatgataaacgaaacgcttgcggcggcggaaaagctggaaagccgcggcgtccgcacgcaggtctgcaaggtaaacgaactgagtccggcgcttgagcaggcgcttgcggcgcaggaggatgcgctttccggtctgtgcgtcgtcgtggaggacacggtcgacaacggcggcgtgggcgaatggcttgcctcgcaccgcagcggcagaacgctgtgcatcagcacgggcaaccgcttcctgccgcacggcagcgtgaacgatctgtaccgtcactgcggtctggacgcggacggtattgcggaatttgtgatggaacatcgaaaggagaccggtcttggctaagaaacgactggatgtactgctgtttgaaaaaggtctgtgcccctcgcgcgaacgcgcgaagaccgctatcatggagggcatcgtgtatatcgccggacagaaggccggcaaggcaggcgacatggtggacgagaacgccgagcttgaagtccgcggcaacgacaatgcgttcgtctcgcgcggcggcaagaagatcgagaaggcgctcaattactttgcgatcgacccgtccggcctgacggtcatggacgttggcgcatcgaccggcggctttaccgactgcctgctgcggcgcggcgcggagaaggtctactccatcgacgtcggctacggtcagctcgcatggagcctgcgtcaggacccgcgcgtcaagtgcatggagcgcaccaatatccgctatgtaacgccggatatgctcgaggagaccccgtcgctctgcgtcatcgacgtatcgttcatctcgctgaagctcgtgctgccagtcgttgcgggcctgctgaccgaggacggccgcgtggccaacctcatcaagccgcagtttgaggccggcaagggcaaggtcggcaagaagggcgtcgtgcgcgagccggagatccatctggaagtgctcgagaattatgtagaaaacgcacatgcggcaggcttcaaggtgctcgacgtaacgttttcgcccatcaaggggccggagggcaacattgaattcctcggctatctggcgaagcagggcgaggagcgtattccggatctggcggaggttgtgcgtcaggcgcacgaggaactggacagctgatgcggacgtttttcatctaccccaatctgcgcaagcaaagtgcgcgggaaattctgccttcggtctgcgagcggctccggggcagggatattcacctcatcctgcccaatcagatgcggggcaccatgcacgcgctgcatgatgaggtgatggcgctcgattacatggatactgccgaggcggtccgcatcgcggacgccgctgtcgttctgggcggagacggcaccatgctgcgcatcgcccgggcggcggcgcagaacgagctgccgctgctcggcatcaatgttggccacgtcggctttatgaccgagctagagcctgcggagctggataaaatgcaggcgctgctcgagggggactatcagctcgacagccgcatgatgctgcatgtcgaggtcgagcgccatggccgcagggtctatgaaaatgacgcgctgaacgatatcgtcattgcaaagggcaccgcgttccgcgtggtgcgcgtcggcatatcggccgatggcgaggaggtcacgcgcttcaacggagacggcgtgatcgcggcgacaccgaccggctcgacggcctacggcctgtccgcaggcggcccggtgatcgagccgagcgcggaaaatctggcggtcattcccatctgcgcgcatgcgcttgcggcgaagtcattcgtattcgcacccgagcgcacgctcgccatcacggcagcctgcgagggcggcagcgaggtgttcatctcggcggacggcggacagggcttcgccgtgcgtccggacgaccgggtgctcatcacgcgctctgcgctgcgcacgcggctgatccgcctcaagggcaacagcttttaccgaatactacagcagaagctgtgagactgtcgcgaaactaacgtttcgccgacaatctgtgttctgactacgcagaacacaagtcgtccgaaagttcccatacggaaactttctccctccggaggtatcaaaaccgaggtacacgcccccggttttgatgcgtttgcgagcaaacgcttttgaatacgcgctgccgcgcggtggcgttaacattgcggaattgggctttatcgacagacagcagaagctgtgattttatagaaaaacgagcatttctgaacagggggtgcgtgaaatgaaatttcagagacaggcgaagatcctggagctgatcgatcgcttcgagatcgagacgcaggaggagctgaccgaccatctgcgtgcggtcggctatagcaccacgcaggcgacggtctcgcgcgacatcaaggagctgcggctcatcaaatcactttccactgagaccggaaagtataaatatacggttgcggcggctggtgcagcggacagcttcacgactcgtctgcggaacattttccgtgagtgcgtgaccgatatcgacgctgcgcagaacatggtcgtcatcaagacgctgcccggtctgggtcaggcggcggcgatggcgatcgacgcgatgcgcgcggtggatgtggtcggcacactgggcggcgacgacacggttttcgtcgtcatgcgcgataccgagagcgctgagcggttttccagacaggcgcatgatattctaaagtaagcaggtgaggacgcggcaatgctgcaactactccacattgaaaatattgccgtgatcgagcgcgcggacatcgagctggagggcggactgaccgtgctctccggtgagaccggcgcgggcaagagtatcgtcatcgactcgattggcgcgatcctcggcagacgagtcagccgcgatctggtgcgttcgggcgcgaaaaagggctttgtcagcgcggtattcaccgatctgccgccggcgctctgccagcttgtcaacgagctggatcttgccggtgacgaaggggatacgctgcatatccagcgtcagctcaccgcggacggaaaaagctcctgccgcgtcaacatgaagccggtgtcggcctcgacgctgcggctgcttgcgccgtatctgatcgacattcacggtcagaacgacggtcagaagctgctcgacgaggcgcatcacatcgactatctggacggctacgcaggtaatgcagcgctgctcgagcgctaccggccgaattatcaggcgcttctggcgctccggcgcgaaattcacgcgctcgagaccggcgaacaggagcgtttgcagcgcatcgacatggtgtcgttccacaaggacgagatcgaacaggcggcgctgaagccggacgaggacgagacgcttgcacagcgcaaggcttacttcgaccacgcagggaagatagcgggtgcgctcgaacgcgcacggcttgcgatgagcggcgacgatgaggtcggcggtgcatgtgctctgctcgatgaggtgtcggcggcgatctccgcgctgcgcgaggtgtctgatgcctttgacggcatggcggagcaggccgaggaggtgcgtctgctcgcggccgatctgcgcgacagcgtagcggcacagagcggcaatctggacttttcctcggcggaacgcgaatatgtagaacagcgcctcgacgagatataccgtctcaagcagaaatacggcggtacgataccggagatcctggcgtaccgcgacaggatcgaggcagagcttgacgcgcttcagaatgcggacgaccgccgcgaggagcttcgcgggcagtaccgcgaaatgctccgccagaccaagagcattgcagccgagctgaccgaggcgcggcgcacggcggcgaaaaagctcgaacaggagatcgtgcgcgagctttccgagctggatatggacaaggtccgcatgcgcatcgccgtgcacaccgggaccaagctgtccgcgcacggctttgacaccgtgacgttcgagatctcggtcaatccgggtgagccggaaaagccgctctccagagtcgcctccggcggcgagctgagccgcatcatgctcgcgctcaaaaacgtattgacagcgggcgaagatgttggtatgctgatttttgacgagatcgataccggcgtgtccggtcacgcggcgcagcagatcgggcgcaagctgtccgccatcgcgcggaagaagcagacgctctgcgtgacccatctgccgcagatcgcggcgatgggcgaccatcatctgcgcatctccaaatccgtccgcgacgggcggagttttacggacgtgagtccgatggatcgcgcacaccgcatcgacgagatcgcacggctgctgtccggtgaggaaatctcggacgcagcgcgcaaaaatgcagaggacctgctcgatgcggcagggcagggggcatagcaatggtgtttatcgacgagagacacaaggaacgcgctccgtaacagcgtttcagtacaggatataaaggataaaatcaagtaacaggagaaatattcgatgaaactttacgacgaactgaaagcgcgcggcctgatcgcgcaggtaacgaacgaagaagagatcagcgagatgatcaacaacggcaaggcgacgttctacatcggcttcgatccgaccgcagacagcctgcatgtcggtcacttcatggcgctctgcctgatgaagcgcatgcagatggcgggcaacaagccgatcgcgctcatcggcggcggcaccgccatgatcggcgacccgtccggccgtaccgatatgcgttcgatgatgaccgtcgagaccatccagcacaactgcgactgcttcaagaagcagatggagcgctttatcgaattcggcgagggcaaggcgcggatggtgaacaatgcggactggctgatgaatctcaactacatcgagttcatccgcgacatcggttcctgcttctcggtcaacaatatgctccgcgctgagtgcttcaagcagcgcatggaaaagggtctgagcttcctcgagttcaactacatgccgatgcagtcctacgacttctactacctgttcaagaactacggctgcaatatgcagttcggcggcaacgaccagtggagcaatatgctcggcggcaccgagctgatccgccgcaagctgggcaaggatgcgcacgcgatgaccattaccctgctgcttaacagcgagggcaagaagatgggcaagactgccgcgggcgcagtatggctcgacccgaacaagacctctccctacgatttttaccagtactggcgcaacgtggacgatgcggacgtactcaagtgtatccgcatgctgaccttcctgccgctcgaggagatcgaggagatggacaagtgggaaggcgcacagctcaacaaggcgaaggagatccttgcctacgagttgaccgctctggttcacggcaaggaagaggcagagaaggcacagaccgctgcgaaggagatcttcgtatccggcggtgcggctgccaatatgccgaccaccacgctgaccgatgcggatttcaccgacggccagattggcgtgctgaccctgctggtcaagtgcggtctcgcggcctccaacggcgaggcgcgcaagctcgtacagggcggcggtgtttctctcaacggcgaaaaggtcgcggatttcaagcagcagctcgcaaaggacttctttaacgaggagtgcatgatcaagaagggcaaaaagaccttccacaaggctgttctgggataagacagaaaaaagcggcgcgaacctttgggttcacgccgcttttccggtcatctgaagaatttacgagagcagccgttccgcaaagagcatgacgagcgggagcgttgcgaccgagagaaaggtggagaggcagacgtaggagactgcccggcggtagtcctgatcgaacttctgcgcgaagatggcggtgctgcttgcgatcggtgtcgcggccgcgatgagcgtgatgagcgtaatctcgccgcgtgcgaaggggaacggcaggaacacgagtatcgtgaccgccggaacgacgagcagacgcagtgcggagaagagatacagccgtgcatcagcgaacagaccgcgcagctgcaccttggagagatagtagccgaggatgatcatggcgagcacggtgttgccgtccgcgatgtagccgatggtaccggtaacgaccgtcgggagcgtcggctggagcacgaaaagcgcgatgccgatgaccatggagataaagaccggattgacgaaaaccattctgagattcatggtctcctttttaccggaaatgatgacgatgccgtaggtccactgcaaaaggtttgcgaacgtgctgaaggagaccacatagaacgctgcttccggcccgaatacggcggtaacgagcggaatgccgataaagcctgcattgccgaaggcgacagcgaagttttcgatccggtgacgggtgccgcaggtcagatacgcgactgcgatggacgccgcgaaggcaatgaccgcgatcagagcggaaagacccatcgcgcgcagcttttccgtgctgaattcagacatatagctgcgcagaatgacgcacgggatgaccgcatacagcagcacattggaaagatcacggctgccctgttcggtgatcatgccgcggcgagagaggagcaggccgagcagcatgagcgcaaacatgatgatggtctgctgaagaagaatttgagtgatcataagtataaaaatcctgtcagtatgataaaatgggaggaaaatgcgtggaaatttaccagcttcggcagtttgcagcggtcgcaaagaccgaaaatatgacgcgcgccgcacagagcctcagcatggcgcagccggcagtatccaagacgatacgaaatctggagagcgagctgggtgcggagctgttcgaacggacgggaaaaggactcagacgcaccgaacagggagatatcctgctgcggtacgcccgagccattctgaatgcggagctggacgcgcggcgcgagatcgaggagagcctgcaccgcgccggcggtctgtgcatctgcgcactgtcctgcgtcgagcggctgagcgacattctggccggattcgcggccgagtacggcaacgcggatttccgcatcggcagcacgcccgagggcagcgacctgctgctcgactgcgccgtctcccgggacgaggtcccggcgggcgccgaggtgctgttcgacgaggaaatctgcatcgcggtcccggacgggcatcgctttgcggactgcggcgcggtctcgctgaccgagcttgcggatgacccgtttatcgcgctaagcggttcggagtcctttcagcaggtttccgagcatattttccgctccgcaggaatcgccatgcacgcggcgatcgagtgcgacagtctggcgctccaaagccgcctgctgtcctgcggcatgggtatcgcgcttgccgcggccggagagtggagacagctgtgcgaggagggcagcgtacatctgctgcacatccgcgacgccgaatgccggcgctacatctatgtgcagcagctcagccgctttgaaacgcattccatgcgtgccttccgcgcgtttctgcgccggtatttttccaaaatcggttaagcgtgcacctcaagcggcacgttctcgcctgcatcaaactggtgcaggctttcgagcgagcactgtaccatgtcgaacactgcctggtcggtgaaaaacgcaacgtgcggcgtgacgatggtgttctggaaggatttgagaatgatatagtcgtggttggtgacatggctgttgtagctgtgatccacgcggatgacgtcatcctcgccctcgaagcagtccacaccgaccgagccgatgcggccggattcgattccttcgatcagagcgcgggtgtcgatgagcgcgccgcgcgcgcagttgatgataacaacgccgggcttcatctttctgatggactcggcgttgatcatatggaacgtctcgtcgttcagaaaggtatgcagcgtaacgatgtcggactgtgcatagagcgagtcgagcgaaacgtattccacacccattttcttcatttcctcggacggatacggatcgtgcgcgacgatatggcagccgaagccggagaggttctggatgacggccttgccgatgcggccggtgccgatgacgccgacggtgaggttctgcatctccatgccgcgcgccgagccggccgcgccgagcgaattatccgccgtgtgcgagcggaacatgatatagaccgccttacggatgcacatcagcatgagcatgaccgtgtagttcgcgaccgagtagggcgaatagcctgcgtgcgacacgcggatgcccaggcgctttgccgcctcaagatctacgttgtcgtaaccgatggtgcgcagcgcggcgtagcgtacaccgttttctgcgagcttctccagaactggcgccggaagatcgcaggtgcaggaaatgccgtcgaagccgcgcgtcaggccggcgttgtcgactgtcagcgtgcccggctgaagctcgaggtccatgttcagagactgaccgaagtgatcgaaaaacgcgcgttcgtccggacgggcgttaaatgccataactttcatgatttagtgctcctttacccattcatgcgtcagtctgccgagaatttcgatgccctttacgatctgttcatcgctcggggtggaatagttcagacggaaggcgttcgaaatctgcttttcatctgcgaggaatgccgagcccggtacgcacagcacgccgcgcttgatggcctcgcggacaaacggctgcgcgtccatgccctcaggcaggaatgccatgacgaacagaccgccctccggctgcgggaaggtgacggacgggtggaacgtgcggcgcatggtgtcgagcatcagtctgcacttttcgcggtagacgccgcgcgacttttcgagatgcgaggcgaaatcatattttgtcatgtactcgttgcacacatactggaacaggacgttggagtgcacatcggtggtctgcttggcgatggtcagcggcatggtcagcgacttgtcaaaaacgaggaagccgaggcggaatgccggggccatgaccttggagaagctgccggcatacaggacgcggccctcggtgtccatcgacttgatggtcgggacatcctcgccggagaagcgcagctcgccgtagggattgtcctcgaggatggcgatgtcgtacttgcaggcaagctcatagacctttttgcgcttttcgagcgtggtcgtgatgccggaggggttctggaaggacggaatggtatagagcagctttgcgttcgggttcgccttcagcgcggcctcgagcgcgtcgatgtccatgccgtcctgctgcatcggcacgccgacgagcttcgcgccgtaggaacggaaggtattcagacagccgacaaatgccgggtcctcggtcaggatgacgtcgccctcgttgacgagcaccttggtcgtgaggtcggcgcactgctgaccgccggagacgatgaacagctcgtttttctcgaaatcaaagccctgcgtgcgtgcaaggtattccttcatggtatcgcgcagcggcgtatagccctcagacaggccgtactgaagcacggagaccggcgcgttcttcatgacgtcggccatgatctccgcgatctcgggaacaggaaaggtctccgcggacggattgccgccgccgaacgagatcatgttggggtctgcgccgagcttgaacagctcgcggattgcagagccatgcacgtcggacatacgatgggaaatggtgtactgcatatatatcgctcctgataaaaaattgaatgacaaaagaaaagggcatagaaaccccatagtcggtggtttcagcccctttgctgatacgattattgtaaacctgcacaaactttatgtcaaatatctgttgtttatgacgatataacgcgaaagaatagtgcagacggcttgcagtatcccggaaaacctgcgataatatcaatgataccctgcgagctgtcctctgacgggcacagttcggaacagaaagcgaaaatgactatgaaacatatctgtataggcataaccgcgcacgtcgatgccggaaagacaacgctctccgaggcgatgctcttccgcgcgggtgcgctcaaaaaaatggggcgggtcgatcaccgggatgcatttctcgacacctttgcgctcgagcgggagcgcggcatcacgatcttctccaagcaggcggagttttctctgccgcatacggaggtgacgctgctcgacacgccgggacatgtcgatttctccgcagaaatggagcgtacgcttcaggtgctcgattacgcggtgctcgtcatcagcggcacagacggcgtgcaggcgcacacggagacgctctggcggctgctcgcccggcacggcatcccgacgttcctgttcgtcaacaagatggatctggacggcgcagagcgcgttctgctgctgcgtgagctgaaaacgcggctttcctcgggtgtggtcgatttcggcgacgagggcatgctgcacgaggagctggcagtctgcgacgagacgctgctcgaaaggtatttcgaacagggaacagtcgcagacgaagatgttgtgcgtctcattcgtgagcgcaaggtctttccgtgctttttcggctcggcgctcaggctggacggcgtggacgcgctgctcgacgcactcgaccgccgcaccgtgcagcctgagccgcaggcggacttcggtgctcgtgtgttcaaggtcgcgcgcgatgcgcagggaaaccgtctaacctacatgaagatcaccggcggttcgcttgcggtccgcgcgcagctttcgggcggagaggacggcggttggcaggaaaaggtcaatcagctgcgcgtctattcgggcgaaaaatttaccgctgtggagcgtgccgaatcgggcatggtggtcgcggcgaccggcctgacgcataccgcgccgggcatgggactgggggcagcggcaggcgcactgccgcccgtgctggagcctgtgctcagctaccgcgtcggtctgccggccgactgtgacgcgcacaccatgctccgcagtctgcggcagcttgaggaagaggacccgctgctgcgtgtcgtctggaacgaacagctgggtgagatccacctgcagctgatgggcgaggtgcagctcgagatattgaccgagctgatcgagtcgcgcttcggtgtgcgcgtgacctttgacgagggcagcatcgtctaccgagagactatcgcggagccggtcatcggcatcggccatttcgagccgctgcggcattacgccgaggtgcatctgctcatggagccgggcgagcgggggagcggcatcacgctcggcacggcctgctcgaccgatgaactcgaccttaactggcagcggcttattctgacgcacctcgcggagaaagcgcatctcggcgtgctgaccggcgcgccgctgaccgatgtgcacatcaccctcatcgccggacgcgcccatgtcaagcataccgaaggcggcgatttccgtgaagcaacctaccgcgctgtgcgcaatgggctgatgcaggcgcagagcattctgctcgagccgtattacgatttcacgcttgaactgccggacgaatgcgtcggccgtgcaatgagcgatattcagcgcatggacggcacctttgagccgccgcagccgctgcacggagggtcgatgctgaccggcaaggcgcccgttgcatccatgcgaaactactggactgaggtcgcctcctacaccaagggacgcggcaggctctcgtgcacgccgggcggatatgaggtctgtcacaacacggaggcggtcgtgacggccattggctacgatgccgagcgagacacggaaaatacggcggactcggtattctgttcacacggcgcaggctatgtcgtgcactgggacgaggtccgcgcacacgctcatctggacacgagctgtgtgcttgcgcagccggaagaggaggcggagccggtatctgtgccgcacagcggtgtgcgttcatcgggatttgaaaatgacagcgagcttcgggcgctgttcgagcgcacctacggaccggttcgggatcgcggctttgaagccctgcagcaaagccggaaaaaggcggagacgctcgaacagctctatgtgacacgcatccggcaggacgattatctgctcgtcgacggatacaacatcatttttgcgtgggatgagctgaaggccatcgcggcggaggacgtaaacgcggcacgcgagcggcttgtgaacatcatgagcaactaccagggtgtgcgcaggtgccacctgatcctcgtattcgatgcctacaaggtcaagggcggcacgggctcggtcgaaaaacgccacggcatccatatcgtctacaccagggaggccgagacggcggatatgtatatcgagcaggcgtcctatgatctgtcgcgcaggcatcgcgtgcgcgtcgctacctcggacggcatggagcagatgatcattctgggacacggcgcggagcgtatgtctgcgaccgagctgaaatgggaggtcgagcaggcggacgagcatctgcgcggaattattcaaaatcttcagccttgagcttgcaggatgcaggtataaacgaatattttttgcaaattattaaaatggaaaacgcagggggttgaaaacatagtaaacctgtggtatattagtggtaaaggtgccggcaggggagaaaagccgacacagaaagaaaggatggggcgcgcctgaacggaaaaaacagaggcgtgccggatagattatgaaaatttcaaccaaaggaagatatgcgcttcgactgatgatcgatcttgcgcagcacgacgccggcggctatataccgcttcgcgatatttccaggcgacaggagatttcggcaaaatatctggagcagatcgtcgtacagctttcgcgtgcgggttttgtgacctcgacgcgcggcgcacagggcggctatcagctggcgcgtcacccgtctgagtatacggtgggcgatattctgcgcatcacggaaggctctctcgctccggttgcctgtctggagcatgaaccgatcgactgtgcgcgagcaaatgagtgtatcacgctcgatttctggcgcggactgtacgatgcgatcaaccaatatgtcgactcggtaacactcgaggaactggtcaacaacgaaaaaaatacgttgaatttctcgatttgaaaatttccccggaggcttcggcttccggggatttttcttgacataccattatagatgtactatcatctaaatggttgatactacaactataacggaaaggagcggtaacggtggatcagagccgcagacagatcacaaaaatcgcccgggaggtgagtaagttcacggtcagggagatgaaggcggaggggatcgggacggccgagttcgatttcatccatctcgtgcgtcatcaccccggcatcacgcagacgcagatacgcgatgcactcaaaatcgacaaaggcgcagcggcgcggcgcgcagcaagtctggaagcaaagggataccttgtgcgccgggaaaatccgaacgatcaccgaagtcagctgctgtacgcgacggaaaaagccgaaggactgcgaaattccaaggcggccatcgagcagacgttttatgagtggctgctcgatgaactgtctgaaagcgaccgtgacagcttctgccgcgttctgaacgatctgtatctgcgctcgaaaaaggaggcgcgcgcaggctttccggaggtcagcgcacggctggagacgggggcggggcaggatgaatgaccgccacgatccgcagaggatcacctggtatttcgcgcaggaaaagcgcacgctcgcggtcgttacggtttccggcctgctgtataatgcaggtctgctggcagggccgctgttcgagggccggctcgtcggcacgctgctcgatgtgctgaacggaacgcagacagcgaaatacatggcgctgctcgcgctcgcgtatcttgcgaccattgcagccgtgcagggcgtgcgctgcatcaaacgactgtatgtccgtcggttcgcaaatgacatcaaccggcgcatgaagcatatgctctatgcagatcttgtgcaccgttccaaaaaagaactggatagggaaggaagcggcgcggtgctgaccaaggcgatttcagatgtcgatgcctgcgcggagggcatgcgtaaattcacgaccgagatattcgatacgggcgtcgtgcttgtgtgctacatcggcctgctgctctggtatgatgtgaaaatcgcgctgctgagcctgctgttcccaccgcttgcatattttgccgcggagcgcatgaaaaccatcgtacagcgcaccaatgcggcgtttcgttcgagcgcagagcggctgaatgcggcgacgctcgaccgcgcagcaggcgcactgacatatcgtattttcggctgcgacgcgcagcggaacgcggattatgacgcacatcttgcggattatgagaggtgtgcggtgagggccaatatatgggtgtccgcgctgccgccgctgtataatgcgctttccatgacaggcgtgctgtttatcctgtacctcggcggcgcccgcgtacaaagcggtgcgtgggacattgcggcgttcacgacatttattgcctgcttcgcgaagctatcggtaaaatcctccaaggcagccaagctgttcaatgccgtgcagcaggcgcaggtgtcatggagacgcatcaagggatttctctgcacaccgccggaggaacgagatctgccgcaaaaagcaccgtgcagtgtgaaggcgaccggtctctctgtaccggatgtgctggaaaacgcgaatttcgagatcaaaccaggacagataatcggaataacgggactggtagcgtgcggaaaaagcatgctcggaaaggcgtttttgtgcgaaaatccgtatgagggctctatctggtttgacgatcgcgagcttgcgtcgctcgatgaaacagaacgatgcgcatatatcggctatctggggcacgacacggagcttttgagcgatacggtcgaaaacaatatcctgcttggcggcacaggagatgtgaaggcactgctgcgggctgtacggctcgaacgggaagtgacgccggaaacacgcattggcgcaggcggcatgcgcctgtccggcggacaacagcagaggctcgcgctcgcgcggcagctcgcaaatctgaagccgctgctgattctggatgatccgttttctgcgctcgatcgaaggaccgaacgtgaggtgtttgatgagcttagaaaaaaagcgaaggactccgcggttttgctgatttcgcatcgtttatatgtatttccggagcttgatggcgtgctgtggatgcagaacggtgtcgtgcgcacctcgacacacgcggagctgatggccagctgtccggagtatgccgagctctataagctgcagcagggaggacaggaaagtgcataaaaacgtcagtacggttcggattatcctctcctctgcgctaaaaaacgcagttttaagcatcggaacgatcgctgcggtcgccggcgccatcgtgacggcgctcatcccgccgcttgtgctcgaacgcatcgtaaacacgctcacggaaggaaaacgcccgggaattatgctcgtttcagcatatttcggtattattttaatggcaggacttgctgagtcagcaagagaaagcctgctctccgtgtttggacagcgtatcacgcgcagtctgcgtcatgagctctgcggaaaactttcccgactggatacgggatgctttgtgcagcagacgcccggcgaaatcgtatcacggtttgtaggtgatgtcgataccgtggaaaaactgtttaccggcggcatcattggcatgacggcagatatcggtaagattatcagcatattggcggtcgtttttataaaagcgcccggtctcgcatggatgattattgcgcttataccagcgctgtacattttcacgagagcgattcagaagcgaatgcttcgtgcgcagatggacagccgggctgcggctgcgagcgtttccggcttcctgcccgaaacattgcactgcatccgcacagtgcatcttcttggacgcgaaggatttatgcggaaacgttatgatgaagcaatcgaggagggctaccaggcaatagaacgcacaaatttctatgattcggtgtactctccggtcattctgatcgtgagcgctgcggtaactgcgctggttttcgttctttcagcatcaggaaatccatcgcttcgttatctgttcggcatgtctgccggtacagcagtcgctgtgatctcgtatatttcgcaggtatttacgccgcttgaaagcatcggcatggaaattcagaccgtgcagtcagctgtcgcaggcgtgcatcgaattgacgattttctggctctttcagaaagagagaccggtagcgctgctactgaaaaatcggatttgtgcattgctgtgaatgaagtggattttgcttatactgcggatacaccggtcctggagaatatttcgctgaatataagagagggcgagcacgttacgctgacaggccgaaccggggcaggaaaatcgacgctgtttaagctgctgatggggctgtaccgtccgcagaagggcagcgtgcgcattatgggacgcgaggcgtcggatattccggattcagagaaacggcatctgttcggctgtgtggagcagcatttttacgcgccacctgctacgatcgaggaacagattacgctgtttgatccggaaattacgcatgatgacgcggtgaaggcggcaaagctcacgggtctgcacgcggcaatcatggcactgcctgagaactataaaacgatgttttcggaggctcacttttcccagggacagcggcagctgcttgcaatctcccgcgcggtagcagccgacccgaaaatactgcttctcgatgaaatcactgcggatctcgatgctgaaaccgaacactgcgttcttgcagcgctgcgttccgccgcaggaggtcgcactgttgtttcgatttcgcaccggctatacgaggaagagggcagcagacgagtcgagattggctgagatgtaaaagacggctgagaataaaaactcagccgtcttgttgtatttgtatcagtaattgatttcgagaccggtctcgcagtcgccggtaagcgattttgcggcgctgctctccgtaacttcataggtgttttccgtgccgatgaggccaatgccttcgagcgcgattttcggctcgactgcaaacgtcatgccgggtacgaccggatcgttaaaacccttagcaagcaccggcgcctcgtccatcgtcagaccgatggaatggccgagaaatttgcaggaattcataaagccgtcgcggaataccgggtcaacggcggcgagaactttttcgtaaatctcagccggaaccgcacccggacgcagcagctcagcagtcatcttctcgagtgcaatgcactgctcgtgtgcggcgcggatcagatcggccttcggattttcgtcaaggtcgccgaaatagaacgtgatgctcttgtcggtgtgatagccgcgccagccgcacggaatgtcgagcagcacggtatcgccgccgcgaagcaggcgctcggtcgaaccgatggacttcatggcgatgcaggtgccgaccgtgccggaggggccgtcgagcgccgccggcatcaggctgttctcactgtagcttgcaaagccgagcacatcctcggccgccggctgattgtaacgggagatgcccatcgcgccgtggtcaagcatggaggtgcagatttcagaacacagacgggcctcgctcaggccggggcgcaggagcgccggcgcaacagtttcgagaacctttgcgtggatttttccggcgtgcctcatgcattccagctcgtaggcactcttgacggcgcgcagaccgcccagaatactgtcgatggaggcaggagcgaaaggaagatacttctggagcatggcaagcttttgcagcgtcatcgtccgcgtcgcgacgtaaaccgtttcagggatatgaggaaaggcggatgcaatgccgcggaagctgccaagcggacggatgtcggcaaagctggagtcgcgcacggcgcattcataggaatggcgcacgaaaagggccgcctcatcgggcgtgatgacgagcgcgccctcctgcatcgtgccggtaaaataatacaggtcgatcttgctgtcgagcaaaatcatcccccagtcggggtgggcggcggatatcgcgcggcgcaggttttccagacgcgcggcgagctcggccgcaggaacagcggtatgtggcatggtgatccctccgttttttatttatgatagctccttcatcataccacagctgtaccgtaaaagtcgagagggaagcgcagcttttttgcgcatccggctgcgttcgattgactttttttcgctgctgcggtatcatgatatataaagaaaaatgcccgcagggaaaggagtcgttatgcgcagatttttcggccggatactcggtgaccggcgcgttgctggcggattgtttttgattttggagctgatcgccgtgatgtggggcgtgggctggatgagcgagcgatggccgtcggtcacgccggcgctcaccattctcagctttgtcatcgtggtctggcttgtccgcaagtacgacaatccgacctataaaatcacatggatcatcattatcctgctgtttccgctgttcggcggcctgttttacctgttctggggcaatacgcccttcaaccgcgcgcgcacacagcatcagtatgagccaaatccgccggatttcaccgattacatgcgcaagcctgcaacggaggagctttcgcagctgcatccgcgtcatgcggcccgtacgcgctatatcgacagtctgtgcggcatgccggcctggacgaacacggaggcgcattacttccgcgccggcgaggatatgtttgcttcgatgtgcgaggagctggaaaaggcggagcggttcatctttctcgaatacttcatcattgaagaaggcaagatgtggaacacgattctcgatattctggcgcgaaaggcaaagaaaggcctggatgtccgcatcatttacgacgatgtcgggtcgatcgcgacgctgccgcagcactatgaccgctatctggtgtcgctcggcattcgcgcggtccgtttcaaccgctttattccgacgctcaatacctatctgaactatcgaaatcaccgcaaaatgatgatcatagacggcaatgtggggtatatgggcggcatcaaccttgccgatgaatacatcaacgaaaaggtgcgcttcggctactggaaggataccggcattctgctgcgcggtgagggcacggcgaacatgacctcgctgttccttcagatgtgggagtatgtgacgggagagaagattaccgcgttcaaaagctatctgccgacggtcaagctgccgcaggacggctgggtgcagccgttcgccgactcgccgctcgacgatctcaacatcggtgagtccacctatcttcagatcattcacaacgcgcgaaagtatgtctacatcaccacgccgtatctggtgctcgacaatgagatgatcacggcgctgacgatcgcggcgcagtcgggcgttgacgtccgcatcctgacgccgggcatcccggataaaaagctggtctatatgatcacgcggtcgtattatcagcagctgcaccgtgcaggcgtgaagatctatgaataccgccccggcttcctgcacgcgaagagtatcgtctcggacgacgatacggcggtggtcggcacgatcaatatggatttccgctcgtttttcctgcactttgagtgtgcgacctgcttctacaacagctcggtcgtagcgtcggtcaagcaggatatcctcgaaacgatcaatgtcagccgccgcattgacgacgcatggctgcggcgtgttccgtggctgcggtcgatcgccgcaagcgtgctgcgcctgttcgcgccactgctgtaagtagctgattttgaaagatgaaaatcgtgggggataaagcgaacagatcgaaaggtgtggaggtctaagcatgaagaaaataattgcaggaacaggatttgaactgacaagaacattgatggtgctatgtacttctttgatggcaagcatgaatatggaaaatacaacagagtggaatacggaattgggtagatattggcaaacagtatctgatatgagtttattccctgtgctgataacaggaattattttattggtaacaggcattgcattttctttatggggtgttttttcaaaagaagataaataaacgctattccagtttgatagaccgtgcatctcaaaaaggcaccgcctcatttttcatgaagcggtgcctttttgatacatttttacgtgcgcagaccgagatgcagcagcagataaaggatgcaggctgcgatggcggcccagatgaggctggtcatcagagtcagaaacaggccgcggagcggaaaacgggtgcggcggagcagcagcccgagcgaatgcgcgtctcccatggcgctgatggcacgttcgatggcctgcccgcgcgggcagccggtgctgcgttcgagaagctccgcgcgcgagagaatgtggtcagatagctcgcggcgtacgcggcggcggtagggcggccagaacagcggaccgcagacctcatcgagaaaagaggcaaggcgttcatcttcgtgcacaggtctcacctcccgcggccagactgctgcatttgcggcggtaatgctcccattcacggcggcatcgcgcaagcgtctttgtcccctggcgggtgagacggtaccagcggcgcggccgtctgtcgttcatccgctcgcgcgagcggatgtcgccgcgctcctccagccggtgcagcagggggtaaaggtcgccctcgtgcccggcaaaggtgcggtcacactggcgctcgagtatcgttatgatctcgtgcccggcgcgttctccgtcggcaagtatgcccagcacgagcagtacattgcatgacgcccagcaggcgtcgttccttcggtcggacattgttctcacctccgcatatgatttgctatacacagtatacccgaagtacggcgatgcgtcaaactgttgataaaattcacacaaaatttataggagcgcccttgcgttttctgtgctcaaagggtaaaataaaagtaatatttcgaaaaaaaggagtagaagattgttttctgcattatttgactggctgctcggcgcggggcgcgaggcggccgtttttatcatttccatggtgccgctcgtagagctgcgcggcgcagtaccgctcggcgcggccgccggaatcccgtggacgacgcttttcccgctggccatcctcggcaatatgctccccattccgctgctgctcgtgttcggggaaaagctgcttgcatgggcggaaaccctgccgccgctgcgtaaatttgccgctgcgtacaagaaaaagctgctgagcaaaagcggcgaggtcacaaaatacgcccgtctcggactgtatctgttcgttgctgttccgcttccgggaaccggcgcgtggtcgggtgcgctgatcgcaacgctgctgaaaatgcccaaaacgcgcgcgctgctgtctattttctgcggcgtcatcacggcgggcatcatcatgctgatcgcgtctcacggcgtgctcggcgtggtaaagatgatataaacgaacgcaaaaaggcactctcattcgtccgagagtgccttttgcgttaatgctttccgcagccgtgttcgccgcaggtgtgatggccgctgccgtgttcgtgctcgtgatgggtgcaatggacgttcgggtcgaaggtcaactgaccggctgcaagtgctgccgcagcttcgtctgcgctacccgaaacaccgccgtacagtcgaatgcccgcctgcgcaagcgcagtctgtgcgccgccgccgatgccgccgcagatcagcgcgtcgacctgatgcgcggtcaggaagcctgcaagggcaccgtggccgctgccgttcgtgtcgactacctcgctgtgtctgatctcgccgttctccacatcgtacagcttgaactgttcggtatggccgaaatgctgaaagatggttccgttctcgtaggtaactgcaattctcatgatatgttctcctttttctgtaatctgctgcggggactgtgccgcgtttctgcggcatcgatggcagcagagcggtcctgtgccgtcgcacaggcggtagcgtccgcctgcgatcacgagcgtcttgccgccaatcaggctgtctgcaatctttgtccgtgcagattcgtagatttcggtcgctgttgtccgcgaaatatccatctgcgcggcgcattgctcgtgggtgtatttcatcaggtcgatcagccgcacggcttcgtattcatccacggtcagcgtgatgctttccggcgaagggataccttcgggtacaaagcggtcgaactccggctcggtgcagatgcgccgccatcgacagggtcttgccattgctgtcactccgtttccgatatatgtcgataatgattataacacacaagatgcgttcggtcaacccacagtaaaatttatgagcggagaaaaacgaaaatcccgatgcagatcagctctgcaccgggatcagaaagagagagattttagcgttttttaaggtagcgcatattgcacagagcggaaacgacgagcattgccgccgcgatgagcagcagagcaaagccgatgcggataccgccgtggtttgcggcaacgccgatcgctgccggggcagctgctgcgcccagaccgttcagtgtaacataaatgcccattgaggcaggatagcgcgagaacaggtcgccggcattcgagaccgtcgtgccgtacataccggacatacacaggccgaggccgatggtagcgacgatcagtaccggaaggctggtgccgaggacgagcaggacgaggaaggctgcgatgccgaagcacatgacggtgatcatctgccacgggcggaaccttgccgcgatcacgctgcacgagaaacggccgacaagcagcgaaatccagagcagcgaagtaacgatctgcgccgcgcccgctgcaagcacgccggagtcgatgtagaacgtggtcagccagcccatcatggatgcttcgaccgcttcgtagaaaaagcagagcgcggtggtcagccagaacagacgctcgcggaaaaatccgtaatcggtggcggatttctgcgagctttccgcaggcttttcctcatccattttcataaacaggccaaacacaagaccgaaggtgagcagaacgattgcgatttcaagcgccagacgccagccgttttcaccgccgagcttctggcaggcgagcaccgcgagcggagcaacgcacgcgccgaatgcatacgaggcgtgcatcatattgagcggcgttgcgctgccgtttgcgtattcgctcatgacgcggttgttgtagtcggtaatgccgcccttggagatgccggtcaggaacatcgcggtgagcagcaggaccggcgagccggtcacgagcagcatgatgaagccgaccgcaaacagatagtaggaaacgagataagagcgcttgagaccccatttgacgactgccgcgccggacagcagaccgatgagaaggtagccgaccgactgggaggagatcagtgttccgctgagctggtagtcgagcccgtaggcggcgcggagatcggggaggacggagccaagcatgatcgagccgaggccgtgcgcgaaataaacgaggaacagctcagcgacaacaaaacgcttgttgcggctgatagatgataaaaatgccttcatagtgtttgccccttctggtttacgaaaatgaagcattgagaaaatgcgaaacagcattcccttgcttgcagacaaaagtataacaggataaaatgcggttttccagcacaatcttgcgaattcgtgcagaaaaaacggaagaaaaaccggtgaaaaccgccatccggcaggcctcgaagcgcaaaaaaatgcgcggctgcctgcgcggtttataaaatcttgcgctcgcgtatttgagcacagaaaaacagcggaccgtagaaggtccgctgtcatgtgtacgtttgaataaaatcagatgcggcaggattcgagcagctcgttcttgcaagtccagagctttttggacaggtcgacaaagtaggtctgcggattttcgaagcgcttgatctgatcccagagcgtgtccacctcgcgcatacagtagtcgcggatctcggtgatcgagggcgactgatagatgcattcgccgttcttgaagatctgctggcgcagcggacggacggtgtagtcggtaacgacgcgctgcttccaggtgtgaatcgggtggaagagaacataggggagagccggatcgatgacctcgtcatgaatggtcagaacgtcgcccagcgccttgccggtcttgttgtcgaacagacggtagacctgcttgaagtgcggcgtggtgatcttctcaacattttcggagaccttgatcttcggaatgatctcgccgtcctcgttttcaacggctgcaagcttgtaaacgccgccgaataccggctcggacttggaggtgatcagacgctcgccgatgccgaacgagtcgatctgcgcgccctgtacgatgaggtcgcgcaccagatattcatcgagcgagttggaggccatgatctgcatatcggagaagcctgcgtcgttgagcatcttgcgcgcctcgaccgagagataagcgatatcgcccgagtccagacggatgcccttggcgcggatgcccttttcagcaagctcctttgccacgcggatggcgttcggaacgccggatttgagtacattataggtatcgacgaggaatacgcagttgtccggatagatctcggcataggccttgaaggcctcgtactcgctgtcgaacatctgcacccaggaatgcgccatcgtgccgccggccgggatgccgtggtcgcggtcggccagaacgcaggcagtaccctgacagccgccgatgaaggttgcgcgcgcaccgtagatcgcgccgtcatagccctgtgcacggcgagagccgaactcgagcacggtgcggccctgcgcggcgcgggtgatgcggttcgccttggtggcaatcagcgtctggtgattgacggtcagcagaaccatggtctcaacgaactgcgcctgaatcatcgggcctgcaacggtgacgagcggctcgcccgggaataccggcgtgccctcggggacagcccagacgtcgcattcgaacttgaagtcgcgcagatagttgagaaacgcctcggagaagcatttgcggcggcggaggtatgcgatgtcctcctcggtgaagcggagatttttgaagtaggagatcagctgctcgacaccggccatgatggcatagccgccgccgtccggaacgcggcggaagaacatatcaaagtatgcgcggcggttgcccatacccttttcaaaatagccatttgccatcgtgaactcgtagaagtcggtcagcatggtaagatttctttcggtcattgcgataaacgcccctttgcgtgagaaaaagacacgcggtaaattcatagcctgtgcactgtcttgacacacagtattaaacatataatagtacgttttatggaaaagtgcaagcatttctttcgttggagagagttaaattttcggcggagcgggggagacagacgggcatcagaaaggtacagacatgctctgacggcctggggaaaacaggcgggcagcgaatgatactgcgaaggaatgtctgttttatgcggacaattgataggacgaaatttatcggcgccgtgcaaaaaacaaaagaaaagcagaaaagatacctatttaatataatgggaataatggtgagaagcagcgcgggcagacgaggaacagaaatgcacaaagcgaataaatatacatttcataaaataattataaatttttcttgccaaacgggaaatgtggtagtataataaaaccatcgaaaaaacgatgaatgcgaggtcaaacgatatggaaaagaaatataacaaagttgttctggcatattccggcggtctggatacttcggtactgatcccgtggctcaaggagcattacggctgcgaggtcatcgcggtttccggcaacgtcggtcagggtactgagctggacggtctggaggagaaggcgctcaagaccggcgcttccaagctgtacatcgaggatctgaccaaggaatttgttgatgactatatcattccgactgtcaaggcgggcgcaacctatgagcagtacctgctcggcacttccttcgcgcgcccgatcatcgcaaagcgcatcgtagatattgcgctcaaggaaggcgcagacgcgatctgccacggctgcaccggcaagggcaacgatcaggttcgtttcgagctggcgatccatgcattcgcaccgcagatggacattatcgctccgtggcgtttctgggagctgaacagccgcgaaaaggagatcgcgtacgctgaggcgcacaacatcccgctgaagatcaacaaggagaccaactactccaaggataagaacctgtggcatctgagccatgagggtctggatcttgagcttccgtccaacgaggctccgatcaacaagccgggcttcctcgagttgggcgtttccccggaaatggctccggacaagccgacctatgttaccatccacttcgagaagggcgttccgaccgctgtagacggcgagaagctggactccgttgccctcatcgagaagctgaacaagctcggcggcgagaacggcatcggcatcctcgacatcgtcgagaaccgtctggtcggcatgaagagccgcggcgtttatgagaccccgggcggctctatcctgtacgcagcacacgcaaagctcgaggagatcaccctcgacaaggagacctcgcactacaagacgcaggtcggcctcaagttcggcgagctggtctacaacggccagtggtatacgccgctgcgcaaggcgctgtccgcattcgtcgactccacgcaggagaccgttaccggcgacgtaaagctgaagctgtacaagggcaacattatcccggcttccgtaacctctccgtacagcctgtactccgaggatatggctaccttcaacgaggatgactgctacgatcaggcagactccgcaggcttcatcaatctgttcggcctgccgctcaaggtacgcgcgctgaacgatcagatgctgttcgctaagaccggcgagcacttcccgtccgttgataagtaagttaatttaagatcgtagggcggcatgtccgaaatgtgccgccctacgggtgttttgagaggtaacagcactatggcaaaattatgggcaggacgtttccagaaggagaccgatcttgtagtaaacgactttaactcgtccatcctgtttgactgccgcctgtacaaggaggacatcaccggctcgatcgcgcacgcgaccatgctgggcaggcagggcatcatcgaggagcacgaggccgagaagatcgttgagggcctcaagggcatcctcaaggatatcgaggaaggcaacgtagagttctcgctcgattacgaggacattcatatgaacgtcgagcagctgctcaccgagcgcatcggcgataccggcaagcgtctgcatacaggccgttcgagaaacgatcaggtcgcgctcgatatgcgtctgtatgtcaagaaggagatcaaggagatcatcgagctgatcctcggcttcatgaaggcgctcaccaagaagagccgcgagaatctggacgctgtcatgccgggctatacgcatcttcagcgcgcgcagccgacgacgttcgcacattatatgatggcatatgccaatatgctgaagcgcgacatcacccgtctccaggactgctacgagcgtatggacgagatgccgctcggctcgggcgcgctcgcttccaccacctatccgatcgaccgcgacttcgtccgtgagcagctcggctttgcgcgcctgaccgacaactcgctcgacggcgtttccgatcgcgactactgtgttgagctgctttctgcgctttccattctgatgatgcacctgtcgcgtctgtccgaggagatcatctcctggtgctcgtgggagttcaagttcgtggagctggacgacgcatactccaccggctcgtccatcatgccgcagaagaagaacccggacgtctgcgagctcatccgcggcaagaccggccgcgtttacggcgcgctgaccaccatgctgaccgttctgaagggtctgccgctggcatacaacaaggatatgcaggaggacaaggaggctgttttcggcgcgatcgatacggtcaagcagtgccttgaggtattcaccccgatgttctccaccatgacgctccgccgcgacaatatgcgcaaggcggcgtcgcgcggcttcatcaacgcgaccgactgcgcggactacctcaccaagaagggcgttccgttccgcgatgcgtacaagacggtaggccgtctggtcaatcagtgcatcaaggcggacgagaccctcgagaccatgaccatgcgcgactttgcggcgatctccaacaagttcggtgacgatgtctatgatgcactcgacctgcgtacctgtgttgcagggcgcaaggtcatcggcggcccggctccgcaggaggtcacccgtcagatcgacaagatcgagaagttcgttgccgatgtggaggacgagctgtaattatgagcaaaccgaagatttatattgacggcaaggagggcacgaccggccttcagatctacgagcgtctcggcaaacgcgacgacgtagagctgctgctcatcgatgaggacaagcgcaaggataccgaggaacgccgaaagtttctgaatgcggcggacatcgtgttcctgtgcctgccggatgccgcagcgaaggaagctgtcacgctgatcgaaaacgaccatacccgtgtgatcgacgcatcgaccgcacaccgcaccgacccggactgggattacggctttgcggagctgtccaaggcgcaccgcgccgcgatcgccggctccaggcgcgttgccaacccgggctgccacgcgagcggcttcatttcctctgtttatccgctcgtcgcacgcggcgttgtcccggaggactttgcctttacctgctcgtcgctcaccggctattcgggcggcggcaaaaagatgatcgcagaatatgaggatgccgagcgcgacagccgtcacgactccgagcgcatttacggcctcaatctgcatcacaagcatctgcccgagatggaatacgtctgcggtctgatgcacgcgccggttttcgtgccgatcgtcggcgacttctacaagggtatggcaacgacggtcatgctgcctggcgtggatgcacacatcgtgcacaacaccctcgcggagcactatgcaaaccagaattttgtgacggtcgcaccgataggcggcgatgaaaacgtcatttatgcaaatacgatggcaggccgcgatagcctgcggctgatcgtctgcggccatgaggaacagacaatcgttaccgcactgttcgacaatctcggaaagggtgcgtcgggtgctgcggtgcagaacatgaatatcatgctcggcctggaggaaacgacgggcctgacgctctgaaacggagaagaagaactatgaagatcattgacggcggcgtttgcgccgcaaagggtttcaaggcgggcagcgtgcgctgcggcatcaaggcgagccgcacgaatgacgataccgcgatcattttcagcgaatgcgagtgcaacgctgcggcgacctacacgatgaaccgcgtaaaggcggctccggtctatgtcaccatggagcacctcgaaaacggtgtagcacgcgccatcgtcgcgaactccggcaacgcgaatgcctgcgcaccggacggcatggagaacgcacgccgcatggcgaaagcggcggcttccttcctcggcgtcgaggaggaggacgttgcggtagcgtccaccggcgttatcggccagcgcatcgatatcgagtgcatcgaggagcatctgtccgaaatcgttctttcggacgacgcttcggaacaggcaaaccgtgcaatcatgaccaccgatacccgtaccaagactgcggcggtcgagtttacggtcggcggcaagacctgccgcatcggcggcatctgcaagggcagcggcatgatccatccgaacatgggcaccatgctgtccttcatcaccactgactgcgcgatctctcacgaaatgctgactgatgcacttcaggagaacgtaaaaaagacctacaaccgtgtgacggttgacggcgatacctcgaccaatgatatgtgcgtcgttctggcgaacggtctggcaggcaatgaactgatcgactggcagaacgaggattatcaggcgttctgcaaggcgctgaacgagattaacacccgtctggcgcgtcagatcgcagcggacggcgagggcgcgaccaagctcgtgacctgcacggtcaggaattcgcgcagcgaggagaccgccgagcgtctggcaaaggcggttgtcggctctaatctcgtcaaggctgccatgttcggtgcggacgcaaactggggccgcgtcctgtgcgcaatgggctactccaaggcgccgttccgcccggagtatgttgatgtagcgttcgagtccgaaaacggctcggttgctgtctgcgagaagggcgcagcgctgaatttcgatgaggagcttgcaaagaaggttctcaccgcaaacgaagtcaccattcagattgacgttcacgagggcgagcatgctgctacggcctggggctgcgatctgacgtatgattatgtcaagatcaacggcgactaccgtacctgagcggcgataaatcgcgtgattcttcgtcagcagcgcgcttgcgtacatatgtacgcggcgtgcgcttcttcctcggctgacacgatttctcttgctcaggaggcgaagcgagctgcgcaaatgtgtgacgcggtttctcttgcgcgaaggtacggagcgagctgcgtgaatgcagacgcggtttttcttgctcaggaggcgaagcgagctgtgcaaatgcgttgcgcggtttctcttgcgcaggggatacagagtagattgcgtgagtacgcatctgataaaaacatatccgaaaaggaacgaaaaagcatggatactcccatcacagaacagaaaacagacaatatggatgcggagctgagagccgacattctggtcgaggctcttccgtatatccaggaatattacggtcagaccgttgtcgtcaagtacggaggcaacgcgatgatcaatgacgagctgaaggacgcggtcatccacgacctcgttctgctcaatctggtcggcgtcaaggtcgttatcgtgcatggtggcggtccggagatcaacgatatgctgaaaaaaatcggcaaggagagcaagttcgtcaacggtctgcgctacaccgaccgtgagaccatggacattgtgcagatggtgctgtgcggcaaggtcaacaaggaccttgtcaccctgatcgaaaaggcgggcggccgcggcatcggtctcggcggcatggacggcggcctgtttcaggcaaagcgcctgaccgaccgcgcgggcacagattacggctacgtcggcgacatcgttgacgttgacccggcgccggtcatcgacgttcttcagcagggttacatcccggtcgtttcgaccgttgcgcagggcatcgatgacgagaccaactacaacatcaatgccgataccgcagcgagcaagctcgccgttgcgctcggtgcgaaaaaactcatcctgctgaccgatgtgcgcggcctgatgctcgacgtcaacgatgaaaacagcgtgctgcatcgactcaaggtttctgaagtgcctaagctcgtgcgcgacggcgtcatcaagggcggcatgatcccgaaggtggactgctgcgttgaggcggtccgcaagggcgttgagcgcgcgaccattctcgacggccgcgtcaagcactccatcctcatcgagctgctgtctgatgtcggcgcaggcacgatgtttcagtaattcacagcaatcagtagatttatgctgatttcgcagattttccacgaaaagggcgaaaaccaatgacatataacgaactgaaaaacgaagaaaataaatatgtaatgaacacctacggccgcttcccgatcgcgctcgaccacggcaagggcgcgaccctgtgggacgtagagggaaagaagtacatcgaccttgcctccggcatcggcgtcaactgcatgggctacgacaaccagatcctcatcgacgcaatcacccggcaggcgcacaagatcatgcacgcatccaacctgtttaccacggaaccgatggtgcaggtcgcgaagaagctcgtcgaaaagacccatctgaacggcaaggtattcttcgccaactcgggtgcggagtccaacgagggtgcgatcaagctcgcgcgcaagtattccttcgacaagtacggcgagggacgctacaagatcgtaacgctcatcaattccttccacggccgcaccgtaactacgctcaaggcgaccggtcaggatcgcttccacaactatttcttcccgttcaccgagggctttgattatgcggtcgcgaacgacatcgacgacgttcgccgcaaggccgacgatatgacctgcgcgatcatgatggagcttgtacagggcgagggcggcgtgctgccgctcgatcaggaattcgtcaagcaggtcgaggcgctctgccgcgagaaggacatgctgctcatcatcgacgaggtacagaccggcatcggccgcaccggcagcctgtttgcgttccagcagtacggtatccgtccggatgttgtcaccatggcgaagggtctcggcggcggcgttccgatcggcgctgtgctcgcggcagatacctgctgcaatgttctgacgccgggcacacacgcgacgaccttcggcggcacgccgcttgtctgtgcgtccgcgaatgcagtgctcgatcatgtaggcgacccgaagttcctgcatgaggtcaaggagaagggcgaatatctgaagaacggcatccttgcgctcggcaaggacagcatccatggcgttcgcggcatgggtctgatgctcggcatcatcgtggacgagggcaagcattccgcttttgcgaacaagctgatcgaaaacggtgttctggcgatcactgccggcaagaatgcggttcgcctgctgccgccgctggtcatttccaaggaggaaatggacgaggcactggcagtcatggcaaaggtattttaagaaaacgccgcacaatgaaagcgcggtatggccttaacggattatagaaaggtgtttttccaatgaagcatttactcaagctgctcgactgctccaccgaggagatcatcggcctgctcgatctggcagatcagctcaaatatgaacagaagcataatatttcccatcgccatctggagggcaagagcctcggcatgatcttccagaagtcctccacccgtacccgcgtttccttcgaaaccggtatgtatcagctcggcggtcaggcgctgttcctgtccaaccgtgaccttcagatcggccgcggcgagccggtgcaggatactgcgcgcgttctgagccgctatctggacggtatcatgatccgaacctacgcacagaaggaggtcgaggatctcgcgaagtacggctccattccgatcatcaacggtctgactgacttctgccatccgtgccaggttctggccgatttgatgaccatccgcgagaagttcgcggttctggagggcctcaagatgtgctatatcggcgacggcaacaacatggcaaactcgctgatcgtcggcggtctcaagaccggcatgaaggtatccatcgcaacgccggtggactaccgtccggatgctgaagtcatggccttcgcagagccgaacccgaacttcttcatcaccgacgacccgatgaaggctgcggagaatgcagacgttgttatcactgacacctgggcatccatgggtcaggaagccgagaaggaaatccgcatgaaggcgttccagggctatcaggtcaatgatgagctgctcgccgctgcaaagccgggctgcatggtgcagcactgcctgccggcataccgcgagcaggagatcaccaccaaggtgttcgaggaacacgcaaacgagattttcgaggaagcggagaaccgtctgcacgcacagaaggctgtcatggtcactctgatgggcagcgtcgaggaataatccggggcaaccccaagtgcctgcaacgcgcagaaaacgttgcaggcgcttttttctgtacgccatttgcggaaatcctattgacatactctgaaaagctgtgtaaacttatatcagtatgcaaaaatggagaataaggagcagatagacgtgttaaaccagttttcgagaacagaactgctgctgggtcatgagggcatggaaaagctcagcaaggctcgcgtagcggtattcggcatcggcggcgtcggcggctatacggtagaggcgcttgcacgcagcggcgtcggcacgctcgacctcatcgatgacgacaaggtgtgcctcacgaacctcaaccgccagattatcgccacgcgcagcacggttggcaagtacaaggtcgatgtggcggcggagcgcatccacgacatcaacccggacgcggtggtcaacacttacaagacgttttacaaccccgaaacggcgtcccagttcgattttacgcagtacgactacgtggttgacgccatcgacacggtaacgggcaagatcgagctggtcgagcaggccaacagggccggcacgcccatcatcagctgcatgggcgccggcaacaagctgaacgctgcggcgttcgaggtgagtgacatctacaagacctcgttctgcccgctcgcgcgcgttatgcgctacgagctgcgccgccgcggcatccggaagctcaaggtggtctattcgcgcgagcaggcgatgacgccgatcgacgatatggcgatcagctgccgccaggactgcatctgtccgccgggcacggcgcgcaagtgcacccagagacgtcaggttccgggcagcacggcctttgtgcctgccgcagcgggacttatcgtggccggcgaggtcgtcaaggatctctcgggcgtgagaaacgattaacacaggacggccggcgctattcagccggccgtttttttacagttgactctataacggttatagagcttatcatgggatgcggaggaggcacagccgccccgaatgatcaaaaaaacgactcggacgaacggaacttctcctgtgaaacgtgatttcaccgcatctggtcacatggtctgaaaaccgcagcattatcgcgcgagatcacgccggccgaccaggacttcaccgagagcagcattcctgtttggggcataaaatgactggaaagccgccctcgaatatgatatactgttttttatataggaaaaacaggagagcgtattctcctgcaaagggcggtaaaaagaatgcattttttcaaaaaaatacgaatcggtcagcgtgcagtcaagactgcgctttcggtcgggatcgcgcttgcggttgcgcagattttaggttccagtctgccgatttttgcggcgatcggtgcgatttcggttatgagccgcacatggagcgactcactgaaggaaagtctgacgcaggttgccggtacttttctcggatatctgatcgcatgcgcttttgtactctggctgccgtggcggccgcagttctttctgtggatggcagtcggcacgctctgcgtcatcacactctgtatcgcgctgcggctgaattttgccattccgctcgcgagcattgtgttcgcggatgtctgtctgtatacgggcggagacgccgtggtctacggctttcatcgcttcacagatacgatggtcggtctggcggttgcgctcgtggtcaatatcgtgatccggccatacaacaaccgccagaaaatcctgaatatgatgtacgagctgcaaaagcagtttctcccgcttctggaggcgcgtgtgatcgcgcaccgctacccggatcttgcgccgctgcgcaacaaaatggcgaagctggacgatgaactgcgtattttcgaaaaacagccggtcgcgctttttcatcataccgtgcgtgtttccgcgcggcggcaggaagctgcttatctgcgcggctgtcagcagctgctcgataaaatgggcggcgagctcgcggcgctgtgcaacatggattccagtccggttccggacgataaaatgcttgcacgcctgaaggagcacggtgtcgccgtgcctgaaggcctcgaaaagtatggatattgcagcgaagtcgacacagcggtcatgaatttccatgtcggcaatctgctggatgcctatgattacctgagtatactgcatcatggataaggaaaatcagggttcgcgcagatgccgagcgtggcttttggacaaataaaaaaacagcagcaaaaagcggcgctgcctccgagaagtgttcccggaagcagcgccctgtttgcatttctttggagccttagcccttggctgcgaggctctgctcgtaagactcaatcatcttcttgaacgtgtgtcccgaacgacgttcgagtttttcgagataccgcatggtgctttcgctggtgaaaagtttgatttgcagctgaattttatcattatcgaccgttacaaagatgcggtcgatatatttttgcacaaagtcgcggcccatgagcccgttcaccgcatcgtcgcgagcggcctgtaaaacacggcggatttccgcgatgtgtgcgttgaggtcggcgcgggaggtccgggcggcctccaattcttcgagacagagagtgcactcgtcgatctcattgtcgcactgacggttcatcttgagaaaatccgcatccgtgatctgaccggtgacgttgtactcgagcagcttgctctttttcttttcagcgagctcgcgcctggtacgctgcgtgtcgatctcctgcgcaaggtcggtatcgtcctgactgatcgcacggtacatttcgatatagcgctcgatcagttcatcggcattgacgtccgcttccttgaacacgtccatcaaaaccggcttgagttcctgctcgtacagcggcagggaagggcaggagtcctttccgtttttgatcttgccggagcagacccacttgctgttgacgctgcctttccggtctttggcatcgcgtcggtagtaggccgcgccgcagtgcgtgcagtacagcttgccggtcaacagattgtcgtgattgcaaagattctgccgccgcttgacatccttgctgcggcgggtgaggacagcgtttgctgcgtcccacagcttctcggatacgatggcaggtacgatttcaccgctctcatccttgaacatcacccactcctcaggcgggagaaacttctgctttttagtgaacatatccacgatgcgcactttgttgccgacataatagcccttgtacttcgggttggaaatcatgccggacatggtcgtgtgggcgatttttctgccgttatggttgcggtagcctttttcccagaacaggttttcgatctgcttcatgctgtaatggtcagtagcgtacagctcgaacagctcgcgcaccatgggcgcctcgttttcgtcaatgacaaggcgcctgctgtcctttcgatagccgaaaatgcggctgttgccgagaacaacattgttttttatcgcctgctggtggccgaacttgacgcggctggacagcttgcgcagctcgtcctgagcgatgccggacatgatggtgaggcgcagctcggagtcctcgtcgaacgtgttgatgttgtcgttctggaaaaaaacgccgacgcctgcggaaagcagctcgcgcgtgtagcagatactgtcgagtgtatttcgggcgaaacgggtgatctccttggtgaggatgaggtcaaatttgtcgtccttcgcgtcctgcaccatgcgctgaaagttgtcgcgcttgcgcgtggtcatgccggaaagaccctcgtcaatgtagccgtcgatgaacgtccatgccgggttgcgcgtgatatagtcgcggtagtagctgatctggttgtcgagcgagttgagctgctcgtcgctgtcggtcgaaacacgcgcgtaaaacgttacgcgcagagcaatgtcgctgagccgcgttgtgcgcagcttttgccgtatcgtaaagatgtccataagccacacctcaaaagttcattgtatcatgattagtatatcatgacaagtgcgcaaatacaagagaaacggatcgagaaagcacggatcttcatatgtatgaaggcaaaccctgtcgtgcggtggcgacgcagtgcattgaagtgggagtggatctggacttcaaaacggtatatcgtgctctggcgcctttggacgccatcattcaggcggccggacggtgcaaccgcaacggacgtgaccggatgggacgagcaatcgtattttgccctgaggatagccgaaggctatacccggatgactgctataacaatgctgccgttaccgtgcaggaaatgtcgccgtcttttttattcatgatccggataatattcgggagtattatcagcggctgttcgatgggagtacagacaagaaagcattgacagaggggattgatgcccggtcttttgagcaaacagcggcacagtataagctgattgacaataccggtgtgcagattattgtcccctatgcggagaaacgcgaattgcataagagtatatcgaagcagcatctattaccttgatctgctttgacaaaaatctggatatctatgcggaagaaattccggttgcccgcagaagcagagctcggttcgatgggcagacggcgggaagctgcgtgtacctgctccgtccgcaatatgaagaatactattctgcggagatgggacttcatttaccgcagggagaagaatttgacggtatatggtaaggatagcacgttgagtctccgctttattggacactcaacgtgttattattttacagataaaatagatggagagcctgaaaaatatagatgacataattttgctgttctatccgtcaaacgacgcggagcacgcaaatcatggaggtgaattgtatttgaaagaaattgtaatcgaggtgtggggagaccttgcatgcttcacgatgccgtatgcaaagggtgaaagattaacctatccgttcccgactccatctgccgcaagagggattctttcagcgatttattcaaagccgaaagagtttcgctggcagatcaatcgtattgaagtgctgaaccccatccgttatatcagttttaaatcgtactggttactgcgccgaacaacaccggcattaagacgattgatgatcttggcggtaagaaggttccggcaggcgcaggtcgcgtcaatgcgcagtttatggagagctataataaggagcacgcagacaacccgatcgacatccagtacaccgatgcagatgcttccgcggcgttgatcgatctgtataacggctgctacgatgacattatgaacctttttaagccatctgcgatttgggagggcatcgtccgcatcgttccgaatattccgcaaacgctcgagatcgcagcggctgcggctgtgatcggtattgtactgggctttctgctggctttgtgccgcattaaaaaattcccggtgctcagtcagttcgctacgctgtacatctcgtttatgcgcggcacgccgctgctcgtgcagctgtttctgtcgtactacggcagaccggcggccagaccatgcgccgcatcattctgccgcaggcaatgatcgttgccatcccaaaccccggcaacagcctcatcagcctgctcaagtctacctcgctcgcgtttaccatcggcgtgatggacatgctgggcaaggcaaaggtcgtcgcgggcaacaatatgcgctattttgaggtatatatcggtctggcgcttctgtactggccgatgtgcatcctgatcgagttcgccgtacacaagctggaaaaacgtttcaattttctacaatctcggcagcctgctcatggagtttgaggcgggcgagtccatcattgccccggaaatgtacgaggcgtatggctatggtgcggacagccgtccgtccgatctgcattccaatcgtgctaaggacaaaaacggcagcttcatcggttttaacgcagagcgccgattctcggagaactgcctgctccagatcgacaggaatgaggatggcagcgtaacgtatggccttattccgatcgatttgaccatggagaacgagcgtgcgctggagcgcggcctgccgaaaatcgcatccatcgaagtggctgagctgattatagagcatatgacggcatacagcgcactgtatggcacgaagctgacttacgataaggaaagcggtctcatctgcatcgcttaatctgaggacagcacgatgctgtataaaaacgaaattgctgaacaagtaaagcaaaagagggtatccaaacggataccctctggtttttgtgtaaattcgcaatgcgggcttgcctgctgcgcgccttgcaacactgttctcatgcctttaggcggggaatcacgcgcaatacacaagataaggaaaatagaggatcaatgcaagaccgctgccgataatagtgaacggcgtatcccaagagcctcctgacgtatatgaatgccgagagtttattctgtgggacgaatggcttgcgggggatttgtgcatttcatcaaaggcctgcttgcagtgcacatatccgtcgatgcctttaccgtaaaatccgtaatcctccttgataatctgacttgtgtttgcttgcctttggcattataatagcgctgtagagagaatttgtaaagtaagtataataatatgcggtagttactaaaaagaaactaataggagactgtcatggaagatagagaaatcaaaatgctgccggcctgcccggtggagactacgctgacgctcatcagcgataagtggaaggtactcattctgcgagacctgatgacgggaacgaagcggttcggagagctgaaaaagtcgattggccacgtttctcaaaaggtactgacaacgcaactccgtcagatggaggcgagcggcctgctcagtcgaaaggtctacgcagaggttccgccgcgcgtggaatatacgctgacagaactgggatgcagtctgaagcctgttatggatgccatgtgggagtggggagcagggtatcagaaacgacagaaggcggaaggtctagtgctgacagacaactgaacatcgcatcgctaaataagaacatcgcatcagaggcagtatcgggatagctgaggagacttctgccgcgtgagaagaaccgattatcatggatataagacccgctcgtttcggattcagacgagcgggtcttgtgcataaaaattcacctgcgtggaaaactgaaatgaaagcacctgggaatatatattagaaagcccagaaaggagagtttttatgcagggtacagagcaaatgaaaaaacggatggcagaaatgatctggcttcagtacttcaacgagaagctgtttgagcagaagaagatcgatgagactgccagaaacaaactccggctggcaatcttggccgacggacgaaaggcatagcagagtgcttcggcactcggttgagactgtcgaaaaactccgttttccgacaatctgtgttttgacttcgcaaaacacggacgtccgaaggttctcatacggaaactttctccctctggacttgttcgtcagaattcacaaatattcgttccgtttctattgtttcctacaaagttaatcctcctgagcagatttgtcttgtcattcattaagtcaggatatattatcggaatatagtaatatttctattcgtttcctgcacaaatgattctaaaatcataaatattagaaagaggaggtcttccttatgagaaaactccggcattttattgcactcgtcttgaccgtgtctttactatgttatgttctcattccgataaaggcctccgcttatcatgatacacaggggcactgggcctcgaccgcgattgaacgctggacgaaatacggcgttgtacagggcgatggaacctcttttcgtccggatgcccggatttccagtggagaaattgcagccattctttccagagtcctggattttaatacattcagcacagaaaacgatgcattctggtacgatccatacatcaggaaatgtgtatccgagcgcatttcaattcctcaagatcgaacttgtatttcacggcaggatgcaatgattgcgctgtcgcaggctctgagcgttgctgaatccgatcggtcggcgctttccttatattcagatgccgaccgagtaagtgatgacgcggtttcctatgttgccggactgatctcctccggcatcgtgaacggaattactcccactctgattgcgccggagaaatccgtcacccgtgccgaactgcttacgatgctcgaccgagccattatccaggtcatctcatcacccggaacttatgagcttgctgctcaagacgggatcatactgatttcgtccggagatgtgatcgtatccggcaaaacaccggcagcgatcctcattacaagcggtgcagacggcggagtgattacttttcaagatgcgtccgtcaccggacgctttaccgtgcgtgccaataacaccctgattgttaacgataattccgagcttccggagattggatttttcggatggggcagccggttggaagtgctgccggttgaaatcccgcccgtcctgcctgctgtttccggaaaaccaaaatacgaacccgtatataaggcattgaatgtctcagagccgcgagacatagacggcggtgtttacagctatgtcatgatcgaaagcgacctcggcgacggagaggtcacgctcagaaatattactatcaatgatgatctgcttattcagggaggcggatcaaattcgatccatctcgtaaactgtacggtgaagggcaaggtgaggatggagaaaagcggaggcgagccgccccgcctttgcttatccaacacgccgatttccatgattacaaccgcaaatcctgctattatcgaagccgcagatgctgattccgtaatacagaaggtacaatcgcgcagcgatctcacgatacagggggcagaaaccgtaatcgaaagtctgacgattgccgacgcagatcaggaagtctcccttcatttcagcgccggccatgtcaagcagctgcaaacacattcgtcagtgcagatcatcaacgagaatacggtaatagacagtctttatgccggtggcagattgacgctcgaaaagggtgatttcccgagcgtctgtgtacccgcagggactcaggcagaagtgattctggacgaaggccggatcggttgtattgaaataaacggaaatgcgaagctacgcggagagtatgacacagttactgcacgcggcagcctttctttgcaggaggggagcatcaagaagctctatacgcctgccggtagcggaaatgctgtcgcagtaacggttgcaccgaatacatggatctccgaagcagaaatcaatcggctgaccgcattcgatgtgagcggctcggttgcacatgtttcggcatattctgatgtaaccttaatgcgtggccgactgccgaaggtggaaattttctctaaaacatctgatgatattcacctgacgattatcgacgatgcagaaatcgagcagacagttctcaatacttccaataaaatcattcttcatggggaggaaaacacggtctttgttgcggcagatcagaccgttccccggattgagcagaaagacgctttgcccgcaaaacatatccatatttactccaatcaaataacgacacagcccgcaacctgtacgcaggccggtacgctgagcgcaaagtgcatccaatgcggttacgttttatcaagtgaaatcgcagctacgggccattgctgggataacggctgtatcattgatcccccagcggtcaagcatgaaggcgtaaagcagtttacctgtctgaactgcgcgcagacccgaacagaatcgattccggcgctttctcccgatgaaagcgagaagaaacccgctttttcgatcagcaacattcatttttcaaacgaaaacggcgctttgtatctcgtctgggatgcagcctatggcggctccggctctgccggcgcttatttctccgtggagatgaaacaggaagacggaagctggaaaacgatcacctccttgctatactcacgcagatgttcacttctctggaccaccgcggatcgcgtgcattataccgctgctcgaattaaaatgtacgctaatcgtcagctgatcaccgaagcagaacaggagatttcgtttgatatcaatacaacggctctgatgaatgatatcggcgtttgcttcagacaatatcaagataccgtccgcgcaaccgttcggaatgcggtgagtggacgaacctgtcgtctggatatcatgaccaatccaatagaacagcgcacctttgtacccgacgctgatggcaacgcctatgtcgacctgaactgcaatctcgatgcactcagggaggcgcagtatcagctgttgagctttgtttcgtctgcaagcagggacagtgctgctctgactattgagagaacagcatggagcaactgtacggatgctttttcagaaaatcacgagctttcgtatgctgttgatgaaaaccatatgctgatacttcagaccgatatcgataatatcgatgaatgtgttctgatgctcaacagcgcagaagatgcaaaaaatctcagaatcgaactgaaagacggcttaaccttgacggaacggctgctttcccagccaaatgcgtattacacatccgcttcactgctgcgaccggcagacgataaggaaaatgttctcgcacacagcaatcagattttgaatgtgtccggttctttgccgccaatcgagataacaggtgcggaacgcctggaatcaggaaggctgtctattcacatcagcggtaatcctgatgcaaaatactgttactttttgcgcgcgaatgatcaatatctgcctcttgaggccgaacaggatcagctgacgtgcatgactgacctcgaccttgacggtcagagaattgatgtaatccgtacacaggttttgaaatctggtgatgtgttcacgctctactgctcggcgcgcgatgatgggtttaaattcccggaaaaggagacaggaccagacatcaaggagccggagaaagatccggaaaaagaaccgggcaaggataaccctagtccgacagatgaaattttcattgagcagattcaaaaaggcggtgaagtccgtttgaccgctccggttacaataacagacaacagcaataacatcaacctcgaaaagaatgtaacccttgatctgaacgggcagacactcgatttgtcagcaatctccctgtgggtcccggagggcgtttcgttgacggtaaaggacagcgagggaggcagcgaaattcaaagctccgtctctattatttataatcaaggcggcatcgtacgcatcgaaggcggtgctctgtccatatccgacagtgacagcagcagttgcgcactgcaccagcaaagtggagaaatgaccataaccggcggtacatttaccggtactgccaattcggccgcgcttgctgcaatgggcggaacgatcaggatcgaggacggaatattcgaaggtcccgtcgcaatacgcgctttttcaaaggcgaagatcaccatgaccggcggagaacttcgcggatcggttgttcagaaaggatcttccgagattatcatcggtgaaaatgtgcttaagactgcatagctgcgaaaaaatacaagccacaggtattcacctgtggcttgtatttttcgcactgtcatatgctgacgccgttgacaattttgaaagcatgtgcacgatttccagtcaggcaatcggtaagattatggcagctcatgcgctgtaatgcctcgatcgagcgagcactgtagaatgctgcatgcggagtaaggattacattttcacgaccgatgagcgcacagttttccaaatccggtttttctgcttcgaggacatccagtcctgccgcacgaatcagtccgttatccaatgcgcgaaccagcgctgcctcatcgacgctgccgcctctcgaaacattgagaaaaatcggatgcttctccatagctgcaaagcctgcgtcatcgaagaaatgccggttctctgcggtcagattcatgtgattgctgatcacatcggactcacgcagcagtgtttttgcatctgtgatggtagcaccaagttctgaggcctgctgctcgtcagcatgtggatcaaccgcaagcacgcgcatcccgaatccccgcgctctccgggcaactgcgcggccgattttaccgaatccgaacaatccaagcgtactgctatttaaccccatcggtttggaggccatataatacttccagcagtgctcactgtcaacggtacggatgtaggttttaagcctgcggtccagcgcgagcatgagcgccatagtatggtcagcgacctcctgtgtgcagtattctccgattgcgcatgaaggagtcaatgtccttatagctgtcggcatccgccttgcgaaccatgatgcgctgctcggccttcagataaacatcggagaagtccatattctgcttgcgttcctcaagggggggacatgcctgcgagcataatatcaacctgatcggcagcgaccgctgcaaggtttgcggtaaaggtggtatcctcgaccttcttcttcacctcaacaccgagtttgtcgctcagcttctcgatgagcttgtcgccgagcgccatatcaacgccgattacatcctgatttgcgctcgaaatatcaacgaactcatacggcatatagccggaagccgtcgcaattaccatttcgccggactccttgatacgggtcagtaccggacccagatcggaagcatcagccgaagcagagactgcctgcgtatctgcggaagtatcagctgcggcggtgtccttgctgccgcaggccgtcaggacagaggccatgcttgctgcggcaagcagcagggaaagcgtgcgttttacggtggttttcatatgagtgtcctccttttgaatgtgaaacggttgagagtgcgtttctatcattaaatataatgataacaaattgaattgatttaccgatccgcttttttgaagtgcttttccattgcatgtacgccgcgtccaacggtaaacgtcatcacgaagtacaggaatgcaattacaataagcggagtgaatacacggccgttcgaactgatggtattaaaggtaaacatcagctctgcaacaccaatgaccatgacctgcgaggaggcctggataaggtttgtaaattcgttgccgaagttcgggagaatattctttactgcttgcggcacaacgatcatcatcattgaacgaaccgggccgaaaccgatcgagcgcgcggcctccatctgtccgggatcgaccgactcaatgccggaacggatgatctcgcagatataaccgccggaattgatcgtcagtgcaataatgccgtacataacacgattgcctgcgctgccgagaaaggccggaaccggaggctcaatgccgatcatcggcaggccgtaatacacgagcatgatctgtaccagcaccggcgtgcctcgcacgaattcaatccatcctgctcatgcgaaggaagcacaggccgccgccaaccagaatgctcagcacgcctgcaatcgtctttaataccttgccaagaaaattcaccaggcgctcactctgcggatggtcgaacagcatttccggcgttccggattcctgaataataccgtctgccatgaatacgaccttgcttgcaacctctcgtgcaaagcccatctcatgcgtaacgataatcatcatcatgccatcctttgcaagatccttcatgacttcaagcacctcgccgccgaccatttcaggatcgagcgccgaagtcggctcgtcgaaaagaatgacatccggctccattgcaagtgtgcgtgcaatcgcgatgcgctgcttctgaccgccggaaagctgactggggtacgcgtcccgtttatcggacaggcccacctgtctgaggagtttttccgcaagtgcattcgtctcagcagtcggcatcttgcgcatcttgcgcggtccgagcgtgatgttttcgagcacggtcagatggggaaacagattgaaatgctgaaagaccatgccgatacgctgccgtacctttgctggcggcaggtgttgcgaagctctccattcaccgcggcgacaaggggaaatgtgccgttgcgcgcatgagtgcgatgtactcgaactgcggcttcatggcgtttccgctcatttctgcggtgcttggagaaatcggcgttttttacggcagtgcatttgtcggtatgttcaatctattcctctggacgcagggacgtgcgcttctgctgggactgtttcatgctctgtgcatcctgtccgtccgctgcgagcagcgtgctcatgaccgcacctctgggtatggactcggtctacggctcacgtattattttcatgacaagcattttatctgtttttacgatcccaatgcttgcgcttgtgaccagtgtaatcttactgtaattgacaaaatgcttgcaggaatgtatactgtgtgcatagacgaactacggcaggtgaaacagcatggcactgaaaaatttaaaaaaggatccatctctgacggataaggcgtacagcgcaattaaaagcgcgattatgagtaatgaattaactcccggcaccgttctggcggaggaaaacctcgcctcgcagctcggcatcagccgcacaccgctacgtgcagcgttgcagcgtctgcagcatgaggagatcgtgatgcagaacggaaaaaacatggtcgtagccgaggtaacggaacgggatgtacgcgatatctctgttgtgcgcatacagctggagccgcttgccatccatctgctgtcgcagaacggcggcattacagccaaacagctcgaccgcctgtatctttgcggcgaaaagcagctgtatgccttgcggagcggagacagtgaggcttttctcgatcaggatgcgctgtttcacgtttctctcgcacagctgaccggaaacagctttctcacggatctggtcatcaaaagcaatgaaaccatccgccgctttcatacgctttccggttcgctgtcgttccatgcagaggaagctgtgcaggaacataccgtcgtgctcgattatctgcgcgacggccgctttgatctcgcagagcaggcgcttcgttcgcatcttgagcaggtgcagcagcgcatgtttgcgaaataacgtaattgatcaggtaatttgattttttcagttgcagtccgcacaaaaatgcggtatactgtaatcattagaaaacaataaaatgataggaatacggtaagcgccgtacttccatatctctcaaacaacaggaggtttaactcatggctattacgaaaaagactacgatcggcgaggttctcaacctcaacatcgagaccgcaaagttcttcatggaaatcggcatgcactgcctgggctgcccggcatctcagggcgaaagcattgaagaggcttgcatggtacacggtacgaatgcagacgagctggttgccaaactcaacgccttcattggtgagtaagaggaaagacacgagtcggcggtgtattctgccggctctgtttttttaggttatggaaagtatgattttaacaccgcgccttgcctgtattgcagcactcgtgccgcagggcgcgcggcttgccgatgttggaaccgaccacggcaagctcccgatcaccctgctgatagaagggcgtatcgcgcatgcgatcggttcagatctgcgcgaaggcccgctcgatcatgcggcgcgaaacgccgaggagcatggcgtcatcctgccgctgcggctcgctgccggtctggatggcatttctcccgaagaatgtgacacagtaacgatcgcgggcatgggtggtcagacgattgctgagatattgcagaatgctccatggacggccgacggagatcacctgctgctgcttcagccaatgaccatgatatatgagcttcgtcaatggctgtgggcgcatggctatgcgatcgagcgagaaacactgtgcagagaggatcggcggcattatgtcatcctgtctgtacgcggtggcgcgaaagaatgcctgtatccgcgtgaaaaatgcgcagtttctcccgcgctgatcgccgcgccggatgccggagcttatctgcgccatctgatcgagcgggaaactcgcgcattaaacggcatggagcggagcgaaaacacagatatcgcgaagcttcgcagtcagcaggcgcttgtccgcgagctgaccgctgcactggagggattgaaatgataactgtatctgatgtacttgattttctggagggctttgcacctccggagcttgctgaaagctgggataatgtaggtctgctgtgcggcgaccggagatccgaagtcacgagtgtgctctgcgcactcgacgcaaccgagactgtcgtacaggaggcaatcgaccgcggtgcacagcttgtcgttgcgcatcatccggcgatcttcacatcggtcagtcgtgttacgagcgatgacgcgaccggccgaatcctgcgcctcgccatccgccatgatatttcgatcatctgcatgcatacgaacgcggactgcgcgttcggcggcgtgaacgacgccttggcctccgcacttttcctgacaaatgtcgtgaacatggaagcaggggagaacggtatgctcggccgaacaggtgatctgccgcgtgaaatgcagccgcatgaatttgcgctctacgttaaggaatgcctgcgcgccggcggtgtccgcttctgtgacgcgggaaaaccgattcaccgcgtagcagtcggcggcggcgcctgcggcaagatgatggacagtgcgatcgcaaagggggctgacgcttttgtaattggtgactgctcgtatgatctgatgcagcgtgcgcagtcactcggtctgacgcttgttgacgccggacactttccgacggaaaatccggttgcggcagtgttcgccgacaaaatcagcgaagccttttcccagctgacttctgtcgtttccgaacgtcatgctgactgtattcaatttgtttaaggaagataaaaatgccattagacgcaatctgcctcggagcagtaaccaacgaactcaataccgtactgaccggctgtcgtatagagaaagtatatcagcccgatcgcgatgaaatcgttattcagacacgcggacaaggcggtgcgcgccgtcttttagtctctattgcagccggtacgccgcgtgtgcactttatcgagaccgcacgtgaaaatcctgccgttccgccgatgttctgcatgttgctgcgcaagcatgtgcagggagcaaaaatcgccgcagtaacgcagcctgcggtcgaacgaatgctgagcatcgagctcgatacaacagatgaaatgggtgttgcctgcaaaaaacatctgatctgtgaattgatgggcaagcattccaacgttgttctatgcggcgaggataatcgtattatcgacgcaatgcgccgcgtggacggtgacctgtccggaaagcgacaggtgctgcccggcctgttttaccgtatgccgcccgcacaggacaagcacgatccgtttgccgtttccggtgttggacttgcggccgctgccgcacaggcggatggtgagcagacgctcgaccgctttctgctgaatacgctgctcggattttctccgctgctctgccgcgagcttgccttccgtgcaacaggcgatactgcaaaaccgctcggcacgctgagtgacgaagagagaaatcgccttgcaaaggtatatgatgattttctcgcttatattgaggaaaaaagatggaagccgtttcttctgacaaaaagcgaggacagcgctgtctttgatttcacatttctgccggtcacacagtatgaaggcctcatgaatgtgacgcagtatgagagcttttcgtctctcctcgctgcattttttgagaaaaagggaagggtagagcgcatgacgcgccgctcgtccgatcttcacaaggcggtagtcaatgcgcgcgaccggctcgcccgtaagctttccgcacagaagaaagagctagccggcgcccatgaccgtgaaaaatacaaacgcacgggtgaactgattacagcaaacctttatcagctcgaaaaaggcatgaacaaggcaaaggttatcgactactacaataaagactgtccggaagtagaaatatctcttgatgttcggctgacgcctcagcagaacgcgcagaaatatttcaaactctataccaagtccaaaactgcggaagaggtattgaccgaacagatcagacagggaagtatcgagcttgattatcttgaaagcgtactcgttcagcttggtgaagcagaaaccgaacgtgatctggcgcagcttcgcgaggaactgacgctgtccggtgttctttctgcgaaacaaacacgaaataaaaaaggccggcaaaagccggcacaggcaaagccgttccattatcggacaaccgatggttttgatattttcgcaggtaaaaacaaccttcaaaacgatcttcttacccttaaaattgcgttcaagagtgatatctggttccacacgcaaaagatacacgggtctcatgtcatacttgtaacagacggcagggaaccgacggagcaggctatgacggaagcagctatgattgcagcttaccattccaaggctcgttcgtcctctatggtaccagtcgattatacgcaggttcgccaggttaaaaagccggcaggtgcgaaaccgggcatggtaatttatcatgtttaccaaaccgcttatgtaacgcccgacgaaaccgtaatcgagaaactcagaatcgaataatatcagccgatactgccgcccggccatcagaaacagatatgtgaccggattggggttgtgtttgcggctggcacggcttgttccaagccagccgcatcatttatcaaggattgctgttacgccaaaattcttatatttttctattgacattcactcgatactatggtattataattaagtcgctgatacatattagatgacaacaataatatatggaaggtttcccgagtggccaaagggaacagactgtaaatctgtcgtctatgacttcggtggttcgaatccaccaccttccaccataaaagcacttcgtttgaagtgcttttttctttgtgatggttcgaatcgatatgactataatttaacgtagaaattgttcaggctgttaaaagggcttgttgtctgtgaattgcaggcggcaggcccttttgctttgccttgattcttcggtaaccgaactcatcaaagaatgccgcagcagcggattaccggttaaaatgtggtgccagcaggctcaaattacaccgagcacttattatcaacgggagcggaacgtgccggcaagtgccgaaactgcgagaaaacggatgttgaagcacctgcttatcataggctgccgaatgttacgcaggctgtctgctgggcacacgcgcggcggaaattcgatgaggcggtgaagtcacagcccaaaggcaaggctgggaatggttcagcatcacagggactgggacccgtcccggcgttgcgcttccgtcatcgtgtgagaacacgcaaacagccgtagacggcgcgtaacgcttgcgaggatgaaaggcaaagcgccggtacggcggattgcctaaaaaccgcacagcacgctctacggtggcgtaacggcaggcgtgcgggcaggggatagcgccgggcacgtttgatatacgcgctctaatgacagaaaggagaacgttatgtggcgattgatattccggtggcgcgatctcggctccgcctggtgaaagaccagcgcaagtacacactgatgaagtacagtaatgaaaatatgacggaatatcttggtgtacgatcttcgcacggacaagtgaagctttataacaaagcgttagagcgcggacttgaaagcgatctaacacgtttggagataactgttgattatgaacggtgcagctggggtgagtttaagcggctgttcccggtggtgctggataacggttcgcagctgccggacgatctgaccggaagggattacgttttgtgtatggcctgcttggagcatccggagtatttgcagcatttgccgtataaaaagcgcaaaaaaattgagcagttgctcgcgacaactgcccaaaacgttcaacctgatgaactatcttacaaggatattttagcacagattttgtactatggcaaggatataaaaccggaaatgtgggcagattttcacgaaattgacgcagaaattccggaagaatggacaaaaaagaaaacgaaaatgttcgatgaaatacaatcctacggacagtatcagatttagcgtgaacttgaacaaaattgttattttgcatacattagcgccgcatatggtctatgcagacgttggagcgcagcgagggcagcgtaccggctgcgttcgctcgcgaaaacgtctgcataggtaattatacaaaataaaagttttgtataattgggggggg

SEQ ID NO: 12949 - DNA, 87398 bp, Unknown
  gut microbiota DNA sequence
ctcgcacaacaacatctgcaagactttttgtactgtttgctgcgttttctggtacaaatgaaataccggcaacccgaagcatcggatcgtcattcgaactgtcaccgatagctaatacatttttacgcttaatcccaagcatatcagcgattttcaaaagagatgatcctttgttaacattcgcagcagtaatctcccaaaaattcggtgtacttgccgcgatgcagaactcattttcataacgcgacaggaactgtcgaacgtcagccatgatcggctccgggccggtcaaattgatcttacaccagcccgaagtatctggcagttcgcaatcagacaccatatcgtatttgagattgagaacgcgcatatgatgttcggttactgcactcatccggcgtacatgaattttttctccttcaaatatttcgcagcctaattgtgaaaattttgacaaagcggcatccatcagctccactgttttttgaggcattccggcacaccacattatattttggctggaatccataatcagtgagccattcaaatgagtgtatggtgcattgaacggcaacagcgagcgatatatatctatcgctcgcggcgcgcgccctgttgcgagcgaaaaacagcctccgtttttgacaaaataccatattgcctcttggtttttcgcagatatctgttttctgctgtccagcagtgtcccgtccatatcgcagccgagcagcagcccatcaaattttttcattgcattctctccagcttttgcagaatttccacaaagtaatcaggcagcgctgctgaaaacgtcatccgctcccctgttttcgggtgtgttagcgttagctctgcggcgtgcagacattgtcccccaatatcggaaaacctgtcttttttcaatccgtacacaggatcaccgataatcggatgtccgatcgaggccatatgcacgcgaatttgatgtgtacgcccggtttcaagctgaaatgccatatgcgtatagccacggtatcgtttcagcacagtataatgtgtgattgcttctcttccgccctcaacaatggccatgcgcttgcgatcggttttatgtcgtgcgatcggcttgtcaaccgttccgctgtcctcgcgagggcttccaactacgatcgcttcatagccgcgatacgcagtatgtgccgcaatctgtgcggcaagactatgatgagcgctgtcgtttttggcaacgacaagcagtccgctggtgtctttgtcgatgcgatgaacaatgccgggacgatgctcgccgttaatgccggaaaggctttcaccgcagtgaaacataagcgcattcacaagcgtgccggaccagtttccgactgccggatgcacgaccatgccgcgcggtttattcaccacaacgatgtcctcatcctcatagacgatatccagcggaatatcttcggctgcaaggtcaacctcacgcagctccggcataatgacagtaagaacctctccgccagcgagcttgtaattctttttgacagattttccatcagcatttaccgcctgctccgagagcagattttgtacagcagaacgtgtcaggccgtctatatgctcggacagccagctgtcaatacgcttgcctgcgtcctcatgcggtacggttagcttcatctcattcattgtcgttcaccgcttcgtttttatcattcggcttatccttatgttgaaacataaaataaataacaaacaatacgccgccgacgcagataaagatatccgcaacgttaaacacggggaaatgaataagacgaaaatcaaacatgtcaactacaaagcctcttgcaacgcggtcaacggcattgccgaccgcgcctgctgcaatcagaacaagggaccagctgcccagcgctgtctgcatcagttttttcgaaagtgcgtaacagattgcaagcgtaataaccgctgcgagtgcaacaaaaatccaacgtgaatcaaatttcgcaaacatgctgaacgctgctccgcggttttcgatataggtcagatgaaaaacgttctcgatgagcggaatagtatgctgcggctgaagcacagtaaacgcccagtgctttaccacttgatcaaccacgatcatgacaagaattgccgcaatatataaaggcatgaaaaactctcctatcagctaaaaaggagggaacagaaagacctgttcccccccttcccttttatttattgtttcagccgacgaccttagcgcagcgtgcgcacagagccggatgagcagcatccgaaccgacggacttcgcctgcttccagcagcgcaggcacttctcgcctgctgcgcggacgacagaaatcgtcaggcccggcagttcctcacttgcgaggccttcgccttcgcctgcaacaacatccatttcagaaacgatgcacaggtcagccagatcctggccgcagccgttcatgaatgcagcagtatcagcatccgtataaacggttacatgagcctcaagcggcttgccgatcgtcttggcgttgcgagcaccttccagcgccttgttcacatcatcgcggaacgcgatcagcttattccacttttccgtctccgcctcatcaaatgcaaacgcatcatcagcctgcggcatctcattatatgcaacgttgcgtacatcgtcctccgctgcatgcggcatagcctgccagatctcatctgcggtgaagcagaggatcggagagagcatgcgaaccagagcgctcaggatacgatagatcgtggtctgagcagcacggcggcttgcacctgccgtctcgtcgcagtacagacggtccttgataacgtcgagatagaagttcgacatatcaacgacgcagaagttatgaattgcgtggaaaacggtgtggaactcgtagctgtcgtaaccctcgcgtacctttgcggtcagttcattcagcttcatcagcgcccacttgtccagatcggtcaggtcagcataagcgactgtatcggtcttgggatcgaaatcagcgaggttgcccagaatatagcgggccgtgttgcggatcttcagatagttctgagagagatgcttgagcatatccttggagatacgcatatcctgacggtagtccgaagaggcaacccacaggcgcataacatcagcgccgtactgtttgagaatgtcctccggggcaatgccgttgccgagcgacttggacatcttctggcgctcctcatcaacgatcatgccatgcgtaatgaccgtcttatacggcgccttgccctgcgttgcgatagaggtcagcatagaggactggaaccagccgcgatactggtcattgccttccagatatacgtcgaccggagtcttttgaccctcacggttttcaatgactgcgcgccaggacgaaccggagtcgaaccatacgtccatggtatcggtttccttgtcgaaatcggcgcagccgcactcgcacttgatgccttccggcaggatctcagcagcggacatatcgaaccatgcgttggaacccttctcgcggaacaggtcagcgactgccttgatggtctgctcgttaacaagcggcttgccgcacttcttgcaggtaaaaatcggaatcggaacaccccagacacgctggcgggaaatgcaccagtccgaacgttcgcgaatcatggaagtcattcgttcctgaccccagcccgggatccacttgatatcctcgcaggcattgacagcatcgtccttgagagcgtcaaccgagcagaaccactgctccgtggtacggaagataatcgggttcttgcagcgccagcagtgcggatagctgtgaacgatatcctcggttgcgaggagtgcgccgcagtcattgagatccttgagaataacctcattggagtcctctacgaacatgccctcatacttgcccgcttcagccgtatgacggcccttgccgtcaaccggaacaatgatcggaattttatacttctggcaaacgataaagtcatcggcaccaaagcccggagcggtatgaacacagccggtaccggcatcgagcgttacatgctcaccgacgataacgagcgactcgcggtcatacagcggatgctttgtcttgatcatttccagatcagagccaaggcaggttgcgagaacttcccactcggagatgcctgcggtcttcatgacggacgcgacaagctccttcgccatgacataaatctcgccggacggaaccttaacgaaatcatactcgaagaacggattaagggaaatcgccaggttgcccggaatcgtccatgtcgtggtcgtccagatgacgaagtaaacgttctccttgctgccaagcagttttgtgattacgcccttgtcatcggttactgcgaacttgacaaaaatggacttgcacggaatatccttatactcgatctcggcctcagccaaagcagtctcatcatgcgggcaccagtaaaccggcttctgacccttgtagatgtagcccttctttgccatttcgccaaagatctcgatctgagccgcttcgtaatcgtgagtcagggtcagatacggacgatcccagtcaccgataacgcccagacgcttgaactgctcgcgctgcgtgttaacgtgatcgtgagcaaactcttcgcacttggagcggaactcagcaacggaaaccttgctgcggtccatgccgtatgccttgattgcctgacgctcgatcggcagaccgtgcgtatcccagcccggaatatacggcgcctgataacccatcatattacgcgaacgcagaataaagtccttgaggatcttattgagtgcgtgacccatatgcaggtttccgtttgcatacggagggccgtcatgcagaacgaaaagcggcttgccttcgttcttcttcatcagctcgtgatacagatctgcatgctcccagttttccaggaaacccggctcgcgcttgggaagacccgcacgcatcgggaaatctgtttttggcagattgattgtattgttataatcctgctgcattggcagtattcattcctttcagttatgacttgaagcggctgttgcagccgctcttatttcgtttttttcggatcgtagtctgcgccaaacttcagctcaccgaaatcaaacttgcgagtggagtcctcagccggagcatccgccttgacagcagctgcattcttttcatcggccgcaggctttgcgatttttgtggtcttgtcatcgacctttgcttcctgagtctgtgcaggctgcaccagcttctctgcctttgcaagctcgacaagggccttagcctgagcctgatatgccgccgaaacacgcgcaacaaactcgaccgtactcttgcgggccgcctcaagcttgcgtgcctcaagctcgatttcgcttctggtatcctgtaccttgctttcggtttcggtctttgcggcggcaataatgtcttcggcttccttctttgccttgtcgatcgtatcctgtgcgatcgactgagcagacatcagggtgcggcgcattccgtcctcaacaccgcggtactcctcgatcttgtcaaccagaaccttcatctttgctttcagagaagcgttttccttctgcatggcagcgaactcctctgcgacgcgctcgagaaaggtatcgaccgatttcatatcgtatccgccgaaaacagccttttcaaagccgatctcttgaatttcctgcaccgtcatagtctttcctccgtaaaaatgtttgttttgcccgatgcacgggaaaatggccgggcattgcccgaccacccgcatgtttctttttgcaggcatcacagcatataaacaacctgttccagaacaatgatcgtgaaaaatgccagcatgaacgggatgtcaagcggacatctcctgaaagcgtcaatccggctcacaagactccgaaacggctgaatcagcggttcggtaagcatacaaagaaactcatacagtctggagccgccggcctgagagaaccagctgagtatcgctctggcaaagagcagaaactcaagaatgcgcagcagattgccgacaatatatgaagctatcatgttcacagcagcagcccttagaaatacataccgctgctctcaagctcatcgatcaaatcgcccataatgtccacattgtagggcgtgatgatatatgtgctgtttgcaacctttttgatcttgccttcattcgcatatgcaacaccgctcagaaaatccaccagacgacgcgcgatatccttgtttgtctgctccagattgaggaccaccgtgcgcttgtccttcagatgatctgcaatttcagccgcctgttcaaagcgatcaggcttgacaagaaccactgcaagcttgctggtcgtgttgatgctgacgaccttattatcccgcaggctctcatggcgcggctgcgaaacagtgttctccacagtggcactgctatacgagtgatcgtacgaacggttttcgtacgatgaaggcacactatttattgcaggttcttcgctgcgcggctgccgggacatctcctcatcgtaatcgtcctcagcatccccgcccttgacccaatcaagaaagcttttgatcgaacccatgtaagttcctccttatattttaaggcgaaacgatctgataaggccgtgcgccaaagatcgccgtgccgatgcgaaccatgtttgcaccgcacgcaatcgccgtttcaaaatcatttgtcattcccatcgacaaataatccatatctacattatcgtatttttttgtcaaaatgtcaacaaatacttgtcgcatttcattgaaatagcgcaagtttttcgtttctgcatcggctaccggcggaattgccatcaatccgcgtatatgaagcgacggttttgcgcgcaaagtgtcgattgcatccagcagttcgtccgggtcaatgccgctcttggcctgctctctgccaatgttgacctcgagcagaatatcctggcggatgccatgctttgcggcctcttttgcgatcgcttcgcccagatgaaccgaaccgaccgactggatcagagagaccttgccgaccagaaacttcaccttattggtctggagcgtgccgataaactgcaggtccgctccttcataagcgttctgttcatacttttcaagcagctcctgcacacggttttcgccgcacacctcgatgcccgcgcgaatcgcttcctggacgcgttccgtatcattcatcttgctcgcggcaaccagtatgatgtcttccggcttttttcctgctttttccgctgcgcgtgctacccgttcctttacctgagcgatgcgttcatgcagctcatttctttcttgttctgtcatgttttcaccaccgtattatcctttagatctgttcctcggacaatgacctgatcctgttcgaccagcatatccgaatcggttgcactctgctcgacgatatagctgtcatcggtctcatacaacttattgatcaccttgaatttgcgtaccgagccgctgagaatgaacacacccgtgtccttatgcttctcaccattgctgtccgtccattcctccacgcgcagtgcgctcttgggaacgctcaggccggtgtacgatgcaatgatgatttcgaccggctgctgacgcatggaaaccatcccgctgttgaaatcagtgccttccagcacgagcaaagctgtatcatcatcatgctcccagttaaccgcatacacggttaccgggctcgtgagagatgcctgagtaaaattgaccttaagctcctgaccgatctgcagccgttccgcctgtttcgccggaatttcgcaggccagataccagctgaagccctgcaccatcttgccgagcgttgagctgctgtgacgtgtttcgggtgccttggatgtcagttcacgaaagcgcgcaaccgtcaggcccgaaagcgatgccggcttgagcgtgtcttcaaagccatctacgatctcggaaaaatatccggagcagggcgcctttaattcagcggttcgaccggacagactctgctgcaggctgtcgcgctgcgcgctcagagaatcccgctccgcacggatagaggcggagtccagctgatccgcagcgcggcgcagagaaagcgttcgcagggatgcagacgaagaagtaagcacgctgcccgagccttccttggtctcggcggcaaggttctgaatcgccagcgtaatctgctggtcgatcttcgctgtgtccgaactgtcgtttgcggtctgaagcgcagtatcgagctgactgatccggtcatcgagcggatccagctgccggctgagctccagcgcttcatcatcaccgtacacaaccgcaagcggcgcatttttctgcacacgctcaccgctgtatacgatatgcttgacggactcaccgccgcccttgatcgtgatttcatcgcgaacgaaccatccgtccgcagtgaagctgtcattcaccgtgacgcgcatagccggtgtcgtttccggcgctgccgaaaaaatacccaaaaagctgcgtccgatatacagcagcacgactgctgcaatcatcataaaaaccagatggctgcggtcacgtttctgctgccgtgccggttttgttttctgtttttgttccatgaagtgcctcgtaagtaatcaactgtccgcacgctcctctctcgctccgtacagatccaccggatgctgcggaatgatcgtggaaattgcatgcttgtagatcatctgctgtttcccttcgctttccagaataacgacaaagttatcaaatccgcggataattccccgcatttgaaagccgttcatcagaaaaaacgttgtattctgactctgctgacgcagagcagcaagcattctgtcctgcagattgatttcgtttcgcacaataatacctccgttgctgttgcagtttatggtatcattgtacaccgtgtttttgcagatattctgtcgaatgctgtaggacatctgcaaactcttcactcttattataatatatccagtggatgctgtcatcccttttcagccaggtaagctgcctttttgcataatttctgcttcggcgttttaacagctcgatacagctctcgagggtttcgctgccctccagatagccaaggagctccttgtagccgatcgcctgcgccgccgttcccgcaagaagtccattttcccaaagatatctggtctcatcgatcagcccgtcacgaatcatgtcgtcaacccggctgtcgattcgatgataaagcgtctgccgatctttcggacacagcccgagcttgattgcctgatatttcggctccggacgcttgtgcaggcggttcatttctccgattgtcatgcctgtctgctcgtatacctcgagcgcacggataacacgcttcagattattcggatgcagccgttctgcgctttccgggtcgacccctgcaaggcaggcatgcactgcttcgttcccctgctcacaagccatgatttcgtatttttttcgaacagagagatcggtctcgtcgcccgaaaaggtgctgcactcgatcagcgcgtccatataaagccccgtgccgccgacgacgacgggtatcatgctacgcgaaagaatatcctgagcagccgcatctgcgagttcgacataccgtgctaccgaaaatgcctctcccggttcgcacacatcaaatagatggtgtcggatgccctgcctttcttcaatggtcggctttgccgttccgatgtccatatatcggtacagctgcatggaatcagccgaaatgatctcggtatgcagttttttcgcaagtgcaacagaaagcgcagttttgccgcttgcggtcggtccgcagatgcagaccagtcgattatccatgaagtcagctccttgcctactggttaacacgtttgaacattttatccagttcatattttgtcagacgaacagtcgtcggcctgccatgcgggcaggatcgcacgttatcgtccgaaagcacacgatcacacagactttgcagctccagcatcgttgttgcttggcctgccttgatcgctgctttgcaagcgaccgtatgaatgaggtcatccaggcggtccggcactgttgtgcggctgttcattgctttctcggccagctcactgataacgctctggacgtcgccgctgtccagatacgccggtacgctgcgtacagcaaagctgttctcgccaaacgggtcgatagaaaatccggctttgcgaatattctccagctgcgcctgtactgctgccgcctcctcgccggtcagttcgaccacgaccggcgtcaaaagctgctgctgcggcatttctgtctcagcacggagcttattgaacagaattcgctcgtgagccgcatgtttgtcgatgagcagcagaccgtcttcatcctccgctatgatgtaggtgcggaagcactcgccgatgacgcgcgcaccgtgatcgatcggctcatataccggctgctcctccacagttctttgcggattcgtctgcgactgcggaatattgaccagattagcctcggatgccgtatcgtttgcatgttctgctgcttctttatccgcctgtggacgttcggcagggaaagccgcaatatcagccttcggttcgaccttttcctgcgtattcttcagctcactcggcaactgtacacggccgactgcgcgtgtcggatcgggtttaaagttcccgagcggcggcgcagacatatagaccggacgtacagtacgcggcggtacggataccagaaaatcctccagctccgcctcctcctctttcgagaccggctgtgtctgaaccggctgcgcaaacgagcgtgcagccggtgccggttcggaacgcggcacagcaaagcgctgctgttcctgcgtgagattgtcctcgcggggagtatgcttttccttgtgctcaagctgcggcgtattatcgttcgctgcaagtgcgttcttgcaggcaatgtagaccgcctcgaacaccggtttttcctgtgaaaacttgacttccgtctttgccggatgcacattgacatcaactgccgacagcggcagctccagaaaaattgcgccggacgggtattttcccgtaatgatggcatttcgatatgcctcttcaagcgccgcctgcatgatccggcttttgacatagcgcccgttgacgaaaaaatgctgcatggaacgattggcacgtcctgcgtgcggctttacaatataaccgtgaacagtcagtccgttatgttcgttttccgtaacctcgatcatatttgccgtcatttcttttccgaacaccgcgaacaccggcgtaatcagcttccccttgccgtccgttgaaaagacctgctttccgtcgcggatcagggtgaaagcaatttcagggtgcgacagtgcagcgtgctgcacaacgccaagcacatatccggcttctgtaaaatctttcttcaaaaacttcatgcgtgcaggggtgttatagaagagatctcgaacaacaatcgtcgtaccctccgggcagccggcctcctcgtttacctgtatctctccggcttccagatgcagatgaacgcctgcgattgcttccttccggcgcgtaaacagatcgattcgtgtgacggacgagatcgctgcaagagcttcaccgcgaaagccaagcgtgccgatcgcagcaagatcctcttcacttctaagcttgctggtcgcgtgacggcggaatgcgacaggtgcatcttccggcgccatgccgcagccgttatctgcgatacgaagataggtaatgccgccgttttcaatttcaactgtaatgcggtttgagccggcgtcgatcgcattctcgaccagctcctttgcaaccgaagccgggcgctccactacctcgcctgccgcaatcagatcggcaaggtgcgaggatagctctttaataattgccattataatttcctttccggaaaaatttcaaatgcggtcaaagcaataccgcttcatgtaacaggagcgatttgcgaacagattctgtgtgctggtgagaagcttttacagtcatttttgatgccgtgctgtgaaatcacagcacgggcagggtgcaaaacctccgcaaagcaccgcagtcttcgttatgcggaatcgctttaagagccgcgctcctgctctgcaagccgtttcagttcatacagagcgttcagcgcttcgatcggtgtcataacatccatctgaagacagcacaggcgtgcaacaacgccggtggcgatcatgtgtccaaaggacatctgatcatcctcttcctcctgctcttcaatcggatggatttcaatctgcggcatggtggactcaagttccttaagcaccgccttggcgcgcctgatcactgcgttcggtacacctgcgagcttggcaacctcaatgccgtagctgtcatcggcgccgccacgcacaatgcggcggagaaaggtgatatcatctccgcgttttttaaccgcaatattgtagtttttcactccatcaatcaggtcttccagcgctgtcagttcatgataatgcgtcgcaaacagagttcgtgcaccgatgcgccgcttattcgcaatgtactccacgacggcacgcgcaatgctcatgccgtcataggtagaggtgccgcggccgatttcatcgaggataatcagactggatttcgttgcctgatttagaatatccgcgacctcgctcatctctaccataaaggtggattgaccgctcgcgagatcgtccgatgcaccgacacgggtgaacacccgatccacaacgccgatatgcgccgatgaagccggaacaaacgaaccgatctgtgccataatcgcaatcagtgcgacctgacgcatataggtcgatttaccggccatattcggtcccgtgataatcgcgatgcggttatcaccttcatcgagcagcgtgtcattcgggatgaacatgctgtccttaagcattttttcgacaaccggatgacggccgtcatgtatctcgatcttatccgaaaaatcaacgatcgggcagatatagttctggtcgcaggcgacatcagcaagcgagcagagcacatcgatctgtgctaccgcctgcgccgagcgctgcacgcgatgcacctcagctgcaacacggtcgcgcacctgaataaacacatcatattccagtccggacaggcgttcctgtgcaccgagcactgtgctttcgagctgcttgagctcatcggtgatgtatcgttcacagtttgcgagcgtctgcttgcggatgtaatcttcagggacagcgtccgagttggaacgggaaacctcgatatagtagccgaacacacgattataaccgattttcagcttggaaatgccggttttttcgcgttcctgctgctcgatagccgcaatttttcccttgccgccgctcgcgagatcacgaagcgtgtcaatctcttcgttatagccgctgcggatcagaccgccgtctcgaagaaggaccggcggctcctcgacgatagccgcttcaatcagctcgcgcacatcctcaagcaggtcaatatttccggttaactctctgagcagagactgttcaaatacagatgcgtgtgcatggatttccggcagacaggagatagctgacgccagcgcacgcagatcacggcagttcgctgtgccgtaaacgatgcgtccgatcagacgctccatatcaaaaactttgcgaagcgcgtcggtcagtgccgtgcggcccatcacatcgtcgcacagcgcgctgacggcctgctgacgccgcgtgatatgaagcggattataaagcggtttttcgatccactgtcggatcagccgggaacccattgcggtatgcgtctgatcaagaacccacaaaagcgtaccctttttctccttggtgcgcatggtctcgcacagctcgagattgcgtctcgcgttcagatccagctccatatactgcccctgctgatacagcctcagatcattgaggcccgcaagactcgcaggctgcgttttttcaagataatcgagcaggccgccaagggtgcgggctgcgaacggcataacctggagacccgccccatcgaaatcctctatatggaagtatttgcggatacgctctcccgctgcttccgcgtcgaagcattcctcttccatcggttccacaagcgcttcctccagccgctcagtgataaaagagcgaaactcatcaaacgaaatcgcgaagccgcctgcgagaatctcacgaggtgaaaaacgagccagctcgttatacacgtcgacccattcctctgtgtcggttgcgtagacaacgcctgttgaaatatctgcaaagcacatgcccatgtcctcatgggtggcatagatacaggcaaggaaattattgcggctctcgtcgagcatagacgcgtcaacaactgtgccgggggtgacacggcgaataatatcgcgttttaccaggcctttggcctttttcggatcttccagctgctcgcagatcgcaattttataacctttttgcaccagctttgcgatatagccttctgcactgtgatacggcacgccgcacatgggagcgcgctccgcctgaccgcagtcgcggccggtcagcgtcagatcaagctcgcgtgagacaagctttgcatcatcaaaaaacagctcgtaaaagtcgcccagacggtaaaacagcagataatccttgtttttattcttgatttcaaaatactgctgcatcatgggcgtgagttcagccatatttgcctcctgtataacgaaaggtggattatgatttttttactgcgaacaggcatctcagcgaggtcttttcaatctctgcctgaatgaattcgccgatttggatattttcaccgcgtacgcataccagaagattgccctccgtccgggcggtatacggatagtccggccccttggctgctccgtctaccagcagacgcagcgtttttccctgatacgccgcctgcttctcggcaacgatatcgtcctgcgtcttgagcagacgctcaaagcggcgctgcttgtcctgcggcgaggcattgtcttcataggatgctgcgggcgtgcccgtgcgaggcgaatacaggaatgtgaacagcaggtcgaagcgtgtatcctgcaccagacgcagggtctgctcgaaatcctcgtctgtttcgcccggaaaaccgacgataatatcgcttgaaagcgtaatatccggcattttttcgcgagcatcagcgatcagagatttgtagtgctccgccgtatagcggcggttcatgcggcggagaatttcatcactgccagactgaaacggcaggtgaagctgctttgcaactttgccgcactcagccattgcagaaaacagcttcggagaagcatccttcggatggcttgtcataaagcgcagccagaagtctccgggcacagcattcaatctgcgaagcagatcggaaaaatcaacatcaatgccgagatccttgccgtaggagttgacgttctgtccgagaagggtaatctctctgtagcctgcggcaaccagttcgcgcagctctttttcgatctcctccgggtatcgcgaacgctctctgccgcggacataaggcacgatacagtaggtacagaaattgttgcagccgtacatgatagagagccaggcctttgcacccttcgcgcgaagtacaggcagtccttctgcaatatcatcctcgccgccgatatcaaatacgcgctttctgtccgtcaatacgcgataaagcagcgacggaaaacgccacagcgcatgcgtaccgaacagcagattgacctgcggatagctctttttaatcttttcaacattcttttcctgctgcgccatgcagccgcacagcgcgatgacgacatccggccgcttcttcttgagatggctcagcgcgccgatgttgccgaaggcacgatcctccgcatgctcgcgcactgcacaggtgttgaacaggatgaaatccgcctcttccgtgctgcctgtcatttcatatcccatttcatgcagcatgccgcgaatgcgttcggtatccgcctcattctgctggcagccaaaggtatgcgtataggctttgaggcatttgccgccattcagacgggcaacagcgtcaatataagtgaattgcgtttgcagctgctgctcggaaacattcttttgtgtggacaattctatgcctcctctcatcggaacggagtgccgtcagcagtaaacacattcatacgatggtactcgctgaagggtatctcgtactgcggcagatactgacggatggctcgagtcagatattcaggcgacatgttgttattgcctgctgcggtcgtaacaacggctgttacttcgcgttcgccctcggcaacggcaagatcgcgcatcagttcccgcatattaactatcttttcgccgcgcttggagcgcttgacgatctcgacgaccggacgccggaacagatcgcgtaccgcctcggcaaagccatccggcacgtccgcttcaaagccccaggtgatgcggtactgagaccactcgatcgagccaaccttcatgcctccgtccgactgcggatagatctcgatcgcgcggagaccttccggaaatacgtcgttgagcgcttccactgcattttcaggtaccgcttccgaggtgatattgaaatcaaggaattcgcattcaccggaataaccggtcgaaagcggaagcgcaacggaaacataggcgtgctgattgaagccttcggtaaaccacaggggcatctgacagcgcgccatcgagcgctgcatggcgtgcatcagatccagatgagagatgtactttgctctcccctccttggcaaatttcattcgagccttaaacacggcatttgcctcccttcagcagcgcgcttgcaccacagccagcacactgatgcatgcagtcgggtgtgataaccgcttcgcgcgagcgctcccattcacgcttcaggtgctccttgcgcgtaccgcagccaatgtgatcccacgggaatacctcatccatcgggcgctggcgggacgcataaaactccggatcaagtccgcagtcacggaacgcctgtatccacttttcaaaatcgaagcactgatcccagccatccattttacagccgcgctgccatgcgagcagaatagccctgccctgacggcggtcacctcgtgcaataacgccttcgagcaccgaggtctcggcatcgtgccagttataggtgacgttcttggtcttcataaccaccttgagatgcgcctgcttctcacggaaggtctccagtgtgtcctgcgcatcccactgaaacggcgtctgcggcttgggaacgaagcacgaagccgaagctgtaatacgaacgccgcgcgcacgattgggagtattctcgcgccagcagtaggcgacctttttgcagatgtcggaaatgccgtccagatcctcataggtttccgtcggcagacccatcatgaaatagagcttgacattgttccatccgccctgaaatgcgatttcgcaggcatgcagaacatcttcttcgcggatgttcttattgataacgtcacgcagacgctgtgtgcccgcctcacaggcaaaggtcaaaccgctcttgcgcgttttctgcacgcgctccatcagctcagcggaaaaactgtctgcgcggagagacggcagcgacaggctgatatggcgcggctcgcagtaatcgagcatacactctgtcaggccggacagttcgccgtaatcgcttgtagacagcgaggagagagaaatctcctcatagccggaattcttcagcaccgcttccgcctgttgcagaagaacctccttcgatttggtacggagcggacggtaggtatgacccgcctgacagaaacgacagccgcgcggacagccgcggaacagctcgatcatagcgcggtcaaagacaatatcggtcgaaggaacgacaaacgactccggataatacatggtatccagatccttgacgatgcgcttctgcaccatcgccggagcaccgtgcgtgggcgttacgctttcaatcgttccgtcctcatggtatttgacttcatacagcgaggggacgtacatgccctcgatctgtgccgccgcaatcaggaaatcctgcttggaccagccttcgcgcttcgccttgcgatacaggtcggtaaactcgagcataatttcctcaccgtcgccgatcatgaacagatcgacaaaatccgcgagcggctccgggttatacgcgcacggtccgccgcaggcaacaatatgccggaggtcagtgcgttcctttgcaagcacggggataccgccgagatccagcatatttaaaatgttagaaaacgacagctcatactgaagcgtaaacgcaataatatcgaagtccgtgagcggatcaccgctttccagaccgtaaagtggaatgccggcagcacgcatttcggcctccatatcgatccacggcgcgcatacacgctcacaccagatccctttttgatcattgagcagtccgtacaggatacgcgagccaaggtgcgacatcgcaacctcgtaagtgtccggaaagcagaaagcgaaccgcagatctacattctttttgtccttcatcaccgatccccattcgccgccgacatatcgcgccggcttctgcacccgggtcaggatggcttccatctgtttatgcaagctgttatcctccaaaatgagtatagtttagtggtgtcatatgaaatgtactgaaaacagcatccgccattcaggcggtagttatagacattatatcacattttacgcaaaaagaccataccgtcctgcaaaaagaagtaagctgcttcgttttacagaaagatatggtctttgctgttattttgtgttcaggattcgagtcgaattgaataccgtcagtaccgagaggatgatgtccactgcaacaacatgccacatctgaacaaagccgaaaagtgcgagcagagtgagcagtattttcgcaatgacaacgatcatcatattctgtaccgctgtactgtgcgttctgcggctgatacggacagcatcagcaaggcgagtcaaatcatgcgtcataaccagcacattggcacacttcgctgtatcgcgcgaaccggcagtgcccatcgcgataccgacatctgcagtcttcagctcatccagatcatgaatgccatcgccaatgtaggcttctgcgccgtccgtcgggatcgtgcgcatcagaaaatccattttggcggctttttcttctggctggagaccgaagtgaatggtatcgatgcctgctgcatcagcaacctgctgtgcggacagctcgctgtcgccggtcaggaggaccgtgcgtgtaatgccctgcgctttcagttcgcgaacagcatctgccgcctcatcgcggactgtatcctccatctggatcgcaccggcatagtctccttcatatgccacatagacgattgtgcctcgcagttcaggaacacccttaacgccgcgggagatcatcagcttgcggttgccgacgagaatcgttcggttatggatgcgggcacggacgcctcggcccgggaattcttcgaattccatgaccttctgcatctgtcccttgtaggcatctaccagtgcgcgggctaccggatgtgctgatagctgttcagcggcggcagcaagtgcaatgcagctctgctcgtcaaactcctgcgtcgggaatacctttttaatatgaagatcgccctttgtcagggtgccggttttgttgaacacggccatgcgcatctctgcggttttctcgattgcttcactgcccttggcatgtacgccttttcgagccagtctgctgctgccgcaccagaatacaagcggaacggaaacagcgagcgctgccggacagcttactgcaaggagcgtcagtgcacgatatacccagctctgaagcggggccgtcgagttgagcagcggcggtacgatcgcaagcagtacagccaggataaacatgaagggaatgaaacgcgataccataagcagcatactgcgttccagtgctgccttatgttcgctgctgtcttcctgcacgcgcataatacggctgattgcgctgtcatcgaagcgaaccatagtccgcatcagcagaagcgagccggtatacaggctgcccgccagcacgtgcgaatccttgctgacggctgcgagctcgctgtcgcccgaaataacgctctcatcaacagtgccctcgccgcggatcacaacgccgtcaagcggtacacgctctcctgaacgaacaagaacaaactcaccgattcggacctctgccggactgaccatgcgctcttcgcctttcatattgacgacagccgctttttccggtatgcagcttgcctgctgcggcatttcgctgttcgcgccggcgagaataaaatcgcttgcaatttttccgactccgtgaagaatcagcacaatcgcggcctcaggacggtgatgcagcagaaatgcgccgagcgataccacaagcatgagcgggtattcactgaaaaaccgcccgtgcgacagctcctgtattgcgtttccggcaatggggaccgctgccagcagatacgccagaagataaaggataaaggcgatatgatcatcgctcccgaacagcgctccggcaatcacaagtgctgccgatgcaatcagccgaatcagcgtgaactgcatatccatcatggacaacgcctgatatcggccttcgccgccattcgacgctcctcttttggcattttcccgccgcagacgggtctgctcccttcgtcgcattttggcccgataccgcgctcgttccatgaacgacatgccttccgtctcgctctcgctttgatgcagcatcgcaagggcagcagacagaggctgcatattttcggcttcggatgccgtttcttcttccggatcatccttaaaccgtttcttttccttgttctttctgggctttttctctattttccagagatgtttgagcttatcaaccgccttatcaacgccgctttcttcctcatccggcgcctctgctccgggcggtgactctggttcagccgatgcgttttcagcatcttctgcaccttcctgctcgttgccctcatcttcagcctgtgatccggagtcatcctccgaattttgcggcgatttttcttcctggggcggttctttttccgcagtctgcttttctgcagcagcctccggctgcatttcttcgtctttcgtttccggcggtttctcctctgacgccttctccgaaggcacagcctcatgctcagccgtgctctccggcggagaaaccggtgtgttttccttctcttcggattgctcagactcttgttccgcctgatcgggagataccgaatccttatccgtctcagttactgattccgccttgtcgggttctattccggggggcgtttccgtttcctgcggctcggcatgctcctgttcttctgtatcagatgtcatctccggcatattttctgtcccggcatcctcgttttgcgtcccggatgcttcagcggtgtttatgccgaattcctgcaggatgctttctacagtcggaaaatcgtcggcgttcgcgctgatctgatcgagcagttcttcagcagatgtctgatctgtcccctcgctcttcagcagcggctccttttccggcgaccccatctgtggggttgtattttcgctcatcttctatccctcctgcacatgtgcgataccttgcgccagtatcgtctggatatggtcatcacacaaggcatagtatacggtctttccgttttttctgctctttacaagacgggcctgtttcaaaaaacgcagctgatgggaaattgccgactggctcatgccgagcagtgtcgcgatatcgcagacgcaaagttctgccgataccaacgctgtcagaatacgcaggcgtgttttatcagaaaacgccttgaaaaaatcagacgctgcggtcgtgatatcatcatccggcatctgcctgcgcgcagtttctaccgcatccatatgaacaatgtgttcttcgcagcaatccatatccgcgcgcttatgtctgacagccaacaaaatccctcccgtgatacatgagtatccattcaattatactatcatccaatcgctattctgtcaagaattctgatgaaaacaagcgaaaaaaagatgataagctcacagcaatgcaacatctttattcagtatgcagtgcgcaggacgataactctctgcaaaatctgtaaaactctgttttctttttgcggtttccggcaggtacgccacatttttcaacttatatcgctattatttttgcgcaacatactatcagcaaaccacaacacacaaatcgtaaaggagagatcaaagttatgactaacacgaaaaacggttccaatcagggcatggtacctgaagcacgcgccgcaatggatcagtttaagatggaggctgcaagcgaggtcggcgtcaacctcaagcagggttataacggcgatctgaccagccgtcaggcgggttcgatcggcggtcagatggttaagaagatgtgtcccgtacatacttcgagctttgagcgggactgccggactgcggtcgggcattgtgtaaggattctttacaccgcagaatggacgtaagggcctgcggcagcgactcagcctcccttgccagcagctcgttcaggcttttccgcgctgccgcggactaattcgctgatcggtgttcgattggttattgcaatttacaagcaaaagaaaaagcgccagcaatgaaaaaatcactactggcgtttcttatcgtgtcgtttattgctttttcagcgttataatattactgctcgcgcatttttgcaaagcactcgctgcaataaaccggacggtcggacttcggctcaaacggaacgcgagcctcgccgccacaggaagcacaggttgcagtaaagaactcacgcggaccgcgagcagcgttcttgcgtgcgtcgcggcagctcttgcagcgctgcggctcgttctggaaaccacgctctgcgtagaattcctgctcgccggcagtgaatacaaattccttaccacattccttgcatactaaagtcttgtcttcgtacatgttccttttacctctctttgattgcgttcgctggggaacttggattatattgcgaacaggccgaggcctgtaatcgcccctaacagggattgatcttagccgattttcgcttgatgcgctggatggcgttttccaccgatttgacgggctttccgagcgtttctgccatctcctcataggagagaccgtccagaaataatgtcaaaacgtttgcctcaaattcagacaagagcgagtagagctgcctggtgcgctcttccctctcttcattgccaatcaccagcgattctggatcacctatcggtgccgttacccgtgtgtgcgattccgcaaggtcttcaaacagaggtcgatctaatgacatggactgattcagcggctgatgtttaagagctgatgcagagcgtgttgcggaatatattttccgctgaatacacagtctggcgaatacgctgaatggaacgcctttggtgctgtcaaattcccgtatcgctttcatcagtccgagcatcccctcctggattacatcttctgcgtctgctccagcaagaaagaaggggcgtgcgcaggtcttgaccagacgggtataccttttgaccagatcctccgccgcagagccgttcgactgctgcgccagacggcacagagtctcgtcggacatttccggggagaggagtgttgattcattatttctcatgtcgataaatattatatgcgctttaattggaaatgtcaagaaaatatcgacaaatctactattttcacttaaaacgactggtgtggcttgtgcaaaactgacaataaaattggattattcaaccgtaaccgacttggcgaggttacgcggcttatccacatcgcagttgcgctcaactgcaacatagtatgcaaaaagctgcattgggatgatcgaaagcgaagcggaaaattcgtatagacacttaggcaggcggataatatgctggcagacagactcgtcaccggtgaagtcatccgttgttaccaggacgacagaagcaccgcgtgcaacgacctcacggatattggagaccgtcttttcaaacagcgcaggctgggttgccagagcaacaacgagagtgccatcttcgatcaaagaaatcgtgccatgcttcagctcacccgccgcatatgcctcagagtggatataggaaatctccttcagcttaagggatgcctcgagagctgcggcatagtccagaccgcggccgaggaaaaagacactgggacggtttgcatacagcgtagcgatgcgctgcatatccggctgacatttgagcgcttcggtgacgcattccggcagccgctgaagctcagcacagagcgcacgctcgtcgccgatcgagatcagaccgcgcacgcgcgcaatctttacggaaatcagatacagtgcggccagctgtgcggagtaagccttggtcgttgcaacagcgatctccgggccggcccaggtgtacaggacaccatcagcttcgcgtgcgatcgtggaggagaccacatttacaatcgcgatggtgaatgcaccggcctgcttcgccagacgcattgcagcaagcgtatcagctgtctcaccggactgactgattacgatgcacatatcctttttgccgatgatcggattttcatagcggaattcgcttgcgacctcggccgagcagcggatgcggcacattgcctcgataacgcgcttgccgaccatgcctgcatgcagcgcagagccgcagccgatgatgtggatgttttcaatgtcgcgcagacgctcatcggtcagtccgttgtcctcgaaacagacggcattgttcttgatgcggggggtcacggtatctgtaacagccttaggctgctccatgatctccttgagcatgaagtgctgatagccgcccttttctgctgcggacatatcccagttgacggtctgaacttccttttcgactttgtcgccgaattcgttcatgacaatgacttcatccggacgcacgatcgctacttcgttgtcgtcaagaatgatgaacttccgggtacggctgataatagcggtgatatcagatgcgatcatgttttcgccttcaccgataccgatgacgagcggattgccgcggcgcgctgcgacgatttcctgtgtattatccatagatacaacgccgagtgcgtaagagccgcgcagacgctgcacggcagccagaacggtttttgcaagatcctcctgcttgccggtgtgcagatagtcgacaagatgcgcaacggtttcggtgtcggtctcggacttgaactcataaccatgcgcttcaaggcgttcgcgcagttccttgtagttttcaatgatgccgttgtgaacgactgcaaccttgcccttgccgccgagatgcggatgagagttgcggtcggacggttcgccgtgagtcgcccagcgggtgtggccgatgccgcaggtgcattccatatcgcagccgacctcacggatcttctcctcaaggttagcgatgcggccgcgggtctttacgacgcgcaggccttccttagtgaatgcggcgataccggcagagtcatatccgcgatattccagactgtacagacccttgatcagaatggggagcgcattttcgcgtcccgtaaaaccaacaattccacacataatcagtttactcctccaaaacggaatatatttatcaaacagttaaaatcaaaaagaaaaattttcatacccggatttgggcataaaaatagtgcgtaatgcatagctgctctgtccgcacagtcacctgtgtgctttaacagcctgctgacgaccaacccacctgtggccgaagggcatccgccgaaatttcgattaaccctttcctcgtcaactgcgataccggctgcatcgcagttctggcgctttagtttgttgtgaacttgtatgtcaaaccgctctcacctccctgctggtatattgccgcgcgtccggcagacgcaccgcaacgtggctgtatttggcagacggaaaaattccgccgtctgtaacaaacgaggtggatgcgaaaccacatccaccccattggttcttatctctattatacgacagactcaatcgttttggcaaccctttttgccaaagtatctacctgtgcgctgtcttttccctcgaccatgacgcggacaagcgcttctgtgccggacggacggacgaggattcgaccgttgtcgccgagctcggcggcagctgcttcgatgtcagccttgatttccggcttctcctgaagcgttgccttctggtcgttcggcaccttgacgttgatcataacctgcggccacggaacgacttccgctgcaatttccgagcactttcggccgctttccttgaggatagacatgaactgaagcgcggtcagttcaccgtcaccggtggaagcatactccaggaaaattacatgaccggactgctcgccgcccaggatatatcccttcttgagcatcatttcgagaacgtaacggtcgccgacattcgagcactcgatcttcatgccgttcttttcggcatatgcgtgcagacccatgttggacaggatggtcgcgacgaaagcgccgccgcgcagcttgccctgctttttcatgtgtgctgcgcataccgccatgatgcggtcaccgtccagctcttcgccggtttcatcgacgatcagacagcggtcggcatcaccgtcaaatgcgacaccgaggtcgaagttgccgcggcggacgcgctccttgagctgtcccagatgggtggagccgcagttgtcgttgatgtttacgccgtccggctcatagaagcgaatttcggccttgcactcgaccagtcgcatcagacgctctaccgtcgtggaggacgaaccgttcgcgcagtcgacagcaactcgcagaccggacaggtcgccggaaatcgtttccgcaaggtggttggtatattcaacgaccgggtcgatctcgctcttgagtacacggccgatcctgtcatgggtcatgcgcggaatggactcaaagtcatcgatcagatcctcgatccttgcctcggtagcatccggcagcttgtagccgttgcctgcaaagatcttgatgccgttgtattcgaacgaattgtggcttgcagaaatgacaataccagcatctgccttgtgcttgatggtgaggtacgcgacagccggcgtcgggataacgccgagcagttctacatctgcgccgaccgagcaaatgcccgctacgagcgcgttctccagcatatccgaggaaatgcgcgtatccttgccgatcagaagcttggcctttttgccgtgcgcggactcctgtgtgagcgtatatgcagcggctgcaccgatcttaaatgcgagcagtgcatcaagctcaagatttgcaacgccgcggacgccgtccgttccaaagtatctacccaatatgaaacacctatctttcctgttgatacgacatggggacatgccccggtttacagcattagctgtccgtcagccggctccatgttaagatgccggtatgcctgcatcgtcacgcatcgtccgcgcggcgtgcggctgagaaagccgatctgcatgagatacggctcgtaaacgtcttcaagagtaatggcctcctcgccgatcgtcgcggcgagtgtgtccagtccgaccggtccgccgccatagttgagcatgatactctgaagcatgcgccgatcgacattatcgagaccgagttcgtctatttccagtgcgcgcagcgcgatgtctgcgctctttttgtcaatggtacccgtgccgcgaacctgcgcaaaatcgcgcacacggcgcagcagacgattggcaatacgaggtgtgccgcggctgcgccgggcgatttcgtatgcgccttcgtgctcgcaggggacgttcagaatgcctgccgaacgctcaacgatactgcaaagttcctcgggcgaatacagctcgagacggagcatgacgccgaagcggtcgcgcagcggactggtcatctgacctgcgcgggttgttgcgccgatcagcgtaaagcgcggcaggtcgattcgtatggagcgagcagagggccccttgccgatgatgatatcgagcgcgtagtcctccatggccggataaaggatctcctctaccgcacggtcgagacggtggatctcgtcaataaacaaaatatcattttctgagaggtttgtcaataaagcggcaagatctccggccttttcaatggcaggaccgcttgtaacgcggatgttgactcccatttcggcggcgatgataccggcgagcgtggtcttgccgaggccgggaggaccatacagaagcgtatggtcgagcgactcgccgcgcatttttgcggcttcgatatatacgctcaggttttccttggccttggtctgaccgatgtaatccgccatcgtcttggggcggagcgaattttcggtctcgtcctcagacaactgccgggtggagatgatacgttcatcatccgccatgccgccggaaaattcaatactcaaaggaacactctcccctattactgcttaacaagtttcttgagacactggcggatgatttcgtccgcttccatgccgaccgtgtcgatctgcttcattgcgtggagtgcttcagcctgcgtatagccaagcaccatgagcgccgcaacggcttcctgcgtatggtttacgccgccggagaggtctgctgcggccacaggcgaagcagcggaagccccttcaagctgctccttgctcattttgtcccgaagttccagaacgatgcgctgcgcgatcttttttccgatgccgggcgcttgtgtgagcgttttctcgtcgccggtgatgatcgagagcgcaagccggtcgggcggcgcgactgaaagaatggaaagtgctgccttgggaccgacgccggaaacaccgatcatcatctcaaagcaggacttttcctcctcgtcgataaagccgtacagctcgaaaatcccctcgcgcacattgagataggtcagcagacgggccttcgtgccgattttcagcctgctgattgtattctgcgaagcatggcaggcataacccacaccgccgcagtcgattacggcaagtcctgtctgaaggacgcttaccgttccgtcaacataataaaacataaattataaaccctcatatcgcatagcctgtctggaatgaccgtggcagatcgcaagcgcgagtgcatccgccgcatcatccggccgcgggagctttgtaagatggagaatgctctttgtcatttccatcatctgttttttttctgcgttgccgtagccgacgaccgccatcttgacctgattcggtgtataggagaccggatgcagtcccttctgcgcgagcgcgagcaggataacgccgcgtgcttgcgcgacctgaatgccggtcgtgatgttctttgaaaagaaaagctcctcgatcgaaacctcatctgggtggaacgtatccacaagcgtgcagatatcgtcatagatctcgcacagacgcagatgcatgggcgtgcccggcgcagttttcgcagcaccgtactggatagcggtgaatttcatattatcgaaccggacgacaccgtaaccgatcgtgccgtagccggggtctatgccaagaatgatcataacaggtcctttgccaatgtaaaaacggaaaaataattccgagttcagatattatagcacaaacgtgtgaattttgcaatatgtatcatgataaagacagggatgaatgcaagaagcactcatccctgtcggatcatctgccgctgcttttaaggcaatactgcaccattaaaactgcgacatcaattttgcagttcggccttgatcctttcggccgcaagcaggatgccggccttgccggaggagtaggtcagaccgccctgcatatagcagacatacggctcgcgcatcggcgcgtcggcagaaagctcaatggatgcgccctgcacaaatgcgccggctgccatgatgacgggatcgtcatagccgggcattgcccagggttcgggcgtaacgaaggaatcgaccggagcgccggactgaatgccctcgcagaagcggcgcagcggctcgggtttgccgaatgcgatcgtctggatgatgtcatagcgtggctcctctgccttggggctgacctcgtagccgagcttctccatcaccttcgcacagaaaatcgcagtcttaagcgcctgagcggtaatgtgcggcgccatgaacagaccctgaaacagcagacggttctgccccattgtgcagccgcattcaccgccgatgccgggcgcggtcagcttgtaggatgcgttttcgacgagatctctgcggccggcgatatagccgcccgtgggggcaagaccgccgccggggtttttgatgagcgaaccggcgatgatatctgcgccgacctgcgtcggttcgatcgtttcggtgaattctccgtagcagttatcgaccataatggcagcgcacgggttgacctcacgcacaacctcgcagaccttgccgatctcctcgacggaaagcgtcttgcgcacggcgtagccgcggctgcgctgaatgaatacgagcttaacgttttcgtcccttgccgcctcacggatcgcagacagatcgggaacgccgtccttcagatcgacctgcttatagccgatgccgtagctcttcatgctgccgcagtaatcgccggtaatggtattctgaagggtgtcgtacgccggtccggtaacggacagaacggtgtccccggtctttactgcggagaacattgcgcaggacaaggcatgcgtgccgttgacaaagccgatgcgcacgagagcagcttctgtgccgaaaatgtcggcataaattttatcgagcgtatcgcggccgtagtcatcgtagccatagccggtcgtgccggcaaacagattgtcggaaacgcggttctttgcgaaggcggcgagcaccttttcggtattccggtcacagatctcctcaatacgggaaaaataaggacggatttcacgttcggcttcagcgccgagcgcacggatttcctcggaaatttttaagtattctgacatattgaatggttactctcctaacagtgttttccctccgggcagggtaaaatataccttgtcgggggcttcggtcgaaagtccggagacagagaccgagcgggtgagcgtatcgcccgaatagaacgatgcgcttttgagaagtcctgaggacgcagacacgctgtaagcgcagcggtagccgtccagatcaaagctgacgatgatgcacggttcgctgtctgtggatgtgcggccggcagaaagcggtgtaacgcctgctgcgagcacatcctcataggtcggcagcatggctgaggcgtcatcagaaaaactgcctgccctgccctcatagactgccgaactgtcagcgttccaggaatagatgatatcgcctctgcggatgatcgaggagcggacagctccgctctcggtcagggtatccgtgcgaatgacgccgtcgcgaacatagcggcggcagcggagagcggacgagccgccggtataatacagtttgttttcgatggtacagctgtatgcctcggggcgcgtgagagacgcaataacatgctggacgttatcggtcgtgatgtcaacatctgcaacgctctgcgcagtcagcagctgactgtcggcagtgacgaccggcgtgtcagcctcccctgtcggcagcgtgatgccggtgtcgcggcgatgcagcagaccggaggacatgatgtagctcagaaacaggagcgacacgagaacgcctgcacagatggcggccgccataggcgcagagaggacttttcgctttctcacgggttaaacggtgccggaccgttctcgcgcagaccgaaatagtgctcgatcgcttcgacaatgcgctgcgaggtttttccgtctccgtagggattgacggcatgcgccatctttgcgtaagcagtctcgtcctcgaacagctcgcgtgcgagctttacgatatcggcctgctcaacgcccgcaagcttgactgtgccggcttcgattgcttccggacgctcggtctcgcggcgcagtaccagaaccggcttgccgagactgggtgcctcctcctgaagtccgccggagtcggtcatgatcatgaagcagcgcgccatcagattgtgcatctcgtcaacggtcagcggatgaatcagatgaatgcggtcattgccgccgaggaacttctctgcggtctcacgcacatacggactgaggtgaaccggataaacgaagtgcacatccggatatgcttcgctcagctcagcaatcgcacggcagatgttctccatcggttcgccgtagttttcgcggcggtgagccgtgacaaggacaacacgattgttctcgaagtcgagctttttcagctgctcatcacggaatgaaaaatccggcttgacggtcatgtggatcgcgtcaacgacggtgttgccgacgacggaaacgccctcagtgatgccctcgcgggcgagattgtcacggttgcgaggagtcggagcaaagtgcagcgtcgcgatctgaccggtcagcttgcggttcatttcctcagggaacggcgaatatttgtcgtaggtgcgcagaccagcctcaacatggccgacaggaattttgtggtagaacgctgcgagtgcgccggcaaaggtggtcgaggtatcgccgtggacgagaacaatgtccggctgcgccttttcgagcacctcatccagaccgtgcaggctcttttcggtgatggtagcgagcgtctgacgcggctgcatgatattcaggtcataatccggcctgatgccgaaaatatcaagaacctgatcgagcatttcgcgatgctgtgcggtaacgcacacgatggactcggtgttttcgttctgctcaagcgcatgcacgagcggagccattttgatagcttccgggcgcgtaccgaatacagtcattaccttgattttattcatgtttgtttttctcctcctgtgcagcctcgtttttgtgttttttctgctcctgcggatgcttgccccagtgttccgcgccgtagataatacatgcgccgacaagaattgctgcaagcactgcggcaagcagtacaacagcctttacctcacccgacgaggtgagcacgacggcggtcagaccgagtgttgcactgattgcgtaaagaatagcgaccgcctgcttctgattgaagcccatgtcgatcagcttgtgatgcacatgaccgcggtcagggctcatcggactgcggccctccgcaagacggcggatgatcgcgttcgccgtatcgaagatcggcaggccgagaataagaaacggcacagcaaacgagatgacggcgtaaaatttgaacagacccatgatggacacggttgcgagcatatagccgaggaaggtcgaaccggtgtcgcccatgaaaatctttgcaggattaagattgtacggcataaagccaatgcaggcgcctgtaagggcagccatcgtgatggcaattgccatgttatcggtcaaaagcgcaacagcgagcatggtgattgcggcgatagacgatacgccgacagcgagaccgtccagaccgtcgatcagattgaccgcatttgtaatgccgacgatccagatgatcgtaacaggaacggcgagaaagccaagatgccagaacggcgcgtccgaaaacggattgaggttggtgaaaagactgatctgcaggccgccgacacagaccggaatggccgccgcgatgatctgtacgataaatttgagctttgcaccgagtgcgagaacatcgtcgaagatgccgagcgctacaataatcgtcgcaccgagcagtacgcacagcatggtctggtccagctgaccgaataccagaatggagcaaaggaagccgccgaaaatcgcaaggccgccaagacgcggaatcggttccttgtgcatgcggcggttatcctttggtacatcgatcgcaccaaccttgtgcgcgaaccgtttgacgggcggcgtaaagaagtaggacagcacgccggccaggatgaaggcggcgacgactatgccgattacagtatattcattcattgcgctttcctctttaatgcttttgatttgaacataaggaatatatcctcatacttattttaatcatatcacattttgcagcctcttgcaacgaatattattactgcgccggccgcacgaaaaatgcaatacgccagccgcggttgacaagcatacgctgcgcagagtatgataaaggcaagggtaaagggaaaaaacagagcaatacagcatccctgaacaggagcgttttacggaaatctgcggtattgcgtaaaagcgaaggagaggagttttccgtcatgggaaagtatatactggccctcgatcagggcacaacgagttcaagagcaatactttttgacagcgaacagaatattcttgcaatccgtcagcacgagctgacgcagcattatccgcatgaaggatgggttgagcaggatccgatggagatctggtctacgcagtacgcggctatgtttgaagtgcttgcggcggcggatatctccccagccgatgtggccggtatcggcattaccaatcagcgggagacgacgatcctttgggataaaatgaccggccgtcccattcataacgctatcgtatggcagtgccgccgcaccgcagacatcgtggacgggttggtggagagcggtctgaccgaccatatccgccgcacgaccggtcttgtcccagacgcatatttttcgggcacgaagatcaaatggctgctcgattatgtggagggcgcacgggagaaggctgagaagggcgagatcctgttcgggacggtggattcgtggctggtatggaagctcacgggcggcagggtacatatcacggatgccactaatgctgcgcgtacgatgatttttgatatccacagtctcgattgggacgacacactgctgaagacgctcgatattcctcgggcaatgctgccgcgcgtatgctcgtcaagcgagatttacggctatgtttctctgcctaatggtgagatcccgattgccggcattgcaggcgatcagcaggcagcactgttcggacagacctgctttaatgccggcgacgccaaaaacacctacggcaccggctgcttcctgctgatgaataccggaacgacagcctgtgaaagtgaaaacggtttgttgacaacgatcggtattcgtatcggagacgaaacgcagtatgcgcttgagggcagcgtatttgtcggcggcgcggtcattcagtggctgcgcgatgagatgcggtttttctcggaaagccgggatgcggaatactatgcgtgcaaggtgaaggataccggcggcgtttatctcgttccggcgttcaccggcctcggtgcaccgcactgggatatgtatgcacgcggctgtctgatcggactgacgcgcggcacgacgcgcgagcatatcatccgtgcggcacaggagtcgatcgcctatcaggtgaacgatttgctgacggccatgaaacgtgatacgggcgtggccctatcttccctttcggtggatggcggcgcgagccgtgacagctttcttatgcagtttcaggctgacatttcgaactgcacgatacgtcgtccggtcatccgcgagacgacggcgctcggcgcgtgctatcttgcaggtctggcaaccggcgtctggagcagcagggacgagctcaaggagctgtggcgctgcgatacgctttatgctccctcgatggaggatgagaagcgcagcaggctgctgaatggatgggacaaggcggtcggacgctcgcttgactgggcagagcactgaacataaaaaacatcctgccgtgagtcgtaaaagactccgcggcaggatgttttgctttattcgggacgttcctttttcttgcgcaggatggcataacggtcaactgcgaaaggaaactgaaagtggaccttcatctgcggcacattgaacaggtcaagcgcttcgccgtcatcgttcacagcctcggcgtggaagctatagggtgcgtgacctggctgaagcagctccagctcttcacccttgaagaagcggttcttgagggcgaatacggctgtaccgtcctcacggcagtcgaccggcatacccacgacctcataatcgcggatatactggctgtcgccgtagtgctgaccgtcggcggaaggaccgaagtaaaagcctgtgtaatactcccgatggctgaccttgtttacttcatcaaggcagaactgcggcatgacatagcgctcaggattggcaagataagcatcgaccgccgcgcggtatgcgccggtcacgcaggccgtgtaatacgcggtcttgttgcggccctcgattttgaaggaatcgatgccagccttgataagttccggaatgtgctcgatcatgcacatatccttggaattatacagataggtgccgcggctgtcctcctcgaccgggaaaaattcgccgggacgcttttcctccatcagggagtaattccagcggcagggctgtgcacacgcgccgtggtttgcatcacggccggtcatgtactgcgagatcaggcagcggccggaataggaaatgcacattgcgccgtggacaaaggcctcgatttccagagattttggcgttttggcacggatttcagcgatctcctcaagcgagagctcgcgtgcgaggacgacacgttcagcgcccatgtccgcccagaagtttgcagcctcgggattgagaatgctggtctgggtcgagatgtgcagcggaactttgggggcgtatttctgcgccatgcggatcacgccgacatcagcgacgatcatcgcgtccgcgcctgcgtcctggagcagctcaaggtaggcgggcagcgccggaagatcgcggcacgatggcatgatattaacggtaatatagcattttacgccgtgtgcgtgcgcttcagcgatgcagcggcgcagtgcctcgtcatcgaagttcgccgctgccgcgcgcattccgaagcgctgaccggccatatacactgcatcagcgccgtaggcaatgccgaagcgcatcttttcgggatcacccgcaggtgaaagaagctctggaattttattcaccgcttacctccgtgctttggtctgtgtttttgcttgcggcctgtgcctgtgcagcgttcgaggtcgcaatgttgcgctgatgctcctcatagctgcttgcgaacaggtggctgccgtcgggcattgcgacataatagtaataatcatggctctccgggtggcttgcagcgtaaagcgaggcatagcctgggttgcagatcggtccggggggcaggccttccttggtatacaggttgtagggggaatcgctcttgagatcctcgtcggtgagcttgccgctggtacggccgagaccgtacaggacagaggcgtccacctgaagatacgggaattcgctcgaattgttcagacggttgtaaataacgcccgcgatgcgcgcacgttcatcatcgtgctgcgcttcgcgctcgacaagcgaggcgacagtgacaatgtcgtgcatggaacggccgagctcattggctccgtctgtgatctccgagtcatagcgcgttgcgaagttattgagcatcttattgaccgtatcgacgaccgagccgttgcccttgtagatctcataggtatccgggaacagataaccctcgagccatccttcctcgaccggcttctcgtcctgcaggaagtcatgcttgaacgggtactggttgagtaccttgtcgagcgcatctgcggtgcagacatggttgtcaagcagaagctggcgcacctgtgcgaccgagtaaccctcgggaatcgtgatctgaagcgtatcagacgaagaagaattggtcagcttgtcgatgatctgaccgtagtccatgctcgggttaagctggtactcaccggcaagcacatcgtcggcagagtcgcccttgacggcgagatacgccttgaataccgtaccgtaattgataattccctgcttgtccagatcttttgccagatcagcgagctttgtgttctcggaaacatagaactgctgcatggcgttgtccttgacgaatgcaaagacgtcgtttgcagtaaagatcgctgcaagcgaaatgacaagcgacgcgccgacgaccgcgatgacatagaccatcgtgccggcgcagccgctgttcttatgtcgtctgctgcggcggcgcttgcggcggacttcctgattttcctgattatcgtacttatcgtaatccataatttacctcgaaacctcccgaccggctcagccgatcatatccaaaacgatttttgccgcaaatgcgacagcgaatacgagaacccccggatttcgcataagaagccacagatcgtagagaccggcgctcttggcgaaatgcggcaccgagtcgcgtacaagcattccctgcgcagtacgcacggtcaggtacaggaacagcagcaggccaagcagattgcaggcgaaaaagtagttcccgattccgaacggtgcatagacatcggtcatccacatggtgaccgacagataaagacctcctgccagatgcgcgataacagcaggccacacgctgtcgaaaatataggcgatataagcaaaggcacagccggcagcgaaagcaccgattgcgcggagcggatcgccctgaagcagcgcaaatgtaagaccggcaaacagaaggcaggccgaggtgccaacgcctttctcatgaatgggcatgagtacaccgcgcagaaagagttcctcgactaaggctgccgcagcggcgaatacaaaatacacgccgtgcgcaccgaaccgggactgggtcagcggcagtgccgcagcgaagaaatcaccgttcgcctgtccgacgagtgagccgagcgcaatattggtcgagagagcgaacatcgcggtcgtaatgccgagcagaatggcgaacaaaagtccgccctttggcggcatcctccatccaagcctgtgcctgatcgcggttcgatcttccgcagcatagtacgcaagaagtgccgggagcgcaaaggaaagcacctccgcgagcagcagcagaggcgggctgatgccgacatagcgaatgatgagccggctgagccctgtcagcagacaaaagcagacaaaaaggctgagaccggataaaagtgctgttctatttttcattcgtgtgcagcacctgcctttcagtaatgatgtagttgcacggaagatcaaacggctcacgcggaagcacatccgtcaggcggctctccgcgcatagagccgcagctacagcgtgggtccgggcaagaaaacgatcgtaataaccgcctccgtagccgagacggtagccgtttctgtcgcacgagagcgcaggaacaatgacgagcgaaatttcgtcaggcgggatttccggtgcaccggaggacggctccggaatgccgtaggcaccgcttttcagttcgtccagcgagagaatgcgccgcgcagacatctcccctgctctgccgcacagcggcacgcagagcgtttttccgtctgtgagcgcctgctccagaatggcggcggttccaatctcatcgcttgtggagacgtagcagaaaatacaggcggcatcacggtacagatcacttttcagaagattatccgaaattttgcaatcgataaaccgcttttcctctgaggagagtgtgcggcgtgcctcgcggtagcagcggcggagctgctgcttttcagtttgcagcatggtacacgaccgaaaaggcgatttcatccgccttttcacggctgatgagtgcggtaatgagtgcgcaggcgaaatcaagcgcaccgccgacgccgcaggcggtgatgatctttccgtcagtgacgcaggtggccggcaccgcttcagccccctccatgccgtcctccatgccggggtagcaggttgccctgcggcccttgagcagccccatgccgccgaggataacggacggcgcagcgcagattgcagcaacatatttttctgcctcgtacatcgcgcggactgcgctggtcacacgcttgtctgcgtacagattggtcgtaccgggcatgccgcccggcagcacgatcatgtcagcctgcgcaaggtcaatatcatccattggcagatcggtcacgaccctgatgccgcgcgcaccgcagaccgtttcgccggttacgccgacgagcctggtctcaacgcctgcgcgccggagcagatcgaccggggtcagcgcttcgacttcctcgaagccttcagccagtaatacatataccattgctgtcacacctttcagttgagcataagattgatatatccgttatccgcacacggcctatcatgccacttggcaacgccgagggcgatttctgagccgggggcggtgacagtgagtgtttcccggctgagcgcattcagcagtcccctttcccgatttgcagtaagtccgatggcttcctgtgcggtatcctcccagcagaaagcataagcggtgagtgcggctccgtcaaaccagccgtaaacgccggcaccgagcgcatcgaacattgcgatctgccggctccattcctcatggccgcgcgtgatatgaagcggcgggcacgaggcttcgtagagtgcgttgatctgcgggatgtgcgcatcgccgatacggcgcggcagttcgaactcccctgctgttcgcgtcagtgagcggcgcgagagatagaatgtctcggtatagccaaacggacgataaaactcgaacagccatttttctgccggaatgagtatcgaagccgctctcctcttttctttatcgagagcaaatgagcgttccagaagctcggcggcgtaaccgcggcggcggtgggcaggatgcgtgcatacgccatagatataggtgatctcgcgcggctctccgttgaccgaaagtgtgtacgggagcatctggagcatcgcgcacagggtattctcctgcatgagcagcagcgtatgctgcggttcatagagatgtgagaaaaagtagccgttaaatccaccttcgtccggaaaacaggtttcccagagtgaataaatcgccgggagatcgcgctgctcggcaaatcggatcatattctcctcactcctttggtacagccatatatttcacgccgcgcataacgggataataggatttttttgccttgcgcagcccctcaaggccaagatcttcctcgcggttaacatacatcacatccgcgcagttgcgttgcacgaactgctgattgatcatctgatatgcgccctggatcgtgtgatcggccttttcaatctggacaacatacatatccggcgttgccttgcagccgaaggtgaaagcaatcacctcgccgtccagacgcagcaggccgccgcgcagattcagataatcgaagttgtggagagcctgcacgatcgcacaggtttccccttcaaaatcgcgctcatgggcgcagccgttcaggttgcaccagtggacatggaacgcaaaagcatccttgatgttgtccttcgtcatatcttcataactccagcggttctcataggccgtcttgaatcggttaacaagattgcgcttgctctggagctttttgccggagagcgtcgagagcttttcggcaagatagatatagtcatctccgtcctcggtgtcgtgcgagaaggcgaattttcccggacgtaccgcttcgatgcgctcgatcatcggttctgcgactgacacgatcacgaacggaataccgcgttcggcagcatcctgctcaagtgcgtcgagcgccgcgccgaggtcgcccttgccgaccggtgcaagatagcagtcgcggccgccgtcgagtggtgacattttgatcaggaaaaatccatccagaaagcagatttgggtattgtaatggctgcgccacatgaacagatcgacaaagcagcgctcgcacagatgataattataatgcgagccgcatttttcgaccgcagccttatcttctaaagttatttcacgaaacggaagcataaaaatcctttctgtttttttgcgagagttactttccctctccgcgcagtttcatgtagtgcgcgcggacttcggccgccttgccgcaggacattttgccctctgtgcagacaccgtcaacacaggccggaccgcagtgtccgaacagcgtcggcgcaacagcgtagaccagccggtacatttgttctgcgagctcgcggatctcccactgtgcgcggctgcagcagcgcagacggaaaaagttcttgagactgcgggcgttggcagtcatcatgatacgggtcgcgcaggcgttcggcagcacataacgtgcgtcctcgattgcgtgcttttcggccctgctgcgagctgccttttcagggataccctgttcaagcagttccttcagatagccttccatcagtgcggcggtcagttcctcataggtgcgctgatcatcctccatcgcctgaatgaatttttcccgtgcggccgggattttatcaatctcgggcggaagaacatactcaaagcccttctcgcgtacatagcgctggctctgcaccgaaaaggatgccatgcggtgacgggtgatctgtgccagcagcgaacgcgaaacgccctcgatggcgaaggtgaaggaaacgtgttcgataggactttcgtgaccgatctcggagagcatattgacaaaatgctctgtcttttcctctgtcaatccctcgagtacgttgtcaatattgcttgaagagtagcagttttttgctgctgccgcgatcagcttttccggctcgggagtatgagccagcagtttgactttcataaatttttatcctttcttgccgaacagacgctcacagatgacaacgagcaggaatttcggcagcttcatcatgcggccgatacggctcggctgcttgagcagacggtagaaccattccagtcccagtttgataaagatatcaggagctcgtctggacacgcctgcgaatacatcgagcgagccgccaagaccgcagaacagtgtgccgtggatatcgtcgatgttcgcggcgatgaacttttcctgcttgggggcaccgaggcatacaaaaacggcatctgcgccgcctgcggcattgatcgcatctacgacctgctgcgtgtccttgaagtagccgtcatgcgtgccggcaagcacgagtcccggaaatttcgcgcacaggttcgcgccggccttttctgcgatacccggtttggcaccgagcagaaaaagacgcatattctccttggccatcgccgcacagagttcttctgcaaattcaatgcccggaacacggcccggcaggccctcgccgagaatttttgcggcgtagataatgccgatgccatccggcagcacaagggcggcgtggtttacgatgcccatgaactcagggtcgcggcggcagagatcaacgatttccgggttaggcgttacaacataacccttctgccgcgcgcggagcttgctcatcgccagttcaacggcctgctgtttagtaactgcgtggaactgcacgcctaaaatagaagcggttttcatccttttattctcctatgtcaatacgtcatcatcgggcactgcccataatcctttatattataacgcagtttatataaaatcacaagtgctgacccggcaaaccatcgttttgacgaaaaaaacagaaagcccgagacaaaaacggactttctgcgttggaagataagttttcggtactattttccgggagaacagccgcccggaccgcagtgagaaataacctcgttgagatagaccgacatgccggtgcacaggatgccctgcactacaccgtcaaacatcatacctgcccagttggcatattcagaccatcgggacgctgcgccgaggcacgccagcgcgatgccgcagccggtcagcgtcaacggtatcagccggttcggaaaacgcccgagagcctttaagactctgccgaggcagtacaggacggcagaaagtacggcataatccgcttcgatatactgcgaaaggtgttccaatgcgctcacctccgcttcattctatgcggaaagcaacgaaaggagaacgccggagcgctcccctttcgatattgtcttagagctgctcgcgaatcagcgcgcccatttcgctggtggacagcaccttttcgcccttcgcagcgatatccgcagtgcggtggcctgcgttgaggacattctcgacagcggtctcgatggcatccgcttcggccttcagaccgaaggagtagcgcagcatcatggcgcaggagagaatggttgcaatcgggtttgcaatgcccttgcctgcaatatccggtgcggagccgtgaatcggctcgtacatacccttgccgctttcgttcatcgaagcggacggcagcattccgatggagccggtaatcatggaagcctcgtcggacagaatatcgccgaacaggttgccggttacgataacgtcgaactgacccggattgcggacgagctgcatcgcgcagttgtcaacgtacatatcggtgtactcgacttccgggtattcgtccttgatgcggtgcatggtctcgcgccatacacggctggtctcaagaacgtttgccttgtcgaccgagcagaccttcttattgcgcttcatcgccatctcaaaagcacggcggccgatgcgttcgacctcgtagaccgagtagttcatatcgtccgcgccggtctcgccccagcccttgtcgctctcgcggcggtagtgcttgccgaagtaaacgtcaccggtcagttcgcggcagacgaggatatcgaagccgtcaccgatgatctccggcttgatcgggcaggcatccgccagcgccttgtgcatctgcgccggacgcaggttgacgaacaggcccagtgcggcgcgcagaccgagcagcgccttctccggacgcttagcactcggcacatcgtcccacttggggccgcctaccgcgccgagcagcacggaatccgcattcttgcagatctcgatggtctcatcggtcagcgggatgccgttcttgtcgatcgagcagccacccgcaaggacctcctgaaaattgaagctgtggccgaacttctcgccgaccttatcgagtacgagcatggcctcggatacgatctccgggccgatgccgtcgccctttaccactgcgatattataattcatgggattatgcctctctctccttgagcgacttcaagaggccgcctgccttgatgatattctggataaacggcgggaatgcagccgcctgccagctctcgcccttggtaacatcggtgatcacgccggtgtcgaagtttacctctacctcgtcgcccgcatcgatgccgttcgccgctgcctcgcactcgaggatgggcagaccgatgttgatggcgttgcggtagaagatacgcgcgaacgaggatgcgataacgcaggaaacgccgttctcgcggagaacgagcggtgcgtgctcacgggaggagccgcagccgaagttgcgggttgcgacgacgatgtcgccgggatgcatattctttacaaaatccgcgtcgatgtcctccattgcatgggtagacagctccttcgagtctgcaatattcagataacgtgcgggaatgataacgtcggtatcgacattgtcgccgtacttgaaaaccttgccttttgcgttcatggtatgtgtttcctcccttacttcaggtcgtccggcgcacagatgtagcctgcaactgcgcttgctgcggcaacagccgggcttgccagataaatttccgaggtgatatgacccatacggccgacaaagttgcggttggtggtggaaaccgccttctcgccgtgcgccaggatacccatatgaccgccgaggcacgggccgcaggtcggcgtggaaacgatagcgccggcctgaatgaagatcttggtcagaccctcctcgatgcactgcaggtaaacttcctgtgttgcggggatgatgatggtgcgcacattcggatttaccttgcggcccttgaggatttcggctgcaacgcgcatatcgtcgatgcggccgttggtgcaggagccgatgaccgactgctgaacctcaatatggccgaggtcgtcaatggtcttggtgttctccggcaggtgcgggcacgcgatggtcggacggagtgcagacaggtcgatctcgatggtctgctcgtactcggcgtcagcatcggcctcaaatgcggtaacgtcacggtttacgcggcccttgatgtagtccatcgtcttgtcatccaccgggaagatgccgttcttcgcaccggcctcgatcgccatgttgcagatggtgaagcggtcatccatggacagcgcgtgtgcaccctcgccgacgaactccatcgacttgtacagcgcgccgtccacgccgatcttaccgatgatatgcaggattacatccttgccggaaacccacgggctcagcttgcccttgagaacgaacttgatcgcgctcggcaccttaaaccacgccttgccggtcgccatgcccgccgcgaggtcggtagaaccaacgccggtcgagaatgcgcccagtgcgccgtaggtgcaggtgtggctgtccgcgccgatgatgagctcaccgggagcggtcagacctttttccgggagcagcgcatgctcgatgcccattgcgccgacgtcgaagaagttgacgatattgtacttcttggagaactcgcggcactcgaggcactgctcggcggacttgatgtccttattcggtgcaaaatggtccattacgagcgcgatcttggtgttgtcgaacaccttgtcgaagcccgccttctccatctctcggatggcaaccggaccggtgatatcgtttgccagcgtgagatctacgtttgcctcgatcagctgacctgccgttacgctttccagacccgcgtgcttcgcgaggatcttctgcgacattgtcatacccataacagcgttcctcctgctgaattagtcgttaaaatacttgttgatgccgttgatgtacgccttgatggatgcttccataacgtcaaccgatacgccgcggccggtgacgagctcgtcgctgcctcctacgcggatcttgacgatcgcttcgctctgtgcgtcctcgccgtcggtcagtgcgcgcagcgagtaatcctcgagctcgatatccttgccgacgatcttgttgatggcctggaaggatgcgttgatcgggccgtcggaggcagcggcacgttcaaaggtctcgtcaccctttctgacacggatgaccgcggtagaggtgatggtgttgccggagttgatgacaaagcggtcgaggatgtagcgctcctcgccggaaaccggaacggcgccgatcagaccctcgaggtcgcggtccttgatgaccttcttcttgtcggccagaatcttgaacttctcgaatgccttctcgagcttctcgtggtcgagcgtgtagcccagctcatgcaggcgctcttcgaacgcatggcggccggaatgcttgcccagaacgatagcgttcttcggaatgccgacggactccggggtcatgatttcgtaggtctccttgttcgccatgacgccgtgctgatggatgccggcttcgtgtgcgaacgcattcgcgccgacaatggccttggtcggggcaacggcaacgccggtgatggtctgaatcatgcggcttgcgcggtaaatctgagtggtttcgatattgcagccgatgccgaagtggtcggcgcgggtcttgagcgccatggcgcattcctccatggaagcgttgcctgcgcgctcgccgatgccgttgatggtgcattcgatctggtcgataccggcttcaacgcccgcgagagagtttgcaaccgccatgccgaggtcgttgtgcatatggcaggacagaacgaccttctcgatgccgtcggtgtgctcacgcagatacttgatgcgggaagcgtactcctccgggatcatgtagccgacggtatccgggatgttgatggtggtagcgcctgccttgatggcggtttcgacaacgcggcacaggaagtcgaggtcggtgcgggtcgcatcctcagcggagaattcgacatccgagcagaagcttttcgcgtaggaaacgctgtgagcgatggattcgatgacctcgtccggagtcatcttgagcttgtactccatatgtaccgggctggtagcaataaaggtatggatacgggcagattcagcacggcggatcgcattgtaggctgcttcgatgtccttgtctacgctgcgggccagcgagcagatggtcgcgccgcggacggtatccgcgatggctgcgatcgcagctgcatcaccgggagacgcagctgcaaagccggcctcgatgatgtcgaccttgagcgcttcgagctgctttgcgacctcaatcttctcgttgaggttcatggaacagccgggagactgctcgccgtcgcgcagggtcgtgtcaaaaatcttaatcgttctactcatggttccttgtcctctccttcgggtaatgtttgtcgtacagggacaaaaaaagctccgtcccttaattctgcattaagagacgaagcgaaagctccgcggtaccactcttgttgccgcaggaaaaagctgcgaccactctaagcgcatctatcaatgcgcagtccgtataacggcggacattccgttccatcttaccggcacaaaaaggctttcagcggacagttcccgggcgagtttcactgcatttcgacgctgccttacaccggccgacagctctctgaggacgaaagtacaattactttacccgttcatcacctttatcatatgctattatattatcccctgcgtactgcattgtcaagagaaaatttcaaagtttcgccgttattttacatatgcccgcccggacagcttgcgaagtatgataatatctgatataatatttgttatctctggataaagagaaaataaaaaagaggagtatgtaacattgaaacaacttggactgctggttagactcattatcggcatcatcgccggtatgctgatcggcctttgcggaggctggttcggcattgcggacacgacgggatttgttgcggtcattcgactgctcgcgacgttcacctcgctgttttccactttcctgtccttcatgattccgctgatcatcattgccttcatcacggtcggcatggcggagctgggtcagaaggcgaaccgtctgttcggcctgacgctgctgctggcctacggcacgacgaccatctcgggcttccttaccttctttatcggcaaggcttttctcccctcgctcatcaagccgatcactggcgatatcctcgaaagcaacgcattcgagccgttcttcaccatcgaggtcaccccgatcttcggcgttatgactgcgctcgtgcttgcatttgttctcggcatcggcatggcgaacctcaagggcgattccatgctcaaggttttccgtgatcttcagaacatcgtttccggcgtgctgcgccgcgtgatcattccgctcattccggtgcatatcgcgggtctgttcgccaacatcgcggccgagggccgtctcgcggcaacggtcaagatgttcgcctctctctacggcatcatcatcgtgcttcagctgctttacattctttcccagtttgtgctcgcaagcggcgtgtgcagaaagaaccacctgaagagcatcaagaatattgcgccggcgtactttactgccctcggtacccagtcctcggcgtctacgataccggtagcgctcaactgtgcgtacagcaataacgtcaatcgcgacgttgcggacttcgttgttccgctctgcgcgaccatcaacctcaacggcgacaccatctgcctcgtactgggctcgatgggtatcatgatcgcaagcggcatgaacccgacccttgcggtattcgctccgtttattcttatgctcggcgtgaccatggttgcggctccgggcgttccgggcggcggcgttatggcggctctcggccttatcacctcgatgctcggctttaccgacccgatgcagcagctcatcattgcactgcacttctcgcaggacagcttcggaacggcggcgaacgttaccggcgaccaggcgcttgcgctgatcgtggacgaggtagaccgcaagaccggcaaggcgtaaatcgaagaaaggagacagcatggaaattctgcttgacatcattcggagtgtggactacaatatcttgctccttatcgcggacaagctccgcggcggcgtgctcgacccggtgatgaccgtgctgtctctgatgggaaacggcggcgcggtatggattgagacagcggtcctgctgctgtttttccggaaaacgcggcgcgccggcgtcgcaatgctgcttgcgctggcggcaggctacgtcatcggcaatctctgcatcaaggagcttgttatgcggccgcggccgttcgtgacgcacagcgaccttacggctctgctcgacccgggcgacccgtggtcgttcccctcgggacacgcgctttcgtcatttgcggcggcgacggcactctggtgctttcataaaaagaccggcgtgctcgcgctcgttcttgcggcgctcattgcattctcgcggttgtacgcgagcgtacactatcccaccgatgtgcttgcaggcatgctcataggtatcgcactcgctcatgcggcggcgtttctgaccgaccgcatcatcgacacattccattccatccggctgagaaagggcgacaaatgaaccagtataaacgtctgctcagcaatacctttatctttgctgtcggaacattcagctccaaaatccttgtcatcctgatgctgcgcttctacaccggcgtgctgacgcaggacgagatgggcgttgcagatcttatcatcaagacgaccagcattctgtatccggtcgtatcactgtccatcggacaggcagttatccgttacggactggagcgaaggcggcgcaagccggatgtgttcaccatcggtctgcttaccgtggcctgcggctttctgatctcactgccgttcaatcctttgctgaagcttgttcactataacacctcggcgggtgcggcaggctcactgctcgactaccgcattctgatctatgtgtatgtgctgacctcgtgcacgcagaatgtctgcggccagtttatccgcgcgatcggttatgtccgcctgtatgccatcgacggcatcttccgtacattcatgaccattgtgctgaacatcctgtacctcaaggtgttccgctggaacatttacggctatgtagcctctattatctgttcggacgctctttcgaccgtgtgcctgtttatgatcgccagactctggaaatatttccgcctgcggcgcattaacttttatctgtggcgcagcatgctgctgtacgcacttccgctcgttccggatgcgatcctcgtctatatcatcggtttctccgatcaggcgtttctcgcgtccatgcagaatacctcggtcagcgcgatctattcgatcgcctaccgcgtgccgacgctcattgcgctcgtcgcatccatctttattgacgcgtggcagctctccatggtcaacagcaataccaaggaggagcagatcgaatttttctcgaatgtcggaaatacctattccgccattgtgttcatcattgcctcgggcggcatcatgtgcgcaaagctcgccatgacggtgctcgcggtgaagaactactatatcggctggacattcattcctattctggcgatcggcgcaggctttaactgcctgtcgagctttcagaagagtgtgtatctgctggagaaaaaaaccgttccgtccttcctttcaacggcattttctgcggtcattaatattgctctgaacgcgctgctcattccgcgttacggtggaacgggtgccgcagcggcaacgctgacaagctacgttgctctgtttatataccgcgcactcgacagccgccggtttatgccgatccgctggaagcgtctgcgtctgggactgactgtgctgctgctcgccgtacaggcagcgctcatgcttatcgagccgccgttctggctcatctggcagctgctgctgttcggtgcggtcggtctgctcaacagtcgcgaactgatggcagcattctccaagattctgcatcggcacagaaaagcataaatacaagggcgcctcgaaatcgaggcgcttcttctttattcgattcggcattccgacgaaaaatacgctttctgcgcggctgcccttgcttttcgctgcccgatacgttatactataaggcgtgctgttcggcattcattgcttccggatatgaaaatgacagttcgaaaccatcctgtcgctaaacaaaactagggacaacgaaacagaaaatatgttgatttttctcgttgttgtacgcattatttggaggtgaacgaaatatggtgaaagaaaatatgagcaaggcgcaaaagctgacattttctgcgatgatcatggcgctctacattgtagtgctgtacttcacgcagagcttttcattcggtgcttatcagatccgtatcgcaacttcgctttacggcctttcctacctgtttccgttcctggttttgccgcttggtttcgcaaacttcatcgccaacatgctgttcggcgggcttggcctgctcgacatgttcggcggctgtatcgtcggtatcgttacgaccgcaattatcgtgctcatccgccgtcagggctggagccgatggctgatgatcctcccgatcatccttgtgccgggtctcggcgtttcgacgtacctttcttatctgctgcatgtgccttacagtgcgcttgcactcagtctctgtatcggccagactgttccggctatctgcggcgcagtactggtaaatgtgcttcagcgtgcactctatccgcagaagatcaaggcagactgattgaatttaaaggagaaatgaaacctatgaccggaagaaataaagaagaactgaacggcgtcacccttctggggaatcagaaaaacaagtatcctacggattatgcaccggaaatgctcgagagctttccgaacaagcatccggagaacgattacttcgtaaagtttaactgtcccgagtttacgagcctgtgcccgatgaccggacagccggactttgcgaccatctatatctcctatgtgcccggtgagcgcatggtggagagcaagtcgctcaagctgtatctgttcagcttccgcaatcacggcgatttccacgaggactgtgtgaacatcatcatgaaagaccttatccgccttatggacccgaaatacattgaggtctggggcaaatttaccccgcgcggcggcatttcgatcgacccgtactgcaactacggcaagcccggcacacgctgggagcaggtcgccttcgaccgtctcgcgcatcacgatctctatccggagaaggtggacaaccgatgagcgaaaaagctatggtgctctgctcgggcggcgtagacagcacgacctgtcttgcactcgccgtcgagaaatacggcagagaaaacgtcagcgcgctgtccatttattatggtcagaaacatgtcagggagatcgaggctgcgaaaaaggtcctcgaatactacggcgtggagggcacttccctcgaccttacccctgtgttcgcgtacagcgactgctcgctgctttcccactcgaccgaagaggttcccgaggagagctatgcggagcagctgaagagtacgcatggtgcaccggtcacgacctatgtcccgttccgcaacggactgttcctttcggcagcggcgagcgtcgcactttccaagggatgcagcgttatctactacggcgcacatcatgatgatgcagccggaaacgcctaccccgattgcagcgaggaattcgtgaatgcgatgaaccggtcggtagaagaaggtacaggcggcgcactgcgcatcgaagcgcctttcgtccgctggaacaaggctcagatcgtcagggagggcctgcggctgcatgtcccctatgaactgacatggagctgctacgagggcggagagaggccgtgcggcaaatgcggcacctgcctcgatcgtctgcgtgcgttcgaagcgaacggcgtgagcgacccggcaatgaagtaacagaaaagactgctgttttctctcgagaacggcagtcttttattttggcacctcccctgctctatgcatagaatgacgcagaggaggttttttgtatggataagagcttgactctggcggtcatcggcggcgatgagcgtcaggtctttttggcgagccttgcactggcagacggtcatgccgtgcgcacgtttgcgcttgaccgggcgaacatagcgggcgcagcggtctgctctgatgctgcgtcatgtacagagggcgcagatgcagtgctgctgcccgtccccgtcatgcagggcgatggcttgctgcgcgcaccgcttgcgaggacggagactgatgtgatgcaggtgcttgatgcgataccggcaggcgtgccggcgttcggcggtgcggtaccctttcggctgcatgcccgggcggtgcagtgcggtgtgcgcctgatcgactatctctcacgagaggagcttgcgatacgcaatgccgtgccaacctgcgagggagcgctgcagctcgctatggagcagactgactgcacgatacagggtgcacatgtgctcgtcattggtgcgggacggatcggatttctgcttgctgtcagactgcatgcactgggagcacaggtgactgtcgcggcccggtcactgagagaccgtgctcgtatcgaatccgcaggccttgcggcggtggatacggcacagcttgcacaggaggtgcacggcagggagatcatcttcaatactgtgcctgcaccgcttctgacgggcgagatactgcgcgcactgacgccatcctgcattgtgatcgaccttgcgtccatgccgggaggtgttgcgccggatgcagaacctccaacgggctgccgggtaatacacgccttgtctctgcccggaaaggttgcgccgcgcacggctgctgccgcgatttatgctacggtgaccgctatactgcgagaggagggcgtgctgtgaaaatcggttttgttatgacaggttcgttctgtacgttcataaaggcgcttcgagcaatggaaaatcttgtatcgctcggtcacagcgtcacaccaatcctgagcgagcatgctggcggtatggatacacggttcggcacggcggatgatctgcgtgaacgtctgcggaatatcactggcagcgagatcatcgacagcattgcgggtgcggagccgatcgggccgaagcggatgttcgatgtgctgatcgttgtgccctgcacgggcaacacgcttgcaaagctctcgcacggtattacagatacgaccgctgcaatggcggttaagagtcatttgcgaagcgagagaccggttgtcctcgcactttcaaccaatgatgcgcttgcagcctccgcagagaatatcggaagactgctgaatcgcagacactattatttcgtgccgttcggacaggatgatccggagagcaaaccgcggtcgctggtaagtgaactttcgctcctgccggagaccatggaagcagcacttgaaggtcggcagctgcagccgatattggtttctttctgatgcagatgaacaagggcagggacgcgatacggtgtcactgccctttggcggctgtcggtattgctgctcagctgtttccgtccgcatcgtccccggcagtcacgaagcggatggctcttgcatagtttttgatctcggcatgcgtctctgaaccgccgaattcaccgtcaagcgtccaggagatttcctcatctgagtcaaatgagatatgcgaggtgcggaagtagagaaaacgagtcgattcggtgttatgcgtcagcaggtcattgatcagccactgaagctccatcggattatcgaccggatagacgagcagaacctcatacagaccgtcatcgagtgcgatagagtccggactcagtgccttaaaaccgcctacagagaccgaatttgttaccatgccgtagatgaagtgatcttcggtctgcatttccggactgttgacgcggatgcggtattccttgatattcgcgagcgaaatgacgccctgcatgatgtaggcagcacggccgaagatgtttttagtctgctgcggcgtggcgtagctgacctcagtgaatacgccaaaggcagcgatatagttaaaatagcggctgttaaagcggccgatatcgagcgcctgcaagcggtcctttgcagcgatagcagccgcctcggctggaaccttgggaataccgagactggtagcaaaatcgttggtcgtgccggcaggaatgtagccgagaggcggccgtaccttgctctgcatcagtccggtgacgacctcgttgagtgtgccgtcgccgccggcacagacgatacggtcaaattccccggctcttgcctgcgcaacgcgggtcgcatcctcgggaccttcggttacgtgcagggtcacgtcaaaccctgccttttgaaaggcgaggatgcagtcaatgagcttgccgcgcatcgcaccgcgtccggcatggggattgacaatccagagcatttttttcatgtgcatccgtctcctttcatgagcatgcgtttagcgggcaagaagagcgcagatcttgttggcgtagccggccgggtcatctaccggcagaccctcgatcagcagcgactgcgtgtacagaatgtctgcatagtcggcaagagcatccgaaccttcggcctggagagcgcacagcttcttgaagatcgggtgatctgcgttcagttcgagtacgcgatcagcgcggacggtctcgccgccgttgacggcggcctgctggttgagcaccttctccatttcgagcgttaccgggccttcggcgcgcagacagcacggatggtttttgaggcggccggtcagttcgaccttctttaccttgccctcaagcgccttgctgagcgcgtcgagcagttccttgttgtcctcagactgcttcttgatctcttccctttcctcttcactttccagaccaaggtctgcgtccagaatcgacttgaattccttgtcgtcgtatttcgcaatcattttggtgcagaactcgtcgatactgtcatccatgcagaggacttcatagcccttgtcggacagagtctccatgacaggcagcatcttgatcttatcaacagtttcaccgcaggcgtagtaaatatacttctggtcttccttcatacgggaaacgtagtccttgagcgaaacgagcttgttctcggtcgaggaatgatacatcagcagatcccgaagcagctccttatgtgcgccgtactggacgtatgcgccatacttaatctggcggccgaaggctgcccagaacttgtcgtaatcctccggcttatccttctgcatcttgagcagctcgctcttgatcttcttttccagactctgcgcgatagccttgaggtggcggtcgtgctggagcatttcgcgggagatgttgagcgacaggtctgcggtgtctaccatgccgcggacaaagctgaagtggtcaggcagcagatcggcacacttgtccatgatgagcacgccgttggagtagagctgaagacccttttcataatccttggtataatagtccatcggagcgtgcgacgggataaacagcatcgcggtgtaggtcactgcaccctcaacgctcgtatggatgtgacaaagcggcggctgatagtcaaaaaacttctgcgtatagaaattgttgtagtcctcgtccttcagctccttcttggatttcttccagatcgggaccatggagttcagggttgtgttttcggtatactcttcccactcgggcttgtagtcatcccctgcatccgccggcttctccttcatgcgagaacgggtcatgtccatcttgatcggatagcggatgtagtcggagtattttttgaccagaccctgtacgcggtaaggttcaagaaattcgtcgtagttttcggattcggtgttgtccttgatggtgaggacgatcttcgtgccgttctctgccttttcacagggcgtcacggtgtagccgtccgcgccgtccgactcccagcggtttgcgctgtcgctgccgaccgcacgggaaacgacctcaacgtgctttgcgaccatgaaggcggcgtagaaaccgacaccgaactggccaatgatgtcaatgtcgtcctgcttttcgttctcagccttgaaggcaagcgagccggagcgcgcgatggtgccgagattgctctcgagctcctcagcggtcatgccgcagccgtggtcctcgatgatgaagcggcggttcgccttgtcgagagtcagctcgatggggagcgcatcgcgcgtgatgcccgttttgccttccttcatcgcgttatagtagagtttatcggtggcatccgatgcattcgagatcagctcgcgcaggaaaatctccttgtgcgtataaatcgagttgatcatcaggtcaagcagacgcttggactctgccttgaactgtttctgtgccatagttacatacacctctgtgttttgattttctaaaatgagcttagcactctacgctttcgagtgctaacaatgatataatagtacgctccgagagaaaaatcaagaggttgtgaaagaaaattcacggtttgttaacagtgtgcatcgtgcataaaaaatccgccccgggataaccgaggcggacggtagaaaatgtacggttttaaacagccggctgaaccatcgtgccgaggacgagtgaaccgttagcgaaggacagggtctcgcctgccagctggaacagctccgccggaacccagctcgtgccgtcaacctcgtaggaggctgcgccgagggatacgccgccggtgcgatcgttgcctgcgtggtagcggtccttgccaagctggatgttgatcggggtctcgccctttttgaggataacggtattggtcttgccgtcccaggaaaccttgtagccgagggtctctgcgaccttgcgtaccggaaccatcgcaacgccgtcagcaacgcggccttcggtcagctcggagccgtcctgcttgaatacgaggaaacggctgtcctcctgacccgggataacgacgcggtcggcagcggcctgtgccgggtaagactcagcagcgacatcgaaccatgcaaggaaacgggtgccgacatggatatcatcaacggttacaatgttgcgggtcatgaacggctgaacgctcgcgtccttcgcgatggtgaggttcagagagccgccctcgcaggtaacggtgacagagccgtcgtcgttcttctgaacagcctcagcagtgagcagagatgccggagcgtgcttgtcggtgagattggtcagaacagcataggcggtagtctgtgccgggagagacatggtgacagcctcatcgtgatacacataaacgctctcacctgccttgagggcagacagatcagccgcagcagcggtctgggtgtccatgacgatcgcattttccgtgtgcagtacgagctcgtcgccgtctgcggtcttaacagtcagatcgccgttctcatagctgacaacggtcgccagctcggtcatcggtgcaacggacagagacgggagcatatcggcagcggcctgcgtcagcgtcgagctgctcgttccgttcagatgagagacatcaactgcgccggcagccggaagtgcgctcatcatcatcattgcagcggccagtacgccgcccatcgttctcttcatcatagtgttttatcctcctgtgttatgttcttgtcctgttagacggagaactgcacagaaggttccctgtttttcgaaaaaattcaaattattttttggacggtacagcgcgattaaagctgatgcggcttacgggaattgtacggtatggccttagcctgcgaaatctgccgagacggaaatggtgtactcccctgctgtgcagtcgaaagaaaccgtctgagagacgattttcccaaaggagaccgtctgttcagtttgaatgttcgatacctgcatgcggttgccgtttggcatggcaaatgcagcggtgtccgtaagactgtcatagagcggcgaggtaagttcgatcgtccagcggtcgttcgagcgcgaaagcgacgaaacatacgcgagcggcacgcggccgaaggcggtcagacgctgcatctggtcgcgtgccgagcacgcttcactgccgcttctggaaccgaaactggtgctcagcaggccgttttcaagtgaaactgccgtcagcagcgtcttgtcagcgacgtttgcggccgaaagcgtcagcgtgccgctcgtcagcagactccggttgtctgtatctgcagtggtcgcatcctctgcccgcagggtcagcacggtctcgccgttcctcttgacggcggtcggctgaacgacggttttataggtaagcgctgcggcggttttcgcggtcatggtgcggtagctctcgtaatttgcaaacaggcgcttgaccggcgcagcagcggccacgtcaacagcaccctgctcagcgagacggtcgagcagcattccctcttcccccttcggggaaactgcaagtgcggtgtaggatgccgccgcggcatcatcacggttaaacagctcggtgtcgacagcggcgagatcatatacgccaagctgcgcggcggcctcggcagcatcggtatagctgaaatccccggcggtgtccgaatagccgagtgagcgcagcagaaaggccgcatacatccgggcatcacacatgtcctccggcgaccacgaagtcgcagaggtgccctgtgtcagaccattatcatacagatactgaatatacggctgctcccacgcggcgaggtcggtaaacggtgcggtataggtgagcttcctggcggcgtcctcctgtccaagcaggcggacgagcatgacagcggcctctgcacgggtaggcgcacggtcaagtgcgtagccgcttcctgttccttcgaacaggccgagtgaatgcagcgtgtctgcacacggcgtgaagtcggcggcgagagaggcgcaggtcagcgcgccggtgagagctgcaccgcagaaaagactgcgtaatactttattcaaaggtgttccctcctgagtgatagacaatatataggcgataccgcatgattgaacaagggtgatttgcacggtactgctataatactatagcacattctgatgtattttccaaccggtaatcgggcagaatacgcgaaaaggagtgagtttcatggcagacatgcgaaaatgtggtatcatcggtaccggaaatgtaggtgcggcgagcgcttatacccttgcggtgagcggactgttctccgaggtattactgcttgatgcggatatgcacagagcggagggcgaagccgctgacattgcgcacggtgcagcgcttcggcggccctgccgggtacacgcaggcggctatggcgactttgcggactgcggactggttattctcgcggccgggacgaaccagcgacccggcgagactcgagaggctctgctcgggcgaaaccgcgccatcctgcaaagcattctggaacagctgaccgctgtaaaccgggatgcagtcctgctcgtcgtgtcaaacccggtggatgtactgaccggatatacactcgagctgtccggatttccggctgagcgggtcattggttcggggactgtgctcgacacagcgcgaatcaaatgccttctgggggaaaaactcggcgtggacagccgaaatgtgcacgccttcatgctgggcgagcacggcgacagtgaagtcgcggtctggtcgagcgccaatatctcgggcgcggatcttgacgacttctgccttgccgccggaattgatgatccggaaagtatgcttgcctcgctcgcgcgtgaggttactcacgcagcgtatgatatcatcgagcgcaagggcgcaacctgctatggcattgcgatggcagtgcggcgcattgcagaggccatcatccgggacgagcacgcagtcctgcccgtttcgacgcttgcgcgcggcgcttacggcattgagggcgtatgcctcggcctgcctgccgtcgtaggaagatcaggcgtctctcaggttctcgacctgccgctgtcacgcgatgagaccgaacggctgcttgcttccgcgcacaagctcaaaaccctcatggagggatgaacaaggccgcagagcgaaaagctctgcggccttgtttatgatctttcattattcgccctcgggatgaatctgctcaagatactcgaccatgtcaatgtagctcgacaggtcggacggaatgctgatcttgacggcggagccggtcgccttgacgacgctcttgatatccatggaggcggagacggtctcgccttcggcggtgatctttacggtgcccttgactgcgccctctgcaagctggccgttcctgacggtcatggtgatggccgtatccttgaattcgaccttggtgttcgcagagccctcggggagactgcctgcatagctggtgagaatcttgttgatcgtgctgttgagagccgaaccatcgtaagtaacggtgaggtcggagccggactgcttgatgttcttgatgtagcaaagcggcagaacacccgcgtcacttacgccgaagctgtgaagctgcgccgtaagctcatcaagatccagcgtcattttgaccttgacgccatcacccatatccatgtaataaacgccgccggtgtagcacgccttgatattcgaaacaaccggctcagagcctgtgaccttggtcgtggtcgtgccggtgatttccatctgtgcgtccttcagcttgtccgggtcaacgtaggccttggtattcatcacgctgtctgtggtgatttccatgccggatgccttcatggtcatacgggcggtaacgtcctgttctgcgcgggtaatcggcgtagaaaccgtcttattgtagctttcagcgagatcgatgaactgggagagcggtgctgccttgctctggtcgatcgcaccgtcggcgatgagcttgtcgagcagggtgatgtcggtcgccttgaccggggttgcgagcgcttccaaactcatggcagcaacattatctcgcaggaaattgttcgtgtcacagaaggattcgtcgatgagaccgacgtggtccgctgcaaagtcaagcgcgccggtgtaggcgaaatcaccgttctgcgcgtcggagtagccgagcgaacgcagcaggaaggtggtgtacatctgagcagaacactttgccttcggctcgaaggtggtcgcggttgcgccggtagtcagcttgttgtcataaaggtactggacgtaaggtgcttcccagccctccagatcggtaaacggcgcggtataggtgagagccttggcgtcggcctccttgccgagcaggcgcacgagcataacggcggcctctgcacgggtgggagcacggtcaaggtcgtactgcggtgcgccggaagcggtcatgccggtgccctggaataaaccgacctcatgcagacggtcagcagacgaagtgaagtttgccgcacctgcggaaaccattacgcctgccgcacaggcaactgccatagcgccgagcttaaagcttcttttcataattttctcctccttctacttttactggaaagaaccagtctatatgctcattataacagagttaatatgaaatgcaagcggtatttctttttgcagaaatctttattctcagcagaggtttacccttccgctgagggggaagaagaaaccacctgcatatgcggatatgcaatctctatcccttccctgtcgtaggtctgcttgatgtcctccagtacggcacacttgagcgcgaatgcagtcgcgttgtccttcgcccagagggacgcgcgcagcgtcaccgacgagtcggcaagctcgagcaccacgactgttaccttgggcgcgccgtcatgcttctgctgttcggtgcgcacatcgagataagtcggctgctgcgctacctcggctgcaagcagctccttcgccttcttcaggtcactctcgtagctgacgcccacggtcaggaacacgcagatgcggctgtccgcgtagtcggcgttttcgatgatggcgctgttcatcttgctgttcgggatgataacgcgcttgttctcgactgtgcgcacggcggtgtgatgtagcgtgatctcttcgactgtgccggtgatgtcgctgtcgacataacgcacgacgtctcccatcttgaacggcttgaacagcaggatcatcacgccgctcacgacgctgccgagcgcctcctgcgccgcgagaccggctaccacagcgataacaccgccggccgtcagcagagtatgtaccgcgctcgaaagcagaggtatcgctccgataatgaccatgccgccggcaaaatacaccgcagcgaccgcgatatagcgcacaaagccggttactgtcgcgagcgaactgcccgactttttctgtcggtcgacgagcttgcgcatcagtcgatttaccgtctgcgctgcgatataggtcagcactgcggtcaggatcgccagtccggccatgcccagaaagcgaccggcgggcgtggacaggaattcttctatctttgcaagcaagcacagcactcctttccttgaaaaacagcaaaggcgaggtgatgtgtcaccccgccctgcataagtttctgatgcgtcttagtacgcgatgccccagacaaccatcttgtcggccttcttgccgcagaccgggcaggtatctgcaatatgctcctgctcaaacgggatgcagcggcttggcatgccggtttcttccttgattttctcctcgcaggcctgatcgccgcaccacatggacttgataaagccggtgtgttcagcgaggatggacttcatctcatccaggctggttgcggtgtaggtatgtgcctcgcgatttgccagcgccttttcgtagaggctcttctggatgtcgtcgagcagagccggaatggtcttttcgagatcctcgaacttgacgacagtcttttcgcgggtgtcgcggcggacgaggacgcactgaccctcggcgatgtcgcgcgggccgacttccagacggagcggaatgcccttcatctcgtactcggcgaacttccagcccggggtattgtcggacaggtcgatcttcgcacggataccggctgccttgacctgctcgtacagctcggctgccttctccttgacgccttccttgtgggcagcgaccgggattacgacgagctgggtcggagcgatgcgcggcggcagaaccagaccttcgttatcgccgtgggtcatgatgatcgcgccgataatacgggtggaaacgccccaggaggtctgatacatatactgaagcgtgttgttcttatcggtatactgcatgccgaaggcgcgcgcgaagccgtcaccgaagtaatgagaagtgccggactgaagcgccttgcagtcgtgcatcatggcctcgatagtgtaggtgttctccgcaccggcgaagcgctccttcggggtcttttcgcccttgacgaccgggatggccagccattcctcgaagaacttcgcatagatgttcagcatgcgcagggtctcctgcattgcctcctcggcggttgcgtggacggtatgaccctcctgccaccagaactcacgggaacgcaggaacggacgggtggtcttttcccagcggacgaccgagcaccactggttgtacagcttgggcaggtcacgccaagaacggacgatcttcgcgtaatgctcgcagaacagggtctcggaggtcgggcggacacacagacgctcctcgagcttgtcattgccgccgtgcgttacccacgcacactccggcgcaaagccctctacgtggtcggcctccttctggagcaggctttccgggatgaagatcggcatcgcaacgttctcgtggccggtctccttgaacatggtgtcgagcgtgtgctgaatgttctcccacagcgcctgcgcgtacgggcgcatgatgatgcagcccttgacggacgagtagtccgccatctccgccttttttacgatatctgtgtaccactgcgcgaaatctacgtccatcgacgtgatctcactgaccagctttttcttttcagccattattttcacctttcaagttggatttttctctgtttcatttcttttcgcttttctgaggcggaagtccggactgcaccttacttcagcttgttctttacctcgtaatcgagcttctcgataaattcaccgagctccatcggggtggtctcgccggtcttgcggttgcgaacggagatgatgcccttctcctcgtccttgtcgccgataacgatcatatacggcaccttgtgtacctgtgcctcgcggatcttgtagccgatcttctcgttgcggtcgtccatggtggcgcggaagcccttgtcggtcagctgcttcatgacctcctgtgcacagggaatgttgcggtcagtcatcggcatgacgcgaacctgctccggagccagccaggtcgggaatgcgccggcaaagtgctcggtgataacgccgatgaaacgctcgatcgagccgagaacgacgcggtgaatcatgaccggacgatgtttctcgccgtccgcaccggtgtactcgagctcgaagcgctcaggcagctgcatatcgagctgaatggtgccgcactgccaggtacggccgatggagtctgccagatggaagtcgagcttcgggccgtagaacgcaccgtcaccctcgttgacaacgtagtccttaccgatctcggtgatcgcctcggcgagggtcttttcagcgaactgccagtccttgatgtcgcccatgtgatcttccggcatggtggacagctcgatctgataggtcagaccgaaggtggagtaaacctcatcgaacaggcggacgacgttcttgatctcgtccttcatctgatcccaggtcatgaagatatgtgcgtcatcctgcgtgaagcagcggacacggaacagaccgtgcagcgcgccggacagctcgtgacggtgcaccagacccagctcgccgacacgcagcggcagttccttgtaggaatgcggctgagacttgtaaacgagcataccgcccgggcagttcatcggcttgattgcgtagtcctcgtcgtcgatgacggtggtgtacatgttctgcttgtagtgatcccagtggccggagcgctcccacagcttgcggttgaggatcatcggggtggagacttcaacgtagccgtagcgcttgtgaacctcgcgccagtagtcgataagggtgttcttgagggtcatgccgttgggcaggaagaacgggaagccggggccctcctcggtcagcatgaacaggccgagctccttaccgagcttgcggtggtcgcgcttcttggcttcctccagcatattgaggtactggtcaagctcgtccttcttcgggaacgcggtgccgtagatgcgctgaagcatcttcttggacgaatcgccgcgccagtaagcgccggtgacgttcatcagcttgatgccgttgcccttgacacggccggtggagtccagatgcggacctgcgcacaggtcggtgaattcgccctgcttgtagaaggagatggtcgcgtcttcgggcaggtcgttgatcagctctaccttatagggctcctcgcgctcctgcatgagcttgacagcttccgcacgcggaagctcgaagcgctcgagcttttccttctccttgcagatcttgcgcatctcggcctcgagtgcgtccagatgctcctgcgtgaaggagaacggtgcatcgaagtcgtaatagaagccgttttcgatagccgggccgatggccagcttgacctccgggtacagacgctttaccgcctgagcgaggatgtgggaaaccgtgtgacggtacgtgtcacggtattccttgttttcaaacgtgtacttgttgtcctcagacatggttttatctcacctttcctgtcagttttaacaaaaataagcgtaatccgtgcagataaaaaaattccgctcaccgctgagcgtgagactcaggggtgagcggaaagcccacggtaccaccctgcttgcagagcctctgcatccgatacacgaggtttcggagaaggcgtttctgccgcttggggtcttataacgtagacgaaacgatacagcttcagcacttttctaaaggcgttgggccgtacagctcgggaaaccggtagccgttccttgaggtctgcggacgctttcagccgcgtcatccgctctcttgcaggaccgtatttatggaaacagcatttttccgtcgaagccgataatattgttaagtttgaattacatggactattttatactgtaattactggtttgtcaacccctttttcgcaaccttttacagagaacagaagcagctgcactgcttagcgggaaagggaaaaaggggttcagcatttgagtgctgggtcagagatgttctttgtaatgcgttcataaaaggcacgctggtcatccatggaggagaacgcctcgaaggggacgatgatggcggaaaactcgtcgacgaaaatgaagtagtgcctgtcatcggatgcagtacgctgtactgcgtcatagcggtaaacgctgtcttcgttctcccccttgagctcgaagtcttcatcgcgcagggtgagcgtcttggggccgcagagctgcttgttgttggcgtttttgaggatgcgctcggtgtttttcacaaccttgcggcgcatataccacggcgttccgaaaaagcagaccgcagcgagtgcgagataaaccagaccggagacgagcgtcagcgcgtgcagccagtacatgagcaccgaaccaccgatgatgacaatgacagccgttgcgacacgcatcatccagatggagcgctgtacgacagcattgttgttgaagtagttaagattaaagtcgatgtaatcctgtttggaaacactgtatttgaattccaaggtgaaagcctcctctttaccgtttggtaaagagtataccataaaaggcaaaggcatgcaaccggcgcccgtccgctccccctgctgccgggagagaaaacctgctcggatatcagcgaatctcttggataaacgttgtaaaagcaaaaaagccgctctttctctcgaaagaacggctttatctggtccgagtgacaggacttgaacctgcggcctcttgacccccagtcaagcacgctaccagctgcgctacacccggattgatctgtaaggcttcaaaccttactcgtctattctatcaaaatggtcattaaatgtcaagcataatttttaaaaatatgatttttgcattgctgaccggaagcagaaagagcgcagccggttttgtccggactgcgctctgattttcttatcctgcctgctggcgggaatgatggaactcgatctgcttggttttaatgaaaacactcagtttcttgtatgcaagcatcgtgattacggtgagaatggcacccttgatgagattgaaaggcagaacgccgagcaacaggtacatgcccatgccggtaatgctcggattgaccgccgagcaaagttcaaagatagcgtccagattccagcccattccattcacatagaacggaataatcaagaaatagttggtgagcatacccatgcacgccatcgcgaccgaaccaacagcacagccggtgaccgccatcttgcggcttttgtgtgcgcggtagaccagaacagcgatgatgacaagagtggacagcatgagaaagtctgcggcctcgcccgaaccggcggtctgggtctgtgtcagatggatcagatccttgatgccgatcatcgtaatcgccggagcgatgccgaggatgaatgctccgaccagaacgacagcgcccgaaagatcgaccttgagaaagggcggcatgaacggaatcggaaattcaaaatacatcataatgatcgcgatcgccgcaaatactgcggtgcaggtaattttttttgcttttgtcataacagcttcccctttgcgtgttctgttttcggtctgctgaccgagggaaaacaaaagccctttggaaaactccaaagggcgcacagacgtaccgaaatacacctgtttctctcatccggactatgaccgtcggtcgggatttacacccgtcatgccttgcggctcgcagactatcgggactcacgcccgtttactgccggtggagactttcactccgccctgaaacagaacattttaattgatggctttattataagccgtctctgctcttctgtcaatccccggaagagaaactttgcaggatctcgcaaagctgctgacgagtgccgacagcattgatgaattcgagcagtgcgttggcagtcatgtgctgcggcagatcgagagctttgaggacggcagcacggcgcaccgtgctgtccgggcggccggacagaccccattcaaagaagtcggccttggtaatcgtcctttccgcaggggcgcgctctccttccccttcaaatgttgcgccggcgcggcgcagtgcgtccaagataacccccggacgcatcccctcgacaccgagcttgccctccttggagccatgctttttgcgccgctccttgccggcaacatcggggacatatgcctgcttgatcctgccctgagggagagcccccttgagataattacggatgacgaagcctgcgccgtcgctgtcggtcagcacgatcaggccgcgcgtttcggcaatgcggcggatgaccttaagctgatccttgttattgaagatacgaaagccgccggtttcgaggactaccgtgtcgaccacctgacggacggtattgacatcgtagcggccctccacgagaatcgcttcacgcagttttatcatgatttcgcccctttcacctcggccgcaatgtcgagcagcgtcagctcgatcagcttttgcctgtcgacggcgcttcccttcagctccgaatctgtgcgcgcacagagcgaagccgcccgacgcagcaccggaagcggaagccgccgcgccgcgctctgtatcttcttggcataaaacggcgattttgagccgatcatttcagcaagataccggtctcccccgcgtgtttctgcacagatcttcgcagcgtacaggcgctggatatgacgcatgatggtcgtgaagatgacgacctcattgttcttgagacgcaaaagatccccgacgagggcaactgctttttcaaactttcctgccgcgatcgcatcggtcaggtcgaacactaccgcatccagtactggtgagcagactgcgtcgatgttatagcgcttgatctcgcctgtcgtgcaatgcgctgccgccttttcgatctctcccatgagattggtcagtgatgtgccgcacaggaagatcatataggctgcatcttcatccgagatgatacagttcagctcacgcgcacggcgttccagacgttcgatgagttctttttcctccagacgcgcaaattcagcagtgcaggcctttttttcaagcagcttgtacattttggtgcgcttgtccggcttggcttcaagaatgtcgaaataaaatatcagacagacatagtccggcaggtcggacagcaggtcgatcagttggtctccgaaagacgcaggcggcgcataaatattgaaatcggtcacgatgaccagcttttgctcgctcatcgccggatagctgtctactgcctcggtcagcgactcgagcgtcagcgtcttgccgtccagttcgatgagattgaagtctgcgaatgtctcatctacgactttttttctgagctgccgcagatagtattctctgaggtaggcttcctcgccgtacaggatgtacagcgtctcaaagctgccctttgcgaggtcctgcttgagcttcagccgcccgtttttattttgcttttcgacagccatgccgtcactcctttttgtaccggcggacaatcccgccggatgtatctgtgctttcgcacggaacgctgccgcaacggagcgaagtggtttcgcgctcggcggtaacgagtatttttcttgtctgcatgtgattcatcagcggcacgagcaattctgcatcgccggctgtgctctgcgcgagcatcagctcatccgcgcgaggcagttcgccgccgttttcagcgaacgctgcgagctgcttttttgttgcgctgtgcagaaagagaaccttgtccgcgatacagacgccgagcttcccctctgcaacggggaaaacagaaacgggcgccgccgcaccgatgatggactgcggttcggaaatctcctcggcctgatactgctcacatagccgcataagctccatattcttcgcagtctcggtgcagccggacggaataagaatgcgatcgaccctgacgttttccatcagctgcggcaggtcgcgggcatgccccatgtcgaccgctgtgagaatgagcgtgtcgatgcgcggaaccccgttcagacgcatccattcatgcgtcagtgccgcagcgctgcgcgaggtacctgcacagtcgataagcgtcgcatgaccgcgcgtatccgagaggataaccgcctgtcccgagccgcagggcaggtatgttacgctgtactcccctgttcggagaacggcgtctgtgagaaacagcccgccgaccgtgcagcagataagcggcagcacgatgcgccaccgaacgcgtgagcctgcggtcagccagacgataacagcgcctccggcaagtgcgagcgccgcaataccgagcggacggctgaggtcgatcgagccgaacgggagcgatgaaatgcattcagcaagaaccagcagaaagcgcagcatcagccgcagcggaacggcgaaaaccggcaggactgccgggcaaaacgccgaaactgcgcacagcagataaccgaagacaaagcacatacccgtgagtgcggctgccggaagatttgcaagcagagaaagcagagacgcgcgtccgaaacagacgagcgagaccggcagcgtgaagattgaggcgcagaccgtgcacgagagcgcccctgccggaaaggcaagcagccgccgcgtcagacgcgcacattccgcgaacggcgcgagcagtctgtgctgcatggagggcgcgaacaggataagaccgagcgtcgcagagaacgaaagttggagaccggcgcctgcggcagcgtaagggttcagcagcaggagcagcgcaagcgccgccatgagagacagcttgggattgacgtcccgacgcaggataaaaccgagcgctgtaataccgtacatgacggcggcgcggatgacggagggcgttgcgcccgcaaccggtacaaacagcagaatgagcggcagcgagagataaacaccccattttctgccgagcagcatgaagcagaacgctgcgaggtagccaacgtgcagtccggagaccgcgacaagatggctgagcccggccatgcggaaggacagtgtatcgtcatcggacatgccggtgcggtcgcccagcagcagaccgcgcagcagtccggcctcccgttcgggcagcgctgcggaaaccgcatttttgcagaagcgcgcgatgcgctgcggcagataccgcggactgccggacgcggagccgagacgttcgaaaccgatcacatcaccgctcttgtccctggtggagaatgcggcgataaagaagccgtccgccgcaagcgagcgttcccggtcgggattgctgcggtaaaatgtcacatgcgcttcgatgcggtctccggcgcagagcggtgtatcactcagcggaagatagcagaaggtgcggaagctgcggcgcagataacggttcggttcaacgcgaagctcagcgcgctggctgtcctcatagaccgaggcatcctgcaaaaccgtcgctcgaacgactgcgctgcggccgttcagctcgcggacgggctgtgcaagatacctgtcgcagagcgacagctgtatgagtgcaaagactgcggcgcacagcatggcgaggacggtaaacgctcggcgatgcctgacggcgaatgccgcgccgatcagcagcacggcgagcgcgggaaggcacaggaacggtgacgggacgagcccgaaacgcaccgcgatgagcagcgtcgcggcatatgggggcacaaggtacagcagcggtcgctcgaacatggcctctcccccgtttctcctgccgcagcagggcagttttcactaatcagtataccataagccgccgggataaacaagtacggctcccgccgcaagggcaggagccgcagagatttacttgttcgagacggtgatgatacggattttgccgccgtcctcggccgtatcgttcgcgtacagtgcgaatttcgtgtagttcgatttcgcactctggagcgtagcgatgaattcacggttttccgtgtcgtaaatgccgagctgatcggcaagcgcatagtagccgtccttcgtgcggacgccggaagcgccgtcgaaagccgtgcggtcgaccgtgtcgatgagcttgagctttttgatgtcgagcgaggtgtttacgatgctttcatcggtcgaataccccttcgggactgcaatcggaccgccggagagaccgctcggaagatcgagaaccttgtaggacgcctcaattttcttcttttcggttgtatcccagtgatttagtacgacatagtacttgtaagaagacggatgatttttacggtattcgtcctgtgcatctttggtaagctcattccaagatacgttgtcaacagttgacggatgcgtagaactgccatcatcaacatgattttgttgtgcttcttttgttagattgttccaaggtacgttcttgagaccatcgcttggtggaacaaacttcttttctccatgtcccataccatacagccagctatcgccggttacatcggaaagaactatattcgtaattgttcctgcactgtcagaaacggtataacggatatcagaagaaggtattttactcaaatcaatatcagcaagtgcgatatggttaagcggagcaccgggaatgacttcctcatatacctgtacacgcggagaaaccagtttgctgccaagcttattatccacaattgtccattcgccggttgtcttgttcgagaacgagcactttgtaaggactgctgtttctccactctgggtgatagagaccagacgatgattgtaagtatcacgtttctgggtttgaagcgtatcagggtcatcaggcatgttgataggaatatcgcgcaagatgatgccatttgtcagaataacagttgcctgtttctcttcaatctgtgtcacaacaccctgcatatcagccgagaccgtgctccgcgggtacgctgccgcgacgtttccgtctgcgtcgaacaggagcgtaatgtaatccttgagcttcatatccttgaagaaggccgcggcgctgtcggaaatccggaacgaattgccgtataccttgacctcctgcggatagctgacggttgggccgccctcactataacggccgctcacacgggtatccgagaccagcgcctgtttgttcgcggcgtcgagcgtcacgacatcatactttttcaggccggacgggtcgatgacagccccattcttgacgatcttgtattcgctcgggatgtttgccgaggtggcaataccgtaaacgaaggtgttggcgtgagaagtactcgtgccgggcaggacagccagcagcgcaagcgagccgtattcgttgtagtaagcgtgcagcgtgtcacccggcagaatggacgaccagacctcggccagcgatttgagcttgctgtcctcggcagagctgtcgcgcgaaatataagtcggcgtgtcgcggttcggccggaaggcgccggttttggtcacgatgcggtcagcggctgcatttacgacctcgtaggtctcctgtctgctcgcggtgtcgggtacgacgccgacggcgacgttgtcgccctttttgccaataacgagcgtaccgtatacgccgatcaggctgcggtcgagtttgcctgcggtcttgcgcgcagagagcgtgccgttttcatagaaaagcgcttcatctgccgcaagcgagctgtcggtttcgctggtttcgaggagagtgcagttttcaaccgtcgaggatgaaacacggctgatgaggggcgagccctcctgtccgtccgagcgcgtcgaggtgccgagcgtattgagcagcatggtcgcggcgtccgcgcgggtgaccggtgttttggcgtccttgatggatatgccctgtgtcagaccgagtgcgttcgcctgcgcgatgtagtccgccggccagaacgggccgatgtcgctttccttgtagccgagcatgcgaagcagcatggtgcatacctcgccgtaggtcagctgtctgtccggaccgaatgtgccgtcggcatagccgcggatgatgtagttgtccttgaaatccgggtggcggagcgccgcattgacgtatcgcgccgcccagtgcgaggcgtgcacgtccgggaagatcgtgtagcttgcatagggacttgcatcgtcaatgcccatggcggtgacggcgagcttgcagaattctgcccgggtcagcggacggttcggctcaaagcgattgtttcctgtgccctgcatgatgccgagcgagccgagaatggaggctgtctgctgaagtgagccgctcgaaatatcgctgaaagccgctccggcaggtgccgccgtaagagccagtgtcagacacaggctgataaaacgttttttcatatctattcttacctttctcttattgcgtgcgcagcgcatcgaccggctgaagattggatgccttgttggcagggtacaggccgaaaatgatgccgagcagagcggaaaacagaaacgcaccgagcacaagacccacgcttggcagcacggtgaactgttctacgttcggcagatacatattctgctggagctgacgggcaagcatgaacctgccgagcaccgccgaggcaaagcagccgagcacaatgccgatgatgccgccgcagcagctcacgaccgccgcttccacaaggaactgaccgatgatgtcgcgcttgcgcgcgccgatcgccatgcggatgccgatttctcgtgtgcgctcggtaacggacacgagcatgatattcatgatgccgatgccgccgaccagaagcgagatgctcgcgatgccgccgccgagcagcgccatcaggttgctcgaggcctcctgctgctgctgagactgactgttcgagtaggcgctgaaatagccgccgtttacctcgcagcgcggctgcatgaactccgggagcgtctgttcggtgagcgtctggatgtcctcggcattttcggccttgatgatgtactgatggtcgctcatgccctgtgagctcatcatcaggctttgcagcgtgtacggcatgatgagcatctgatcatttgtgttgagcttgccgccgtatttgcctgcatagacgccgacgatctcgaagctcttgccgccgatgcggagctcctgtccgatcgggctcatcgcgccgaagaaatacttgcgcagcgtctcgccgatcacacatacccgtgcgcggctcttgcagtccgcctctgtcaggtcgcgccccgcagagatcgacatgctcgttacctcgccgtagtgttcgttgacgaaatacatctgaagatagccgttgtccgagctgttcgagtccattttcttgctgcggtactgcacgccgccgttctgccagtcccagtactgtgactgcggcgaccatgcggcgacctcgtccagcgagtcaagatattcctcgaaatccttccagtccttgtttttggcgccccaggcgtagacatcgatgcggttcgcgcccatggcctcgtattgcaggcgctgcaattttgtcgtgccctgaatggaggcgacgatggcgataacggacgcgacgccgatgatgatgccgagcatggtcagcagcgagcggatcttgttgttgagtatggatttgagagccatgcgaacggtctgagtccagttcacatcttcaccccctcgctcgcctggtcgctgacgatgcggccatcctgaatggtgacgattcgttttgccatctgcgcgagcttgttgtcgtgcgtgatgaggatgatggaagtcccctcctcgttgagcgcggtcagcttgcgcatgatgtcaaggccggacgccgagtccagattgccggtcggctcgtccgccatgatgatgggcggctttgccgccacggcgcgtgcgatagcaacgcgctgctgctggccgccggacatttcgcccggccggtggtccatgcgcttttcgagtcccaccgagcagagcgcgtcagcggcaagccgtctgcgctcctccctgccgatgccgcggtaaatgagcggcagctcgacgttctcgatcgctgtcagcgccggaataagattaaatccctgaaaaatgaagccgatctcgcggtttcgaatgccggcgagtacggaaggcttcatgtcactcaccggctgcccgtccagataataggtcccgtaggtcgggatatccagacagccgagaatgttcatcagcgtgcttttgcccgagcctgactgaccgagaatgcacagaaattcgccccaccggacggaaagcgagatattgtcgagcgcacgtacttcgttttcgcgtccctcgttgtatatcttgctcatctgctgtacatcgatcaacagctcgctgcgctcctcacccccttgttcggagcgcatggaaagtgtattctccctccacatatcactgcctcctgttatcccatgcccatggtatccatattggcgtagagatcggtcggtcccgcaaggaataccgttgttccctcgtcaatgccccacaagatttcggtgttggtcgagtcggcaatgccgatttcgacaggcacaagctggaatccgtctggaatgccctcggtgccctccgggatggggatggtctcgtcaaacgggatttcgtttccgttttcgtcggtcagcggctttgcaaataccgcagttccctcctctgtgttgacgatagccgaggacggaacggtcagacagtcctcggaagaggctgtcgtgatcttgtagtcgaccgtcatgccgctgtggatggactgaccgtcgatcggatcgaccgagatgaccgccgagaaggtcggcatgctgccctgcccgccgttggagttcttgtccggctcgagcgcaaccgactcaaccgtgccggtcagttcaagctgcgagccatccgagttgtacatactcatgatcgccggctggccggtctgtaccgcgcccatatcggtggacatgatggaagcattgacgataatattgctcagatcagcgacaacaacgagcgggtcggcgccgctgacctcctgatcctctacggcattcatcgtaacgacgacgccgtcgatcggagagacgacggtcgcctgcgcgatcagcagctgaagctcggaaatgcgggcctgcttgtccgcaacggcagtctgtgcggaaacgaccgtgctctgcgcggaggagatcgagctctgggcgttctttacctcgtcctggagcgcgtcgctcgtcatgcgcatgatggctgcgcctgcggaatagtttccggtgccgctgtatgcggtgatcgtgccggagaccttgctcgtcacagcgatctcactgatgtactcgagcgaaccggactccgccggatagatcacgcccgcagttcccgcgtttacggtcgcggtcgcggccattcccttggtgagcgtgccggggttgttgaccgtgatgttaacgcgcacgagctttacgccgtcgctcgatatgtggctgctcgactccacgctgctgaccgtgccgccgacctcgctcatcgcggacggaatggagaccgatgcgtactgtccggccttgatcgaaccgctgtatgccgcgctgaagtagatggacagcttcatctgtctgtcgtttaccatgtagccgagcgtctgaccctcgctgatctgctcgccgacacgataggtcgtcgcgttgccgtccgaatcggccgccgctacaaaccggccggtgatcggcgcggtaacattgagatggttgagcttgttctgcgcggaaacgagcgcattctgcgcctgcgttaccgtgttctgcgcctctgcaacggtgcgctgcgcctcgacaagctctttctgcgcggtctcgagctccttgcgcgtttcagtcggatcgactgcaacgagaagctgaccggtaacgacctcatcgccctcggtgacaagaacctgagaaaccttgcccttgatgtcgcggccgagctcttcgcgcttgcgggctgaggttgtgccgctgccttcgatgtaggtctcaagcgttccgcgcgtcgcttcggcagtctggatcgtggtgtcgccggtatcggtctgccgcgcgtgcctgacgaaaaatacgcctgccgcggccacgatcacgacaagtcctgctgcgatggcgatacgcgccttcttatttagcttttttttgcccttgttcatcttgtctgcgtaccggttgcgtctgggcgcaggtgtactctgcgctgacggcgcggattccggcttcgcggcagatcccccattgtccgccgtctcgttgacggcgtttaccgccgcgctgtcgagctttttcgtctgctcaagcggctcggggccgccgggctttcgtctgtccgtttttttctcattgctcatgtgaaaaatcctttctatcctttgcctttactgtgtgtttttcagccagtccgcgaagaaagcgtgcaccttgtccggcagtgcgtcgagcgcgccgtcattgacgaatacgcggtcatactgataaccggctacaccgtcatccgagcggttgccgagcgcaccgcgcgcctgctccattgcaggacgggtcacgagcagcgtgcggcattcctcgcctgcggactcccgaaaacgggcgatctcctccggctcacggatatgtacgaaaagcagctgctcatcgcttcggcggaatgcttcaagctgctctgcgcagtagcggaacggaagatcgttgaattcggagcagctctgcttgagctcggaaagaaaacgccgggacgccggggttttgacaccgtcccagcctgcggcgcgtgcgacttgcagaatgggcgtgatggacgagatgtttctcgtcttccagaaggcggctgctgcctcgcataccgtatcctttccgactcctccgctgccgtttataatgactaccagcttgtccacgcggacacctccaaacaactgttgacagccataaaaacgactgcattcttacggcaataccgcagctttaattgtgcggtgctgccttatatataaagtgtaccacaaccccctcttgctttcaagctggacggacgaattgtcaccaacttttaagacggcacaggggcatctccgtttgctgtacggaaatgccccctgtttgtcacaatatgatgcagatcagaccgcctgcgttttcattgatgatcttttcgagtgtttcacgtatcttgctgcgcgcgtcatccggcatacggctgagcttgtggctcagctcctcccgcaccagctcgctgagcgatttgccgaagatgttcgtttcccagatcttttcgggcgcgtcgcggaactcgctgagcagataatgcacaagctcctcggactgtttttccgaaccgacgatcggattgacctcggcgcggatattggcgctcagcagatggatggacggcgcggaggcacgcaggcgtacaccgtagcggccgccctgacggacgatctcgggttcctcgagtgtcagctcctcggtcgagggcatgacgatgccgtagccggtctgctgtacctggtcgagcgcgccgtgcagacgttcatagcgctgccggattccggcaaaatcgcgcagaacggaaatgaggtcggcggcgtccgtgatatgcacgccggtctcctgctccacgatgccgtagaaaacgctctccgggacttctacgcgaatgcgtgccgtgccgcagccgagatcgagctgctgcgctgcggcggatgcgatatactcgcttccgcacagcgtatcgcagatgccggcaagatcgcgcatgcggctttcgggtgaggcggcttcgcggatcgtgcggtagatgctgcgctgcacctcggactgcggcggcagggcggcaatgtagcgaggaagtacgagaccgagctcgcagagcggaaattcgtataaaactcgctgtagaatttcagagataccggtctcgttcaaatccgcgcagtttgcagcgaccggctcgacgccatactgctcgcgcacgaagctgcaagttttttctgcgcgctccgctgttggctccgaggaattcacgattacaagaaacggcttgccgagctcctgcagttctctgataacgcgcctttctgcgggaatatagctttcacgcggaatgtcggtaaagctgccgtcggtcgtgatgacaagaccgatcgtagaatgctctccgatgacgcgatgggtgccggtctccgcagcttctgcaagcgtcatcggctcctctcgccacggcgtcgaaaccatgcgcggcgtatcattctccatgctgccgagcgctccctcgaccagatagccaacgcagtccacgagccgcacgcgacagacgccgccttcgggaagtgcgatctctgccgcctcctcgggcacgaattttggctcggcagtcataatggtgcgtccggcgccggactgcggcagctcgtcacgcgcccgctcccgtttgtacatgttttccatgccgggcaagaccatggtctccataaagcgcttgataaaggttgatttgccggtgcgaaccggcccgacgacgccgatgtaaatatcaccgccggttcgcgtgctgatgtcgtgatagatcccgttctccatacgctaccgcctttcagatccgcagcggaacgagcagcatggtgtccgaaacagccgccgtgtcagacggcaggtcgttcgccgcgcagattgccgcccgtgtgcttccgcagtcctttgcaatgtcccacagccgtgcttctcccgcgatatggcgcacgagcagcgtcacgcccgtgtccacctgctgtgctgtctgctcgaccgagcacagatggcgcagcgtcagcggcgtctcgcgctcgcatgctccctccgccgtaacggtcagcgtcagtccgcgctctccgactgtctgcgcacgaacggacagtgacgggcgcagacaggtacctgcttcgatgccggtaaaagtcagcggcaggacacgctgcacactgcaaaggcgttgttcatcgtcgagacagagcacctgcaccgaggcggagatctgcaatcccttttcggccgcacgcacgccgcagcatatcgcatccgcacagataacatgagagatatgcgctgcggtctggatgctttcgacggattcggcagaaaacggctgcggctccgggctgctgtacaggctgacactgtcctcctgggttttcagcagggcgcccggcagataaaaatctgtaatgcaatgcagcgtatgactgcgccgcagcaggaccagtgcgtccgcattcactgtgcaggacagcgaatgatcggctgcgatgcggcattccagactgcgtaccgtgagctgcgcgtcgggcgtatcctcctcgaccgctcccgtcagttcgaatacctgcgtaaagggtgtggttttactgatcgtgcggactgcctcgtcaagctgcatcaccagacaccgcagagccgcctctccgcgcacgacgatgcggtcacgcattgcgcggcattcagtgatatgcagcgtacaggattgcttgagaagcgaaagaccgtctgtttcctcgactgggatatcctccagaacggagaacgaaaaaagctgcgcttcgtcgggcagaaccgcttcacaggtctccgaaagcagctcggtatgatcgtctgcaatgttttctgtgtaatcgcaggctgttttgtcgtagcattcggctgtcagcacaagatcggtcgcaatgctcagcttgcggctgttgacgaccgaggcctcgaccgcgctcacacggcattccaccagacaaaccgagctgctgtcgagctgcgcacattcttcgatgtgcgcgaagctgagcggcacctccagacgccgcagaccgccgccgttttccggctcgtacaaaatgaccgcctgaaccgtgcccgagataagaagacggccgttctgcggtgcgtgatctccgatggcggccgttccgcaggcatacacgacgcgacctacatcaggaaaagcgtccggcacaatgcagtccgctgtttcggtacaggcgcttgtttgcgccagttgccgcctgcaatagacaatgcgtttctgctccagttccattcttgaaatctcctcctttctgactgcgtttctcggcagccttgccaacaaagagaagtttctggatgcacagaccggcacctatccaaatatgagcgattgggaaatgccgccggaggaacgacagcaattagatcaggaaacgactgcgctttccaaagaactgaacgaaatgctcaatgttaaaaaccgcattgcggaaattgagcaggagttcttgcagctaaacccggagcagcattattttgaggaatattacgcaagttacagtgacgtgccaatggagagcttggacaagctgtcctctcagaagcttcttgcgctttggatggaatttgaacagcacgcagagcgtgagactcgcttgggcctgttacaaaaaatatccatcatgttccgattcaaccgtaatgcgctcaaattgtttatccgttccccggaacaggtcattccctatttgcaaaaccaattctatttcgtgaagaggtgggaactggaggccgaaaagcaggaattgaaccgaaagctggagcgctacgctttcgacgcgaagatggatgagctcacacagaagtccctgcggctgttccgggcggagctggcaacacggtatcattggcggaataatagacgatgctttgaaaagaacgatttccgccggaattccgtggagtttacccgtgagtacccggtggtgctcagcacgacctattccattaaggggacgctgagcattgaacatatctatgattacttgatcgtggatgaagcctcacaggtcgatttagctactggcgttttggccttatcctgcgcaaggaatatcgtgattgttggggacttaaagcaactccccaatgtgctgacggagaacgatattcgcaccagtgatgccatttggcaaaagtattccttggatgaacgatatcgcttttcaaaccatagcctgctttcttctgcactggaaatatggcgggacgcaccggtgacgctgctgcgtgaacactaccgctgccatccgaagatcatcaatttctgcaatcagaagttctaccacggacagctgattgttatgacaaaagaccatgatgagccggatgtattgaccatgtaccggacgattgccggtaatcacgcccgtgggcatctcaaccagcgccagatcgatgtcatccagcaggaggtacttccgcggttgcatcagcagaatttcgagagcatcggcattatcacgccatatcgggaccaggtggcagccattcgcaagcagctgggagatacttatgaggtggacaccgtccataagtttcagggacgggaacaggatgccatcattctgacctcggtcgacaatgtcatcacagatttcgtagatgatccccacatgctgaatgtggcggtttcccgcgcggttcattcgttgacggtagttacatctcaagacccgcacaatgaccagaccaactatggcgacttgactcggtacatcgaatataacaattttgaagttatccagagtcaagtctactccgtgttcgatatgctttatcaaggctatgccgagcagcgcagggcttacctgcaaaaacataagcggatatctgagtatgactctgagaatctcatgtgctccgtgattcaagaagtgctggccgaggaggcattttcctccatcggctgcgcggcgcatgtttctcttgcaacgctggtgagggactatgagccactgacagaggaagaacgccaatatgcccgcaatctgttgacccatgtggattttctgctgttcaatcagatggataagcagcccgtgctggcaatcgaagtggacggagctggtttccatgaggccgggagcaagcaggcagagcgagatatgaagaagaactccgttttggagaagtgctctgttccgttcctgcgcctccgtacagacggcagtggagaaaaagaaaaaatccggactgcactaaagggagaatgattatgccgagaattatcagaaacgcaatcagatgcaagaaatgtggagatatcatcgaaagcaaaactgtccatgatttcaagttttgcagctgcggctcgtgcgccgtggatggtggccacgactaccttcgcagatgcggaaatcgtgaggattgggaagaactgtccaaagcggaaaaagtggaagacaacgatgcattgacttgatcctgtcttgcggaaattggtggtgccaggatatcatttatcatcattcgcaatgccaccacaaattgcccagggctggcatcgttataaaaaaggctctctcagcacggatgcaaacaaaagtaaaaactgcgtaggggtatagctaacctgcgagcccgcaccacgagtaccccgcatcgcaaatagcggctgaaacacaatgttccagccgctatttttctgaaaaagtttcagtagctatttccgtcgaactgtggtatatgtttgtgctgcaaggaggcgagcgcatgaaatacaagctgctgaaagacctatacgattgcttttgtaccccgcctgaactccaggctcagaaacaggaaattgatgaatgccatcaagcacttagcaaggtactgggcaaactggagcgtcggctggtgctccagatcatcgacgcaaaagaccgtattgcggaggagacctccat

SEQ ID NO: 12950 - DNA, 166 bp, Unknown
  gut microbiota DNA sequence
atccagcacaaggctggcatgcaggattccgagtgcatcgtagcagtcaacaagtctgactccgctccgatcttcgacgtagctgactacggcatctgcggcgacctgttcaaggttgttccgatgatgatcgacgcgatcaaggctgctaaggaagctaagtaat

SEQ ID NO: 12951 - DNA, 455 bp, Unknown
  gut microbiota DNA sequence
tcaccatctacggcgtaattgatgcaataagtgttcagatcggcgctgacctgtatttcatgctcatcgtcctccgttgtgctgtatgccagaccaacatcagaaaggttggagaagtcagccattgtatcaaattcctcgatacagtaatcgttgatcaactgctttgcggttttgagatcgctgtcctcggcagtatgcgcttcggcgctctgtaccgcttcagtcaatgtgttcccatcgaacacatcattgtctggatcagacgcggcaagttctgcgcgttctgccggagaattgccctcgaacacatcgcgctccggcggcgtgttcctttggaacacattttcctgcgtctgttcggtaaggaactccggtacatcggcaaagccgatgctgtccacatagtgcgcggtatcctgtccatttcgatgcagcaccacaatatccgaaac

SEQ ID NO: 12952 - DNA, 43505 bp, Unknown
  gut microbiota DNA sequence
ggcaccacatcggagcaagccttgtatcgcttgctccgattttttttcaaaaagtcagagtgcgctcgcgccgctgctcctcctttcccaatcgaacccgcagcattgggcttcgattcggtggggcgagtgcaggccggaatgcgcttatacttatagactgtcgtgaaaccacagtttcgccgacagactgtgagcagaccgtaaggtctgctcttttgttatgtaaaggaaatcgcagagcaggagagcagagggcgcgatgtcccgttttccgcgcttaaagggcgaaaatctgtgctgaatgcacaaaattcgtcagatggcgctcggcgcatttacagattgttaactttttgctataatttatttgcatatcatggcgttccgccgctgcggcaggggggacgccgcagcaagagaaataatttaaggagtgtgggtatgcagaacaaaactatttctatggatgcggcgcacgatttctacgccaaaatgccgctggcacgagccattccgctcggactccagcacgttttcgccatgttcgtcggcaacctcacgccgctgctcatcatcatgggcgcgtgcggcattgcaggcggcgagttcgcggatcttcaggtcagcgtccttcagaacgcgatgttcgttgcgggcgtggtaacgctcgttcagctgttcgccatcggccccatcggcggcaaggttccgatcatcatgggcacgagctcgggctttatcggcgtgttcaacagcgttgcggcgacgatgggcggcggtgtgctcgcctacggcgcgattatgggcgcgtccattctcggcggtctgtttgaaaccgtgctcggcttcttcctcaagccgctgcgccggtttttcccggcggtcgtcaccggcacggtcgttctgagcatcggcctgtcgctgatctcggtcggcatcaattccttcggcggcggtaactccgcgaaggacttcggctcgatggaaaatctgctgctcgcactgttcgtactcgtggtgatcctcgtggtcaagcacggctgctcgggcttcctcggctcgtctgcgatctttgtcggcattattgccggctacatcgcggctatcatcatgggcttcgtgctcccgacgaccgcagtcgatgcggacggcgtggagttcaccaaggcgtgggtgctgaactgggacaaggtcgcacaggcggactggttctcggtacccaagctcatcccggtaaagccggtctttgacctgcgtgcgatcctgccggtactcgtcatgttcatcgttaccgccgttgagacggtgggcgatatttcgggcgttatggagggcggcatgggccgcgaggcgaccgacagggagctgtccggcggcgtcagctgcgacggtctgggttcctcgttcgcggcgctgttcggcgttcttccgaacacctcgttcagccagaacgtcggtcttgtcaccatgaccaaggtcgtcaaccgcggtgcgctgtccatcggcgcgattttcctcattctctgcggcctgatcccgaagctcggcgcgatcgtttccatcatgccgcagtcggtgctcggcggcgcagcggtcatgatgttctcgtccatcgtcatcagcggtatccagctgatcaccaaggaggaaatgacgccgcgcaatctgacgatcgtttcggtcgctctcggcgtcggctacggcatgggcgcgaatatgtccattctggcgcaggctccgcaggcgattcagctgatcttcggcggttccggtattgttccggcagcgttcgtagcgatcattctgaacatccttctgccgaaggataaataaagatcctttttaccgtcagctgacggtataccttccgccgatacagcggtgcgccgctggaggcgagatttacgctcaaagtgagcgtggacagtggccgccttcggcggccggggattgccgccgtctggcggcggagacaaaagggggcaagggcaccaaatggttcccttgccccctcttgactcccccaaaccctcctttgcgccgcgactccctttggtcgcgcggcgaaacgggggaaacgggggctcggttccgtgcgtcgggcagattttaggacgctgtcaggccctgaatttactttgcgtcaaccgccgcgcataacagtgcgcggccatccggtgcagggcgttcgcattcggctgcgaaaagctttgcttcgatcaagcgttgtgccttggagcaccaaacgcccctgtgggcccctcgcatttagacgcgcgaccgaagggagtcgcgtccaaaggaagatgagggggagtcaagagggggataagaaaccattcggtgtcttatcccccttttgccctctgccgtgggcacggcgtacccctgtcggtgggcaccgacatccccccgccgccgggcggcggcaatgcacacgccatgtcatggcgaacacccctcgtcccgggagggcctgcctcgcctgcggcggcaagccgccggaacggcggaaggtcaatctcctgcttcaggtaaaacctttttcagggctgcttcctgcgtcagcaggttttgcagcgcctccggcgtgtcggcgtcctcaagctccgccggatgcccggcggcaaacagccgcacgcattccgtgtgctgccgcagcacaacgccgccgcctttcccctcgggaaggtgcagcagtgcgtcaaaatattcgcgtccgaacagaacgggactgccgaccgtgaacggagagccattctccggtgcgcacagccggaaaatgtcccgttctttttcctgcgaggccgcaaacgcagcgcacatcccgtctacggtgctgcgccgcagcagcggctgatcacccggcacgaacagacagccgcaaagcgccggctgcccgcgcagcagggcggacagaccgagccgcacggtgtcgctgcggtggggcagggcgtgcagcagcacgggaacgtccagagcagtgcacagcctgtgcacctcctccgagcgcgttacgaccagacgcggcgcgatgccggccgttgccgccagtgcgcggcacagcatcggctcgccgccgaagtccgcgagcagcttgttcgacccgaaccgccgcgcaaggccggaggccatgatgaccgcgccgactgcttcatttttcatcggcgaaatactgcgcaaagcgctctttgtccgtgcgcacgcattcatcgcggtagctttcatagcgctgcatgaactcctttgcttcatcggtcagcacgctgccgccgccgccgcgtccgccgatcgttcggcgcgtaaacgcgaagccgagcacggcttcggcgcgccgcagcagatgcagcgccttggtgtacgccatttccatcgactgcgccgcgctgcgcagcgagccggtctcctcgactgcgtgcagcagccgcagcggaccctcaccgaaaaagcgctcgccgttctcgtcgtacagatagacccggatgaccggacgcataattaccacctccgcacaaaaaaactcgttgtaaattgataacgataacgctattatagcaaaaagtatggtaaaataaaagatgtaaagatagatttggagaaatctctccggaacatagagaggaaaaaacaaatgatcacgatacgggaatacaaaaaggttcagtcgctcgaggaagcgtatgagctgaaccagaagaagtcgaaccgcatcatcggcggcatgatctggctcaagatggaaacgctgaatgtcggtacggcgatcgatctgtccgacctcggtctggatgctgtcgaggagacggaaaccgagttccgcatcggcgcgatgacgacgctgcgcacgctcgagacccacgagggccttgcggcgtacacgaacggcgcgatgcgcgagagcgttcgccatattgtcggcgtgcagctgcgcaatctcgcgacgctcggcggcagtctttacagccgcttcggcttctccgatgtgctgaccatgtttctggcgctcgatgcatcggtcgagctgtacaagggcggcattgtgccgctttccgagtatgcggagcgcaaaaaggaccgcgatgtgctcgtgcgcgtcatcgtgccgaaaaaggcgggcgcgcgctttgactaccgctcggtccgcccgaccaagaccgacctgccgacgctcacctgcgcgtccgtgcgcgagggggagggctgccgctttgtcatcggctcgcgcccggcgcgtgccatgatcttcgccccggaggcgggttcggcggagcagatggccgaacaggtacagcgcgaggcggtgctcggctcgaatatgcgcggcagcgcggcgtatcgcagaaagctcgtcggcacgcttgtccgccgcgcggcggaagcactcgaaaacacggcggaataaagaggaaagattatgcttatcacgataaacttaaacggaaaaaagatcgtcgatgacgttccggcggatacgctgctcatcgactttgtccgcgcgcacggctgcaagagcgtcaagcgcggctgcgagaccgcaaactgcggcctgtgcacggtatttatggacgagagacccatcctgtcctgctcgatgctcgcggcgcgcgcgagcggtcacagcatcaccacgctcgagggccttcaggacgaggcggccgaattcggcgcgtttatcgcggaccagggtgcggagcagtgcggcttctgcaaccccggcttcatcatgaacgcgctcgcgctgttccgcgagaaggaatacccgaccgaggaggagatcaaggaataccttgcaggcaatctgtgccgctgcaccggctatgagggtcagctgcgcggcattctcgcgttcctcgcatggaaaaagcagaaggaggagggcaaggcatgaaggtcgtaaacaaaccgctgcgcaaaaaggacgcgatgcagctcgtcaccggtcagccggtgtacatggatgacgtgatccctgagggctgcctgtgcgtcaagctgctgcgctcgccccatgcgaacgccatcgtcgagagcatcaataccgccgccgccatgaaggtgcccggcatggagcgcatcttcacctgggaggacgtgccgcaggacggccgccgctacacgcaggcaggccagacttatcccgaggcgagtccgtatgaccgtctggtcatcgaccgccatgtccgctttgtcggcgacgtcgttgcgattgtcgcaggcgaggacgaaaagtgcgtggacaaggcgatgcggctgatcaaggtcaaatacaaggtgctcgagccgcttttcgacttcaccaaagccaaggacaaccccatcctcgtacaccccgaggacaactgggagagccttgcgccggtgggcgcggataataagcgcaatctgtgcgcgcacgaccagtgcggcagcggcgacatcgacgaggtgctccgcacgagcgacatcgtgatcgaccgcgtttaccatacccgcgcctgccagcaggccatgatggagaccttccgaacctattgcagcatcgacgcctacggccgtctgaacgtgctcagctcgacccagatcgtgttccatacgcgccgcatcatcgccaacgcgctgcacatcccgaagagcatgatccgcgtctccaagccgcgcatcggcggcggcttcggcgcgaagcagaccgcggtcagcgcagtctatccggcgttcgtcacgtggatgacgaaaaagccctccaagatcattttcagccgtgtcgagagccagaccgcatcctcgccgcgccatgagatgcagatgcacgtccgtctcggcgcaacgaaggacggcatcgtgcgcggcatcgacctctacacgctgtccaatacgggcgcttatggcgagcacggcccgacaacggtcggcctgtccggtcataagtccattccgctctacggcaaggccgaggcgttccgcttcacgagcgatgttgtgtacacgaacatcatgtctgcgggcgcgtaccgcggctatggcgcgacacagggcctgttcgcggtcgagagcgcggtaaatgagcttgccgccagactcggcatggacccgttcgagctgcgcgagaagaacatcgtcagggaaggcgacgtcatgccggcctattatggccaggtcaacacgagctgcacgctcgacaggtgtcttgcgcgcgtgcgcgagatgatcgactgggacaataagtatccctgccgcgacatgggcaacggcaaggtgcgcgcggtcggcatgggcatggcgatgcagggctcgggcatcacgagcatggacgtcggctcggcctcactcaagctcaacgatttcggcttctatacgctgcgcatcgcggcggcggatatgggaaccggctgcgacaccacgctcgcgcagatcgcggccgaagtgctcgagtgtccgctcgacaaggtcatcacgctcggcgcggataccgattcctcgccgtatgactccggctcctatgcgtcgagcacgatctacgtcaccggcaaggcgaccgagaagtgtgcgctcgagctgcgcgataagatcaaggcgttcggtgcggagatgatgggcgtaaaggccgaggaggtttcgtttgacggcgcgtgcgtgcgagtggagacgggcgagcaggagggacgcagcgtgaccctcgaggagatcggcgcgtcgacccagaataacaataacaccgcgctcgaagcgacggtttcgcatacctccgagatttcgcctccgccgtacatggtcggcgcggccgagatcgagctcgacacggagaccggtgaaatttcggtcatcgactatgcggcctgcgtggactgcggcacgcccatcaaccccaatctgacgcgcgtgcaggcggagggcggtctgctccagggcatcggcatggcgctgaccgagaacgtcacctatgacgaaaagggtgttctcgcggaaaattccttcctccagtacaaaatcccggcgcgcgtcgatgtgggacgcatccgcgtcgatttcgattgcagctatgaggatgccggcccgttcggcgcgaagtcgatcggcgaggtcgtcatcaacacgccgctcccggcgattgcggatgctgtgtacaacgcgaccggaaagcgcttcttcgagctgccgatcacgcccgaaatggtcgtgatggagtgatctgcctgcctttgtgcaggatagatagaatgaaaagacgttgtttatgcaacgtgcgagacttgaatggtcaatgtgcacaaaaacaaagcgttgtgattgtgagatattcataaaatccgactcttgtattcctgtgaagaatcgtgtattataataccagagttcaagaaaagggctcataagaaatggaaatacaagatgcaaaggagagaatgatcatgatgaagggcttttttaatggtctggtaagcgcacgtatgatggagctggagggcgagcgtgtatgcgctaagacgatgcagcgcggcaaccgtactgcacgctaagcgcagccccgaaaactgatattctgttgctcacatagatattgagaaacctcccgggaagccgggaggttttttgcttccctgcggaagcagaagacgtctttctttaccttttgccgagggtttacctacgtcgatacagcggcgcagccggtggaggcgactttacgccctcggagggcgtgtacctttgccgccgcccggcggcgggggcaagagggggccaagacaccctccgggtttcttatccccctcttgacacccccacatcttccctcggacgcgactcccttcggtcgcgcgtctaaaagcgaggggcccacaggggcgtctggtgctccaagggcacatccttgatcgaagcggagcttttcgcagcagaacgctgtcgccctgcaccggatggccgcgcactgttatgcgcggcagtttacgcaaggaaaattcagggcataacagcgtcccaaaagcgaaccgacgcacggaactgagccccgtttctcccgtttcgccgcgcgaccaaagggagtcgcggcgcaaaggagggtttgggggcgtcaagagggggcaagggaaccatagggtgcccttgcccccttttgtctccgccgccagacggcggcattcccgccggtgaacaccggcccccccggccgccgaaggcggccaatgaccacgtcctccgagggcgtaaagtcgccttcagcgctaccccgctgtatcggcggaagattttgcgtctgctgacaagaaaacgaaaaaaacaccggcgagagccggtgctttgcttttcgggacgaagatcagtcgaagatccactcttcggtcttttcctcgccgcagtatttcttgagggtctcgcggattgcgcgcggaccgcggttcaactcgttgaacatacggacaacggtctcgccgacgccgatctcgaacaggttgacgccgaaataatagcggttcgcaagcagcggatacagctgtgcctccgggcactcgtcgccgagcttggggttgcccatcaggctgcggacgtgctcgatgttcgggtccgggctgagctcgaatgcgtcgccgcggtcatcaacgccgaccagataacgcagccaacctgccagcacgagcgggatatagaccagcttggtcgcacggtgtgccggaagcatggagttatagtaagcgtacagcgtagtgccgaagcgcggcgcgatcttacgggaggtgtcggtcgcggtgcgctgcggagaatcctgaaggaaggggttcgggtaacgctcgcccagaacctcgtgcaggaatgcctcggggtcgataacgcccgggtctgcgaccatcggcattgcctcgttctcgctcagacgggtgatcaggttgacaagctccttgtccttcatctctgcgctgacctgcgtgtagccgagcatgcagccgaaaatgccgagcgcggtgtccatcgggttcatgcaggtcgagaccttcatctgcgcggacttctcgacgatgtcgcggcgcgtgatgataacgccgcactgctcgagcggcgggtggccgttcgggaaggcgttctcgatgagcaggtagtgcggattttccgagttgacgtagatcgcgccgaccgagcccttttcggtgacgaacggctgcgcgccctcaacaccgtcgtctgcgagcgccttggcgatgcgctcgtccgggtgaggcgtgatcttgtcgatcatggagagcgggtaggtgttcttcttgatgagggcgaaatactcgtcctcggtgataaagccgtgctgcatccaggcctgggtcatgtagcgcatggcgcgctcgagacgaatgccgttatccgagcagttgtcgagagacacgagcgcgagcggagcgaggcctgcgcggacgcgcgagaggcacagggacgcgagcttgccgaagaacgaacggcaggcgtccgggccgccttccatgtcggccttgtagtcgggcaggaagtcgtgcgcatcgttctggatagcgtagcccttttcggtgatggtaaaggtgaccatctggagggagggagcggcgaagacctccttgaggcgtgcgccgtcctcgctgagcttgaggctctcggtgacggaagcgatgatctccttgttgatggtgccgttggaatacagggtcacggacagcgacagatggtcgcaggcgcggtagcagcggtcgatcagctcctcatcgtagccgtcgcagcagatgatgccggtatcggtcagccctgcggtgagcaggcgctgcgccagaaccgcaggaaaagcgcggaacaggttgcctgcaccgaaatgcagccaggtcggggccttgtgcgtagactcgcgcacggcgtcaatgtcgtactgcggcaggcggtaacccttccaggacgcgttatgtttgatactctcttttgtcagtttcataaaagcggtcacatcctttcagtgaacggagcagcgagcggaaaagcgtctttttcaggcgaaaaggcggtcagtcgcgccgttcgtctcctatcgtatatagtataccaaaaaaacgggcgtttgcatagaacaatttcgtcaaaatcacagaacaaaaggaaaatggcgcaaaagaaagccgccgtagtaaatacagtgactgtcgcgcggcagcgcgcatgaaaaagcgtttgctgtgcaaacgcaaagaaaccggggacatgcgcctcggtttctttactttgagagggagaaagtttctgcacaggaactttcggacgtctgtgttctgcgcagtcagaacacatctgccggaaaagcgtgagcttttcggcaagataaaagccgcccggggagcggacggctgaaaattcatatgagtccggcgtgcttactgcgcggagtcggacgcggtggtctcggcgaccgtgcccggcagagcgctgtagatgcggcagacgagacgcatgacgacgtagacgagtacgatctcgagcgggaggagaatgaggttcttcggcacgcgcgtgacgagcagcaggctcatcgccttgccgccggtgatggtcagccagagcgtgttcaggcagatgttgcagaacacgttgatgcaggcctttgcgccgatggcgcgccagacggtgatcttacgcggatacagccacagaccccagatcaggccgccgaccaccgcggtcagcgtgtagccgggaaagtacgcgcccatggacaggttgccggcgaaatagccgagcacatccgtgcacacgccggccatcatgccgacgaccgggccgaacagcatgccgatggctgcgttgcacagaaagccgaagccgatgcgcagattgggcggcagcttgatggtcaggccgagcaggtcgagcgtgatgttgatggcgatgagcagggcggtcacggcgatgcagcgcgtgctcttcagctcatgcagcgagcggacgaagatattctgttttttggacatagaaaaagacacctccataataaattcatctgttgccacagcgatttaggagatgcctaaacagttgcagcagcgggatgcggctgcaataccgcaggggactcggtccctttcgtccgctgaacaactccccgtctcagcggcacttaacgcattgcagtctactctgctttttctgttctaattgtatcatgaaaacaccgcttgtcaagggaaaattgtacaatatttgcacggcgattttgtgcaattcattcgcggatatgctataatggtttcataggacgataccgctgttattgtgcggtgctgtcctcaggaaaaacggagggaaagaccgtgaaaaaagttaagggacagatgtccgagtcgctcgttctggggctgcttcttgcgctcgcaggcggcttttttgatgcctatacctatctttgccgcggcggcgtgtttgcgaacgccgaaacgggaaatatcgtgctgctcggcgcacatctcgccgagggcgattttgaaaaggcgctgcgctatctgctgccgatcgtggcgtttgcgttcggcgtgctgtccgccgagctcgtcaaacgccgcttcaagtcgcgtcagaaccgcgacatcaacatccactggcgtcagatcgtcgttctgggcgaaatggtgctcgtgacgatcgccgccctgctgccgcagtccgcgaacgccatggtcaacatcatcatctcattcgtctgtgccatgcaggtcgagaccttccgcaaggtgcgcggcagcgccttcgcgaccaccatgtgcacgggcaatctgcgttcgggaaccgagcagcttgtcatctggcggcagacgggagaccgcggcgccgcgagaaaaatgaagaattactattcgatcatccttgttttcatcctcggcggcgcgatcggcgcgctggtgacaaatgcagtcggggagaaggcgctgctgctgacgctcgtgccgctcgcggccgtgttcctcatcatgttcatcgaggaggagcgcgaggagctggaggaagagatttcgggaggaagagcatgaacatcagactgattgccgcggacatggacggtacgctgctcgacagccgcaagcagctgcccgagggtctgtttccgctcgtgcgcgcgctgcatgagcgcggcgtgcgcttcgctccggcctcgggccgccagttttacacactctacgagcagttcggcgagatcgcggacgagcttatgtatatcagcgagaacggcgcgatgatctgcgacggctcggagtgcgtcggcttttccgccatgccgcgggaggttgtgctcgacgccattgagcgggtgcgcacgctgcccggggtctatatggtcatttccgcccggagcggcgcattttacgagaaaaattcgtctgctgaggcggtgcggaatttcaatatgtactgtgcgcgctgcaccgaggtgcccgatcttgcggaattcgcctcgcgcgagccgatctgcaaggtcgcgctgttctgcgccggacgcgccgagcaggtgctcatgccggcgtttgccggctttgccggacgggcgcagctcgcgctctcgggcacggactgggtcgacctcatgcggaccggcgtgagcaagggcggggcgctcgaggagctgtgcggcacgctcggcatcacgacggcggactgcatggccttcggcgattacctcaacgacatcgagctgctgcgcacggcgggcgagtcctatgccatggcgaacgcgcacgagcagctcgccgcactcgcgaaataccgctgcccgtcgaatgacgaggacggcgtatgccgcacgatccgtgcggtttttgatctgtaaatcaggaaagaaagaaggagattattatggagatagcagaaatcctcaagctgcgtcagaacgcgaacggtctgaacaagctgatgaatatgcacgttatcacgctcgacaaggacggcggcgcgacggtcgaggtcgagctgaccgatgagctgctcaatccgctcggcatggcgcacggcggcacgatctttacgctctgcgacattgcggccggctcggcggcggcctcgcagggcacggtcgcggtcacgctcgacagcagcatcaactactaccgtcccggccgcgccggtcataggctgaccgctgttgcgtatgagcgcaagcgcggcagaaagacctcggtgttcatggtcgaggtgcacgacgacgagggcaagcacatcgcggacgcgacgtttaccatgttctacaccggcgcaacgctggacgatatgaagcattgagcggcgtgacgaaggcgatcgtcgagccgctgctccagtggtacgacgagggacaccgagacctgccctggcggcgcgaacctgtgccctaccgcgtctgggtgagcgagatcatgctccagcagacgcgcgtcgaggccgtgcgcggctattacgagcggtggatgcaggcgtttccggatgttcgtgcgctcgccgcggcggatgaggcgcaggtgctcaagctgtgggaggggctcggctattacagccgcgcgcgcaatctgcaccgggccgcgcagctggtctgcgagcggtacggcggcacgctcccggcggattatgaggcgcttctggcgttgccgggcgtcggagaatataccgcaggcgcggtcgcgtccatcggcttcggtctgtgcgtcccggcggtagacggcaacgttatgcgtgtcgcagcacggctgaacgacgattttacgccgattacggacgcaaaacagaaaaaacgaacgactggtcatttttcggagatcacgccggaggaccgtcccggcgactttaaccagtccttgatggagcttggcgcgatggtctgtctgccgaacggcgcaccgcgctgcggcagctgcccggtgcagcatctgtgccttgggtatcatcatggtcatgcggaaatcctgccggtccgcgccgcgaaaagagcgcgccgcatcgaggagcgaaccgtgctgctcgtgcggtgcggggaggaggtcggcatctgccgccgcccgaagaccggtctgctcgcaggcctgtgggagctgccctcgctcgagggaaagaccggcgcggacgagcttcgcgcgcgtctcagcgcgcgcggatggcaggtcgaaaagctgctctctctgcgcggcgcgaagcacgttttcacgcacgttgagtggcacatgagcggctttgaggtgacgctcgcggaaaaaccggagggactgaccttcgtcacgccgcaggcgcttcgcgagagctatgcgctgccgagcgcgttccgggcgttcctgtccgttctggaggagtgacaaaatgaagctggaaaccatcgtgcacgacattccgccgctttacgatgcggagtcgcgcgtgctgctgctcggttcgctgccgagtccggcctcgcgcgaggcgcactttttctacggccatccgcgcaaccgcttctggccggtgcttgcggccgttctgggcgagaaaacgcccgaaaccatcgaagaaaagcgcgaaatgtgccacaggcaccacattgcgctctgggacaccgtcgcgaaatgcgacatcgcaggcgcgtcggacacctcgatcagaaacgctgagccgaatgacatcggccgcctgctccgcgagagcaaaatcgagcgtatcttcgctaccggcggcaagtcaggtgagctttacagaaagctgatccaacccaaaacccatgtaccgatcacggtgctgccctcgaccagtccggcgaacgccgcgtggacgtttgaacggctcgttgaggcataccgtgtgattttgtaagaaagaaggcgtatttatcacggaaaagcagctgttccctaattctgcactcaaaaaactcatctggccgctcgtgctcgagcaggtgctcgccatcacggtcggtcttgcggacaccatcatggtctcctcgtgcggcgaggcggcggtgtcgggcgtttcgctcgtcgatatgataaacgtgctcattatcaacattttcgccgcgctcgcgaccggcggcgcggtcgtggtagcgcagctgctcggtgcgcgcgacaataagcgcgcctgcgatgcagcaaaacagctgtatctggtcgtaacggtcatctcactggcgatttcggcgctcatcatggcgtttcgtgagccgctgctgcggctgctgttcggtacgatcacggacagcgtcatgcagagcgcgctgacctacctgaccgtgagcgtgttctcgtatcccgtgctcgccatctataatgcaggcgcggcgctgttccgcgcacagggaaactcgcgcgtgtccatgctcatcgccggtctgatcaacatcgtcaacctgatcggcaactcgatcatgatcttcggcctcaaatggggcgttgccggtgcggcgacctcgtctgttatctcgcgcggcacggcggcggtcgttatcacgatcctgctgctcaatcctgagcacacggtctccctgcgcggcggcagccgcttccgcccggatggcggactgatcggacgcattttacagatcggcgtgccgaacggactggaaaacagcctgtttcagcttggtcgcgtgctcgttgtgagcatgatcgctctgttcggcacgacgcagatcaccgcgaatgcgctcgcgaacaatctggatgccgtggcggtcattccggggcaggcgatgagccttgccatcatcacggtcatcggacagtgcatcggcgcgggagacgaggcacagtgcagattcatggcgaaaaagctgatgaagatcacctatgcggttacggctctgacctgtatcacgaccatcgcgctcacgccgctcatcctcaaggtatacagcgtgtcccctgaagcgctcgcgctcggacttatcctgatcaccattcataatggctgcgcgatcgtgctctggccggcggcgttttcgctgccgaacattctccgcgccgcgaacgatgtacgctacccgatgctgtgctctattgcatccatggtgctcatccgtcttgcggccggctatctgctcgccgttcatttcggtatgggcgcgatcggcatctggatcgccatggtgggcgactggatgtgtcgcgcgatctgcttcgccgcacgcctgatcagcggaaaatggctgaaatacgctccgggactgcgcgtggtggcaaaccgaaaaatgtaatgcaaaataccctccggaaatcggtttcgaccggtcgcggagggtgttttttcgttctcctttcgttctcctttcggcctgcgttttgaggctttgcgaggttctgcgaggacctcaagaggggaggggatgcgcaatatccgaaacgatttgcaacaataccgaccggcaaaacaaaaaagaacgcaccgttttcggtacgttcttcgctttggtggaaggtggtggattcgaaccaccgaagtcatagacgacagatttacagtctgttccctttggccactcgggaaaccttccgtattcagttagctgaaagggtggagctggtggacggacttgaacccccgacctgctgattacaaatcagctgctctaccaactgagctacaccagcgtatcgcaggtttgtctgtgctgctcacctcagcgactcgtatataatatcacatcggtgagcagctgtcaacactttttcaggattttttattttccggggaaaaatttttcccgagcgcctcgatggagtccgagacctgctggagcacggtcagaaggtcgctcgacagggacggaaagcgttcgctgatcgcggcgggggagagcgagaaacgctgaagctcctcggcggtgatgccgtagccggcttcgccgcgcgcggcggtgcggatgcggagctcgtgttctcgggcacgcgcgtcgcaaagataatcaaagcagtcgtgcggggcacggaataccgcctcgatgctgccgggatcggcaagatacaggtaacggtagaccttgtagatcgcgatggcgagataagcctcgatctcgtgcggaagctgttcggagccggtcgcctcggcgagctcgagcaaaagcgcggccgcgttcaggatctggctcttttcctgttcggagccgacggaaatatccatgcgctcagcagggacggccgagccgtcgcgcgccatcgagcgcccgagcagataatcgcaggatacgccgtagtagtccgctgcgcgcacgacaaaagagagacccggctcgcgaagtccgttctcgtagtggctgagaagcgcctgggaaacaccaaggtctccggcggctgttctctgacttattttcttttcccgtcgcagcagagcgagtgtgcgcgaaaaatcactggccatatctttttttacccctgtggcaggcggtgcttgcagacacctgccgcttattatacttttatattatacccgctgtattaccgtttgtaaagtacagaaaaagacgaaaatccacggctttcgacgtttccccccatttcttatgcgaaaatcctgtattttgttgccggagcgccaaggcgacaactatatatagggtcggctcgctctgcaaaaattttgccgcggcggggggataagagtgacaatttgcgcggaacgtggtatactttatactgtactattatacagccgcccgcttatgccggacggcattcggacagaacacggcattttcgccgcaaacggaggaaaaacagttgcttttacgagctattctgcgcggagatctgcgcacggcattcatcacgctcgcgctttcgctgcctgcgatcgtgctgtgcctttcggtgcacgaggcggcgcacggcgcggcggcctacctgctcggggaccgcaccgcgcgcaacgccggccgcgtcaccctttcgccccttgcccacatcgacccgatgggctttgtgtgtctgctgctgttcggcttcggctgggcgcggcccgttccggtcaatatctcgaacttcaaaaaccgccgctggggtatggcgctgaccgcgctcgccggtccgctctcgaacttcgtcaccgccttcatcgcctactgcctgtatctgctcgtctggatgaacagcagcagcgtctttatgcagacgctcgggatgttcctgtccattgtcggctcgatgtcgatcggtctcggcgtgttcaacctcatcccggtccatccgctcgacggctcgcgcgtcgtggatgcatttctgccgttctcgtggtcgctccgcctccagagataccagaatatcatccttctggtgttcatcgcggcgctgtggttcggctggctcgacggccttatgagcctcgccgggaacgcgatgctgcatctggcggcgcgctgcgtgagcctgttcattccgtaaatggaaaagccgatggaatttcatctggacagctttgacgggccgctcgacctgctgctgcacctgatctcgaaaaacaaggtcagcatctacgacataccgatcgcggagatcctcgagcagtacatggcggtgctgcgcgaggcggagacgatggacatggatgtcgcgggcgacttcatcgccatggcggcgcagctcgtctacatcaagagccgcatgctgctgccgcagcgcgaggagacgcccggggaggacgacccgcgcgccgagcttgtggatatgctgctcgagtatcagcgcttccgtcaggcgacggccttcttccgcgaaaagggcgaggagggcgcggacatgctgacgaaggcgcccgagcctctcggcgacgcgccgcgcgaggtgcacggcgtgccgaatgacctcgtccgcgccgcgaaccggctgctgcgccgggtctcgcgccgcattccgcctccggcgacggccttttccggcatcgtcgggcgcgagccggtgccggtcgaggggtgcgtccgtgccattctgcgccgcttcctgcacgccgtgcacctgccgtttgcgcggctgtttgaccgcgcacgcagccgctcggagatcgtcgcgacctttcttgcggtgctcgagctttccagaacgcaccgtatccgcctgcacggcgagggcgaggacatcgaactgacgctgaatgacgaaaaggggagtgagacccgtgacacaactggagagcacgcttgaggcggtgctgtttgccgcaggggacgcagtctcactcgaccggctgtgcgccgcgctcgaaacgccgcgggaggacatccttgcggcggcgggagcactcgaagctctctatgctcttgaaaatcgcggtctgatgctgcggcgcatcgaggacaggctccagctctgttcgcggccgatgtacgccgaggcggcgcgccgcgtcaccgagtcgcgcagggcggcgacgctctctccggcggcgctcgaggtgctgaccatcgttgcctaccggcagccggtcacgcgcgcgttcatcgaccagctgcgcggcgtggactcgggcggcacgctcgcgggccttgcggaaaagcagctcatcgaggaggccgggcggctcgaggtccccggcagacccatcctctaccgcacgaccgggcggtttctgcaggcgttcgcgctcgagagtctggatgacctgccggctctgcccgcgctcacggaaaacgagcagctcgagttcgataccgacccggtgccgcccgatccttcgccgctgctgcggcccgaaaaggagtaggctatgctgcgaatgcttatcatactgctgtgcgtgctcgggggcgtggtgctcctgcttgcactggcgctgcttgtgctgctgaacatccgcgcacggctggaattcgtcggcgtgtcgggcgacatgacgctcgacgcggtgtatggcccggtgcgtgtgcctctttggccgcgtccgcgccatctgaaacgtaaaaagaacaggaaagaggacgaaacggagcagaaaggcgaagaagagcctgccgggggcagattctctctcgcgaagggcggtctgccgttcggggagatcgcagacatcgtgctggacttcctcggcgacctgacgggcagccttcagatcacgcggctgcgcgtgcggctggtcctcgcgacgggcgacgcggcgaaaaccggcatcctgctcggacagaccgccgcgctctgcggcattctcgtgccgtttctggaaaacacattcgatctgcgcgacattcacgtgcgcgcggacccggatttcgaaaaagacaaaacggaatgggcggcggaggtgttctgcgccatccgcccgatcaccttcatcaggatcgcattccggcacagaaagccgctccggcggctgtatgagctgttgaaacagggagtgaaggcatgaaccgggaagagcttcggcggtatatcatggaggaatatcacgcggaaaacgattttccatggctgaggcacccggaaaacgaggtattccgccacccggggaaccggaaatggttcgcgcttattatggaggtcacaggggacaggcttggactgccggatcaggaaaagcacgcggtcgtcaatctgaaatgcgatccgctgctcatcggctcgcttcgcgcggagcccggttttttccctgcgtatcatatgaacaaggcaagctggattaccgccgctctcgacggcagtatacccgacgacaaattaaaaatgctgctggagctgagcttcgaggcgaccgcgcccggacggcgaggcagataggcagacaaggaacaggaaaggtgagagactatgaatgagcatcccatcggcaatctgatgaccgagaccatggcaaagatcaaggaaatggtggacgtcaataccatcatcggcagccccatcacggcggcggacggcacgaccgtcatcccggtgtccagggtgtcgttcggcttcggcgcaggcggcagcgatttcgcgagcaagcacgcgcaggcgggcgcaccgatggcgttcggcggcggcggcggcgcgggcgtgaccgtgtccccggtgtgctttctgatcatcacgaaggacggcagcgcgtccatcctcggcatcaacgcgcaggcggacagcacggtcgaccgtctggtcgagatgatcccaggcgcgatcaacagggtatcgagcttcgtcgagggcttttcggggaagaaaaaagcgccggctgacgaaagcgcacccatggagggcggagaggaataatccgcccgccccgtgcacaacctacttctatatggagtaggttttgttctgcaaggggagtggtgtgcatgaaaaagctgtggctcgcgctgtgggtctgcgcggcgctgctgccgcgcgcggcggcgctcagtgcggcggcggcggtcacgatggatgcggacacaggggagaccctgttcgcggaaaatgcggacagccgtctgccgatggcgtccacgacaaagatcatgaccgcgctcgtcgcgctcggcgagggcgacctcgatcgcgtgtacacggtgaaaaagcagtacgcggccgtggaaggctcgtcgatgtacctcgaagaaggcgaaaggctgacgctgcgcgacacgctttacggcctgctgctctcctcgggcaacgatgcggcggcggccgtggccggagaatgcggcggcgagcgggcgtttgtggacaagatgaacgcaaaggcgcgcgagcttggcctgacggacacccgtttcgaaaacccgagcggactgccgtcggacggccactacacgaccgcacgcgagcttgcgaagatcaccgccgccgcgctgcgcgacccggtgttccgcgacatcgtgtcgacgaaaacctgcacggctgccggccgcacgctcgtcaaccacaaccgtctgctcagtctgtacgagggcgcgatcggcgtcaagaccggattcacgcgcgctgccgggcgctgtctggtgtcggcagctgagcggaacggccggacggtcatcgcggtgacgctgaacgacccggacgactggaacgaccatatcgcgctgctcgatgacgctttttcgcgctattccgaggtgacgctgcacgaaaagggcgatacgctcgcgcagacgcaggtgttcggcggcgagaccgaccgcgcagagcttgtcgcggagagcacggtcacggcatatctgctccccggcgaacaggacaggctgcgccgcgtgcgctacggcgagaaattctgctacgcgccggtggtgcgtgccgcggcggcggggacggtcgagtaccgcctcggagatgctgtcatcgccgcagaccggctgaaatacggcggtgaggtgctgctcgcacaggaaaagcgcggtcttctcgaccgcctgcggcagcggcttgccggataacaaggacaactgacataaaggagaacataaatggaagagagacttcagaaattactggcgcaggccggcctttgctcgcgccgcgaggcggagcgctggatcacggacggcagagtgaccgtgaacggccgcacggcgtcggtcggcgacaaggcggatctgcgccgcgacaagatcatggtggacggccgtccgctcggcggaagcgaggaaaagcgctacctcatgctgtacaagccgcgcggctacgtcaccacgctcaaggatgagcgcggccgcaaaacggtcgcggatctcgtgcgcggctgcggtgcgcgcgtcgtgccggtcggccgtctcgactacaactccgagggcctgctgctgctgaccaacgacggcgatctggtcaacggcctgacccatccgagccacgaggtcgaaaagcactatgaggtccgcgtgcgcggcaatatggacaatatcccgcgcctttccgagccgatggagctcgacggctacgccatccgtccggcgggcgtcgttatcatggagcgcggcgaggacagcgccaaaatccgcatgaccatccatgagggccgcaaccgccagatccgcaggatgtgtgaaaaggtcggccttgaggtccgccgccttaagcgcgtcgccatcggcgatatgccgctcgaccccaaactcaaaagcggcgcgtggcgcgagctgacgcaggacgagcttgcgtacttacaggatctctgtgccggcatcgaggaataattctgcaattttttcaggctgctcttgcattttgatgcaggacggcttacaatggtaacagaaaaatgcaggaattgatgcaggagagatgatggaatgaacgaccttatcagcaagatccagacagagctgcccggattttccaaggggcagaagcagatcgcgcgatatattttagagcactacgacaaggcggccttcatgacggcgagccgtctgggcgtaacggtgggcgtgagcgaatccacggtagtacgctttgcgaccgagctgggctacgacggctacccccaccttcagcgcgctcttcaggagatgatccgcaacaagctgacctcggtgcagcgcatggaggtatcgagcgaccggctgggaggccgcgacgtgctgcgcaccgtgctgcacgcggacaccgacatgatccgccagacgctcgacgagatcgaccgcgacgcctttcagggcgctgtcgacgcgctcacgggggcacaccgcatctacatactcggtgtgcgctcgtccagtgcgctcgcgaacttcctcggcttttatttcaatcttttgttcgataatgtcacgctcgtgcacacgaacagcgtcagcgagatcttcgagcaggtgctgcgcatcggcccgggcgacgttctgttcggcatctcgttcccgcgctactccaagcgcacgctgagcgcgatgcaatacgcgcgcgaccgcggcgcgaaggtcattgcgctgaccgacagccagctttcgccgctcgcccgcgtggcagaccatctgctgctcgcgcgcagcgacatggcgagcttcgtcgactcgctcgtggcgccgctctcggtcatcaacgcgctcatcgttgccgtcggcatgagccgccgcgacgagatcgagcacacgttcaacaagcttgaaagcatctgggagaaatacgacgtatacgaaaagccggaggacgatacaaattgaacatcattgtcatcggcggcggcgcggccggactcatggcggcgggaaccgcagcggagcagggcgcgaacgtcaccctgttcgagaccaatgaaaaggtcggacgaaaattattcataaccggcaagggacgctgcaacgtctgcaacgactgcgacgcgcaggaggtgctgcgcaacgtgccggtcaatccgcgctttctctattccgcgctcggcgcgttttcgccggcggacgtgaaggcgttttttgaggaaaagggcgtcgcgctcaagaccgagcgcggaaaccgcgtgttcccggtgtcggacagggcttccgacatcatcgacgcgctgttcctctgggtaaggcgcacgggcgtgagcatcattcacgcgagcgtgagcgaccttatcatgcaggacggccgcgtgaccggcgttcgggcagggaagaagacctgcctggcggatcgcgtgatcgtcgcgaccggcggcgcgtcctatccgcagaccggctcgaccggcgacggctaccgcttcgcgcgcgaggcagggcacagcgttgtcccggcgaacccgtcactcgtgccgctcgtcgagagcggcgagacctgccgctcgctcatgggactcagcctgcgcaacgtgcagctgaccgtctttgaaaacgagaaaaagatatacaccgacttcggcgagatgctgttcacgcatttcggtctgtcgggtccgctcgtgctgtccgcgagcgcacatatgcgccatttcggcagcaaaagctaccgtgtcgagatcgacctcaagccggcgctcgatgaaaaaacgctcgataagcgcctgctgtccgacttcgacaagcacaagaacagcgacttcgtaaacgccttgggcgagctgctgccgcggaaaatcatcccggcggtcatcgaaaagagcggcatcgacccgcgcgaaaaggtgaataccatcacgaaaaagcagcgcgcctcgctgctgcgcgtactcaaatgcttcccggtcgagatctcgggcaagcggccgatcgccgaggccatcgtcaccacgggcggcgtgtctgtgcgcgaggtcagccccaagaccatggagtcgaaaaaatgcagcggcctgtacttcgcgggcgaggtgctcgacgtcgacgcctacaccggcggctttaatctgcaaatcgcgtggtctaccggccgtctggccggtctgtccgccgcacaggaggagaaataagcatgaaatacatttctgttgcgatcgacggcccctcgggcgccggaaaatccaccgtggcgcgcgccgcggcggcgcagctcggctatgtctatgtcgatacgggcgcgatgtaccgcaccatcggtctcgcggtctgccgcaggggcatttccggcgaggataccgagggcatcaggtcggtcctgccggacatccgcgtcggcatcacctatgaaaacggcgcgcagcatgtgctgctgaacggcgaggacgtttcaagcgagatccgcacgccggagatcgcctattatgcctcccgcgtgtctgccgtgcccgaggtgcgcgaattcctgctgaacacccagcgtgacatggcgaaaaacggaaatatcctgatggacggccgagacatcggcacggtcatcctgcccgacgcgccggtcaagatctttctcaccgcatcggctgagtcgcgcgcagagcgccgctataaggagcttgccgagaagggacagcaggtcacgatggagagcgtgctgcacgacatcaacgagcgcgaccgtcaggacatgaaccgcgccatcgcgccgctgcggcaggcggaggacgccgtgctgctcgacacgagcgcgctcaccctcgaggagagcatcgcgtccgttctgcgcatcattcgtgaaaaaacggaggagaacaaatgaaattcaagtatcaccgctggtttcagtggcttgtcgtgccgttcgtagcccttgcgttccatatttacttcggctaccgcatcatcggccgcgagaacatccccgagggcggctgcgtcgtctgcccgaaccatatccaactgtccgatcccccgttcgcagcggtcgcgctcagtcacaggacgccgctgcgcctgatggcgaaaaaggagctgttccagggcaataagctgttcgcatggctgatcgcggcgctcggcgcgttcccggtcgaccgtgagggcgcggacatcaccgcaatcaagaccgcgctttcgagcgtgaaggccggccagaagctcatcatcttcccgcagggcacgcgcggcgcggccgagggcgagaccaagaagggagccgccatgctcgcggtcaagagccgcgcgcctatcctgcccatgtacatcaccgagggcaagggcttccggtgccgggcgaccgtcgtcatcggcgaggcgttcacgcccgacccgaaaacgaaggagtacggtgcgctcgcagatgacatcctccgccgcatctacgcgctgaaggagaaggtatgagcgttacggtagcgaaaaccgccggattctgcttcggcgtgcgccgcgcggtcgatctggccgagcagcagacaaagcagggcggcgagatctacgcctacggcgagatcatccataatatgcacgagatcgcgcgtctggaaaagatgggcgtgcacaccgcgcagacgctggacgggatcccggacggcgagcgggtgctcatccgcgcgcacggcgtggcgcggtcggtctacgacgcattccggcagaaaaactgcgaaatttatgacgcgacctgtccgttcgtgcagaagatacacaggatcgtcgaccgcgagagcagggacggacgcctcgtcctcatcctcggcaaggagggccaccccgaggtagagggcatacgcggctggtgcagcgagagcgtggtcatagacggagaacaggcagcgcagacgtttgcggacgcactggagcccgcgtcgcggccggtctcccttgttgcccagaccacggtaaaccgggcgatctggaatatttctgtgtctatcctaaaaaaaaggtgtacaaacctcaaaatttttgatacaatatgtaaagcgacggatgagcgtcagtcggaggctcgtctgcttgccggtgcgtccgatcaaatgatcgtgatcggcgacagaaaaagttctaacacgaaacggctctatgagatcagccgttcgctgtgccgcaacgtgctttatatcgaggatgccgcggagcttactacgcaggagcttctccggaccggaaatattggcatcacagcaggagcttctacaccggcatggataattaaggaggtcagtaacatgatgagcgatgaaatcaagattgaaaacggcgaggactttgcagcaatgctggaagagtccttcaagactttaaataatggagaaaaggtaaccggcaccgttgtaggcatttccaacaacgacgtacaggtcgatctgggcgttaagcacactgcgtatatcccgctgagcgagctgtccgatgacccgaactacgatgtcgcagccaacatccacgttggcgacgagatcgaggcagttgttgtccgcgtaaacgacggcgagggcactgttaccctgtccaagaagcgcgtagaccagctcaagggctgggagaccgtagagaaggcatacgaggagcacaccgttgttgagggcaccatcgtagaggagaaccgcggcggtgtcgttgcaactgcatacggcgttcgcgtattcatcccggcttctcagaccggcgttccgaaggatcagccgatgagcccgctggtaaagaccaagcagtccttctatatcaccgagatcaaccgtcagcgcaagcgcgttgttggttctatccgtcagatccagcaggaggctcgcaaggctgctgctgagaagatctggaacaccatcgagatcggcaacgagtacgacggtgttgtcaagtccctgacctcctacggcgcatttgtagacatcggcggcgtagacggcatggtacacatctccgagctgtcctggggccgcatcaagcacccgtccgaggtcgtttctgttggcgacaaggtcaaggtattcgtaatcggtctggacaaggagaacaagaagatctccctcggctacaagcgcgaggaggacaatccgtggaacgtattcaagtccaagtacgacatcggctctgttgctgaggttaagatcctcaagttcatgccgttcggcgcattcgctgagatcgtaccgggcgttgacggcctgatccacatctcccagatcgcggatcaccgcatcgctaagccggaagacgctctcgaggtcggccaggttgtcgaggctaagatcatcgacatcaacgacgagaagaagaaggtttccctgtctatccgtgctctgctcgaggacggcgaggactacgaggactaatcctctcttcccaaaccgcaaatgcaaggaggcacctgtacatctgtacgggtgcttctttttttagactgtcgaaaaacttcgtttttccgacaatctgtgttctgactgacgcagaacacgagtcgtccgaaagttcccatgcggaaactttctccctcttaaagtatgaaaaccgaggcgcatgtccccggttgctctcattgaatacttttatggatagaggcctacgggctcatgaaatcgctgcgcgatttctatttgatgcgcgctgccgcgcggcagcttctgtatcgcgcaagtggacattctcgataggcatctttaggtgcttttttgctttgggagcggcggcataaagctgcgtctgccgcataggctctcctgaggaggggatgggatgcggcgcaggagaaaacgtgcaaaacgctgtgcggtgctgctgctcgcactgacgctggcggccggtatcgtcctctttaccgcgcatctccaccggatcttcctcgaatacgccatcaacgagtgcgaggataacgcgctgatggagatcggcagtctgatggaggacgaggtctacgctcatcccgagcgctatgcctcgctcgtgcagctcgactacgacagtgaacgccatgtcaccgcgctgcgcaccgatgtcgtcgccatcggccgcatcaagtcgcgactcgtgaacggtctgtacgaccgtctcgatgagttcgagcagacggagatcgaggtgccgctcggctcggtgcttgcgccgcgctttttctccggcagagggccgagcctgcatttcgggctggccgggctgacgcagatggaggcggaattcgtcagcagcttttccgccgccggcatcaaccagacgcgccactgcatcctgatcgagttccatgccgggttccgcatcctcacgcccttcggcggcgaggaccgcgagatcgtctcgacctttccggtcacggatacggtcatcgtcggcactgtgcccgagcgctttgcctatatcggctcggctggcgagggcctgctcggggaggtgcgtgacggctcggcggaatgaaatccgaaaaatccgaaaataagacttcaaaaacgggtaaatctttggtatactaaatctgtgcggaaattttctgcacaccaaaggagtttaacaatggacgcacgtgaacagatcgccgcgctgcgcgagcagctgcggtatcataacgaaaaatactataacgacgacgcgcccgaaatttcggattacgagtacgacatgatgcagcgcgagctgcgtgcgctcgagaaggagcaccccgagctggcggatgcagattctccgacgcagcgcgtcggcggcacggcgagcggacgcttcgccaaggtgacgcacgcctatccgctcgagagcttgcaggatgtgttctcgttcgacgagctcggcgagttctacacgcgcgtggaaaacacggtcggaagcgcggagtacgttgtcgaatacaagatcgacggcctttcggtcgcgctcgagtacgtcgacggcgagttcgtgcgcggcgcgacgcgcggcgacggtcaggtcggtgaggacgtcacgaaaaacctcaaaaccatcaaggacattccgaaaaagctggaaaacgcgccgccgcatctgatcgtgcgcggtgaggtctatatgaaaaagtccgtgttcgacgcgctgaacgccgagctcgagctgcacgaaaagccgctgctcgccaatccgcgcaacgcggccgcagggtctctccgccagaaggacagcaggatcacgagagaaagaaagctctcgatcttctgcttcaacatccagaacagcgacgagctgccgatggagagccatgtgcaggcgctcgactatctgaaaagcctcggctttccgacaagcccgcgctatccggtctacaccgacccgaaggacgtacagcacgagatcgagaatatgggcgagacgcgcggcgagctggatttcgacatcgacggcgcagtcgtcaaggtcaattccttcgcgcagcgtgaaacgctcggctcgaccgcgaaattcccgcgatgggcggcggcgtacaagtatccgcccgaggtcaagcagacgctcctgaaggacatcgtcatcacggtgggacgcaccggcgtactcacgccgaacgccgtgctcgagccggttcggctcgccggtacgtcggtctctcgcgcgacgctgcataaccgcgattttatccgtcagctcgatgcgcgcgtgggcgacatcgtttccgtgcgcaaggcgggcgagatcattcccgagatcatcggcgtggaaaaggatcggcgtccgctggattccgtgccgtatgagttcccgaagttctgcccggtctgcggcgcaccggtctacgatgacgaggacgaagccgccatccgctgcacgagcgcttcctgtccggcgcagctgctgcgcaacctcatgcacttcgcgtcgcgcgacgcgatggacatcgacggctgcggcgagggcaacctccagaagctgatcgacgcaggactcgtaaagtccgccgccgacctctatgacctgacggtggagcagctgcttcccctcggcaagaaggtggatacctgggcgaacaacctcgtccgctcgatcgaagcgagcaagacgcgcgatctgtcgcggctgctgttcgcgttcggcatccgccacgtcggacagaaggccggccgtatcctcagcgaccatttcggctcgctcgatgcgctgctgaccgcgccggtcgaggagatgaccgagatccgcgacatcggccagaccacggccgagagcatcgcggcatggcgcgccctgccgcagtcgcacacgctcatcgagaagctgcgtgcgcatggggtcaacttcatcggcgaaaagaccgcgaagagcgacctgctcgccggaaagaccatcgtcgcgaccggcagtctgacgctgtacacgcgcaaggagatcaacgacctcattgagtcgctcggcggcaaggccgcaggctcggtctcgaaaaagacgagctacgttgtcgcaggcgagaacgccggcagcaagctgcaaaaggcggcggagctggggattccggtgctgaccgaggaggaattccggcagatgattaccgaaaacgagcagccgtaggctgttcggtaaacgataaacgcatccaaaagattttacagataaacaggaggaaacagacatggcaatttccagaaaagaaattgagcacatcgcgtctctggcacgtctggactcgacgggcggcatcttcgaccgcctggcggacgacatgcagggcatcgtcgcaatggtagacaagctcgcagagcttgatctcggcgacatcaccgatgtcatcaacaccgagcgcaagaatgcgttccacgaggacgaggtcattcaggaatacacgccggacaagctgatcgagccgaacgcaccggacttccagtgcggcggtgtagcagtaccgcgtgttgtcgagtaaggaggggacagaaacatggcactttatgaaaagactgcgtccgagctgtccgaactgctcggcaaaaaggaaatctccgcagtagaactggcaaaggacgtttttgcccgcacgaaggcggtagaggacaaggttcagggctacgttaccgtagccgagaaagcagcacttcagcaggcggaagctgttgacaagaagcgcgcagcaggcgatacgctttccgctctggccggtatcccgatcgccatcaaggacaatatctgtaccaagggcacgctgaccacctgcgcgtccaagatgctttataacttcaagccgccgtacaacgcgaccgtcatcgagaagctgaccgctgctgacgctgtcatcaccggcaaggcaaacatggacgagttcgcaatgggttcttcctgcgagaactccgctgcacacccgactcataacccgcacaatcttgatcgcgtaccgggcggctcgtccggcggttccgccgctgtcgttgcggcaggcgaagcaccgctcgccctcggctcggataccggcggctccatccgtcagccggcgtccttctgcggcgttgtcggcctcaagccgacctacggcgcggtttcccgttacggcctgatcgcgttcgcctcctccctcgaccagatcggcccgttcggtcgctccatcgaggacgctgcgatgctgctcgacgccgttaccggccacgacccgctgcatgactccacctcggtcaagaccccgttcgagggctctctgcgcgcaaacctgaatgctgacgtcaagggtctgaagatcggtctgccgaaggagtatttcggtgagggcatctctgacgcggtccgcaagaacgttatggcagccgccgaggcctacaaggcgatgggtgctgaggtattcgagatctcgctgccgctcgttgagtacgcactgccgatctactacatcctctcgtccgcagaggcttcctccaaccttgcccgtttcgacggcgtaaagtacggctaccgcaccccgaacgcaggcgacgacatcaccgagctgtataccaagagccgttccgagggcttcggcgccgaggtacagcgccgcatcatgctcggcacctatgtgctgtcctccggctactacgacgcctactacaagaaggcgcgcgccgctcagcgcaagatccgcgaggagtttgcaaacgcattcgagaagtgcgacgtcatcctgacgccggtcgcgccgactaccgcctacgagatcggctccaaaacgaccaatccgctcgagatgtacgcaggcgatatctgcacggtttccgtcaacatcgccggtctgccgggtctggttcagccgtgcggctttgacgagaatcatatgccggtcggcatgcagctcatcggcccgcgcttcggcgagcagaccctgctcaacgcaggtctggccttcgagcaggcttccggcctcaagaacatcatcgcggcactgtaagggaggaagacaaacatgaaatacgaagctgtcatcggtctggaagtgcacgcggagctgtccaccaagagcaagatctactgctcgtgctccacgggcttcggcgcaccgatcaacacccatacctgcccggtctgcaccggtatgccgggcgcactgccggtcctcaacaagcaggtagtacactatgccgccaagatgggcaaggcgaccggctgcacggtcaaccagctctgcaaggcggaccgcaagaactatttttaccccgacctgcccaaggcatatcagatttctcagtttgatgtgccgatctgcgagaacggcgaggtattcttctatgtcgacggcgtaaagcactcctgccgtctcgagcgcatccacttcgaggaggacgcaggcaagctgctgcacgacgagatcgacggcaccatcgtcgacttcaaccgctgcggcgtgccgctgatcgagatggtaacccgtcccgacctgcattcctctgccgaggcgaaggaattcctcgaaatgatcaagaccaccctgtcctacctcgacatctgcgactgcaagatggaggaaggctccatccgctgcgacgtcaacgtctccatccgtccggagggcaccaccgagctgggcacccgtgtcgagatgaagaacatcaacaccttctccggcgcagtccgtgcgatcgactacgaaatcgcgcgtcagatcgaggtcgttgagaacggcggcgaaatccagcaggagacccgccgctgggacgacgtgaagctgaagaacaccgtcatgcgtaccaaggaggatgcgcaggactaccgttacttcccggacccggatctgatcgccgtcgagatctccgacgagtggatgaagcagatcgagagcgaggttcccgagctgccgattacccgttacgagcgttatctgaacgagtacggcgtgaccgcgatggaagcgcgtctgatttcggacagcttcgagaaggccgagctgctcgatgctgcggcaaagcaggtcaagcccaaggctgctgcaaactggatcctgtccgacatctccaagtacctgaacgacaaggctgtcagcctcaaggacaccaagatgaccgccgacaagctggtcgctctggttaagctcatcgaggcgggcaccatctccggcaacgccggcaagaaggttctgccctccatgttcgagaccgacgagaccgtagaggcgatcgttgagcgcatgggcctcaagcaggtttccgacgagggcgcgatcctcgccatcgtacaggacgttctcgcgaagaacgagaaggctgttgccgacttcaaggcaggcaagaacgtcaccggcttcctcgtaggccagtgcatgaaggcctccaagggtcagggcaatccgcagatcatcaacaagctgatcgcagcggagctcgcaaagctgtaaattataataaaagaccgccgcaaggcggtcttttttgctttgccggtgcagctgttctgcgacagccttagatttttttgaaaatccctattgacaaacgggggaaataggtgtatcctcaattcatagaaaacacctatgaatactgagatatagaaaggcggcatgaagctgtgatactctcgcgaatgtgccgatgtcgaaactgatttttcggtactgcatctctgatccaataataaattgacgatttctgaacttctgaaaggcggtataaccccatgtctgatattaaaaagagctttgctgatctgatcggcaacactccgctgtacgcggctgaaaaattcgcagagaaggtcggcgccaacgccaccatccttgcaaaactcgaatacttcaatccggccggctcggtcaaggaccgtatcgcaaacgccatgatcaacgaggccgaggcttccggcacactcaagccgggcgctaccatcattgagccgacttccggcaacaccggcatcggtctggcggctgtcgcggcggctcgcggctaccgcatcatcctcaccatgcccgagaccatgtccatcgagcgccgcaatatgctcaaggcttacggcgcggagctggttctgaccgagggcgcaaagggtatgtccggcgcgatcgcgaaggcagatgagcttgcgaaggagaccccgaacagctttatcccggggcagttcgtcaacccggcaaacccggccgcgcactatgcgaccaccggtccggagatctggaagcagaccgacggcaaggtcgatatttttgttgcaggcgtcggcactggcggcaccatcaccggcaccggcaagtacctcaaggaccagaacctggacgtcaaggttgttgccgttgagccggatacctctccggtcctgtctaccggcaagggcggcccgcacaagattcagggcatcggcgcaggtttcgttccggatgtgctcgacaccaaggtctatgacgaggtcgttcgcgtaaagaacgaggatgccttcgatgctgcgcgcaagttcacccacagcgaaggcctgttcatcggcatttcctccggtgcggctctgtgggcagcggcagagctggccaagcgcccggaaaacgcaggcaagaccatcgtagcgctgctcccggataccggcgaccgctacctgtctacgccgctcgttaccgagtaagtctctctgatcttttctcttactttgcatcctgctatttattacttctctttgaaagaccggctgtttaccacttgacagccggtcttcgccttttatgcagaaaaaaacgaccgttccggacttcgggacggccgttctgctatatggaaatgatatgcagaccgtattgcagcgcggcggcggaaaatgcagagcgctgcttctctgacgcgccggtcagcacgatcgtctgcgtgaatccttctgcggcgagcgcccgggcagcaagggcaggcgaagcaggctcgtccggtcttgcgccggtcagggtacagaattgctcgggacggtgcacggcttcgcggatcgggcggtcaaagccgtgtgcgccgacgacgcaaagcacgcagcctgcctccttcggaatgaccggctcgtgcggcgcgtgcgccttgagggggagacggcgcgagccgtcggcctcgacgagcacatagtccgcaagctgctcgagcagggaaaacggcagggaaggggcggtcagcttgctctctggggccggcgtgccgagacagagcacgcggctgcgcgcgagcgcggcgcgtacctcatcctcggtgggagcggtcagcagcggcacgccctcaaatggcaggatatgcgttgtggtggtcagaatgaccgtgccgggcagctcgcgcgacagcgcggacagcagcgttgtcttgccgcctgagccgatgaccgccgtcacgccgcagggtacgcccagcctttcatacagttgcattatatttcctcccggcattctactgcacctatcatagcgcaattcacggaaaaagtccagaacggcttgacatttcgccgcgcatcttctataatcattacgttatatttatgaaacaacaacgaaaaggagagatgaaaatgctggtcgttatccgcggtgcgggcgatattgcaacaggaatcgcactccggctttttcgctcgggcataaaaatcgtcatgaccgacctgccgcagccaacgtccatccggcggacggtgtgcttttccgaggctatccgccacggctccgcgacggtcgagggcgtggaggcggtactcgcgaaggacgccgctgaggcgaaaacgctcgcggagagcggacgggtcgcggtgctcgcagacccgcaggcagactgcgtgcgtgaactgaagccggacgcccttgtggacgcgattctggcaaagaaaaatctgggcacgcgcatcacggatgcgccggtcgttgtggcggtcgggccgggctttacggcgggcgcggactgtcatgcggcggtcgagaccatgcgcggccacacgctcggccgcgtgctgtatgaaggctcgccgctgcccaacacgggcgtgcccggggtgatcgcaggttatgcggcggagcgtgtgctccgcgctccggcggcaggcgtgttcgagccgaagctcgaaatcggcgcacaggtcaaaaaaggcgacgtcgcggcggtcgttgacggaaagccgatgctgtgcaggatcgacggctgtctgcgcggtctgatgcaggagggcgcggtcgtgttcaagggcatgaaatgcggcgacgttgacccgcgcggcattccggacaactgcacgacggcctcggacaaggccattgcggtcggcggcggcgtgctcgaggcaatattacatttctctcatgcaatccgttgaaaaggagaaaaatacttgaaattcaaaaccgttttctctaaaatgaccgcgtgttcgctgatgctgaccgcgctttttggctgcggtcaggcttctcagacggcggacggtgcacaggacacccggcctgcgcagacgaccgagctgactgtgttcgcggcggcctccatgaccgagacgctgaaccggatcgcagaggactacaagacggtcgagccgaatgtttccctgaccttcagcttcgcctcctccggcgacctgctcagccagatcaaggagggcgcggattgcgacgttttcatttccgccgcaccgaagcagatgaacgcgctcgacggcagcctcaaggacgatgcggacaagaacccggacggtctggacgagctgctggaaggcacgcgcatcgacctgctcgagaacaaggtcgtgctcgctgttccggagggcaacccgaagaacatcgtttcctttgacaagctcgcggaccggctgggggccggtgagggattcctcgccatcggcaacagcgatgttccggtcggccagtacacccggaagatcttcgtgcactacggtctggacgagcagtcgctcgcggacgcgggcgtgctcacctacggctcgaacgtcaaggaggtcaccacgcaggtcatcgagggcgcggtcgactgcggcatcatctacgcgaccgacgcctattctgcaggtcttgagagcgtcgacgaggcgacggcggatatgtgcggtcaggtcatctatccggcggctgtcctcaggaacagcgcacacctggacgaggcaaaggcattcctcgactacctgaccggcgaggacgcgggcaaggtatttgaaagcgtaggctttacgccgctcgcgtaatttgatacaatagaggggcgagagacgagatttctcgccctctttttgcaaacagggagaaaattcatggactggtatcctctttacaactcggttcgcatcgcgctcatctcgaccgtcatcatcttttttgccggaatcgcggcggcgtattacgtcgcgcgactgccgcgcgcagtcaagggcgtgctcgatgcggtgttcacgctgccgctcgtgctgccgcccacggtcgtaggctatctgctgctgcgcgtgctcggcccgcgccgtccgctcggcgcatgggtgcttgcgcactggggcgtcaagctgaccatgacctggtattccgccatcttcgcgacggcggtcgtgatctttccgctgatgtaccgcacggcgcgcggcgcgttcgagagctttgacgaaaatctggcggatgcaggccgcacgctcggtcgctcgaatgcgtgggtgttctggcgcgtgcgcatgccgtgctgccggcagggcatccttgcgggtaccgtgctcgcgttcgcgcgtgcgctcggcgaatacggcgcgacgagcatgatcgcaggctacacgcccggccgcaccgcgacgatctccacgacggtctatcagctctggcgtacaaacgatgaccggcaggcgtttttctgggtcgcggtcaacctcgcgatctcggcggtcgtgctgctcgcggtcaatctgctggaaaagcgcggaaagggggcggcggcatgagtatttcggtcgacatcgagaaaaatctcggctcgttccacctgcgcgtggcgttcgaggcggaaaacgagaccatggcgctgctcggcgcgtccggctgcggcaagagcatgacgctgcgctgcatcgccggtatcgtgcgcccggaccggggcaggatcatgctgaacggccgcacgctgttcgacagcgagcagcatatcgacctgccgccgcagcagcgcggcgtcggttacctgtttcagcagtacgccctgttcccgcacatgacggtcgagaagaatgtctgcgccggaacgcgcgagggtacgcgcacagagcggaaggccgccgcacagcgcatcctgcgcacgctcgggctggaggagctggcgcagcgcctcccggcgaatctttcgggcggtcagcagcagcgcgttgcgctcgcccgcattctggtcggaaaacccgaaatcctgctgctcgacgagccgttttccgcgctcgatgagcacatcaagtggaaaattgagctcgagcttgccgatacgctgcgttcgttcccgggcggcgtgctgttcgtatcgcacagccgcgacgagatctatcgcctgtgcgacacggtctgcgtgctgaacgagggcaaatccgacccgaagacaacggtcgcggagctgttccgcgcaccgctgtctgtgggcgcggcacgtatctcgggctgcaagaatatctcgtgcgccgaggtcggcgccgacagcacgctttactgtgcggactggggcgtttcgctcagaaccgcgctgccgctgcgcgaaaacacagtatatgccggtatccgtgcgcattatttcactctcagcggcacggaaaacccgatcacctgtacggtcgagcgcgtcattccgaacccgttttccgtcgtgtatatgctgaaaacgccgggaagggcgctgctgcgcatggagagcgaaaaagcagaagcactgcatacaggcgacacgatcaccctgcatattgcgccggaggacgttatgccgctgacggagtgaggataaaatgacagatcagtatggaagaaaaattaaatacctgcgcctttccgtgaccgatctgtgcagctgccgctgcgtgtactgcatgggtgcggagggcgtccccaagctgccgcacgaggccgtgctgtcgttcgaggagatcgaggagatcgtccgcgcggcggcgtcgctcggcgtgcgcaaggttcggctgaccggcggcgagccgctcgtgcggcgcggcatcgacgagctggtgcgccgtctgcgcgccatcgagggtatccgcgagcttgcgatgacgacgaacggggcacggctggccgagtacgcagagcgcctgaaaagtgccggtctcgaccggctgaacgtcagccttgacacgctcgaccccgaaaaataccgaaaaatcacgcgcatcggctcgctctccgacacgcttgccggtctggatgcagcgcgaaacgccggttttacgcacatcaagctgaacgcggtgctgatgggcggggtgaacgacgacgagataccggcgctcgcggagcttgcacgggacggcgcattcgatgtgcgctttatcgagcttatgccgatcggagagtgcgcagactgggacagaaaacgctttatcccggccgaacgggtactggaagtgctgccgaaagcacagcgcgtgccgtcggacggcgtcgcggagctgtggcgtccggagggctggaagggcacggtcggtctcatccggccgctcagtcaccgcttctgcgcggactgcgaccgcatccgcatcaccccggacggaatgctcaagccctgcctgcactccgcgcgcgagatcccgctgcgcggaaagcacggcgaagcgctcgtctgcgccatcgcggagggcatcggcagcaaaccgaaggagcatcacatcacggacggccgcacaagcgacagcctgcgcggcatgaaccgcatcggcggatagaaacaggaggaaaacagctatggcacaggtcgtttcggtctgtatcagtgagataaaaggcacaaaaaaacatccggtcgcggaaatatcgctgcggccgcatcacggcatcgtgggcgacgcgcatgcgggcgactggcaccggcaggtgagtctgctcgcaaacgagagcgtggaccggatgagaaaagaaggactgacgctcgccgcaggcgactttgcggaaaacatcctcaccgaggggctcaccctgcggacgcttccgatcgggaccgtgctgcgcgcgggcgaggtgcggctcgaggtcacgcagatcggcaaggagtgccacaatgactgcgagatacgccgcctcaccggcatgtgcgtcatgccgaccgacggcatttttgcggtcgtgctgaatgagggcgtcattcgcccgggcgatcagatcgaggtggaaagcatatgaaatgtatcagaaccgagaatgcggtcggtcatgtgctgtgtcatgacatgacgcagatcattcccggcgtgagcaagggaccgcgcttccgcaagggccatgttgtgaccgaggaggacatcccggtgctgctctccatgggcaaggaaaacctgttcgtctgggagatggagccgggcatggtgcacgaaaacgacgcggcagagcgtctcgcggcgctgtgcggcagggaaaacatgacatggagcgagacaaaggaaggaaaaatcgagctgaaaagcgcgatcgagggcgtgttcctcgtggacagcgcccggctcttcgcggtcaacagcattgacgagctgatgatcgcgacgcggcgcggcggcggtacggtgcatccgggcgacaagctcgccggaacacgtgtcattccgctcatcatccgagaggaaaagctgcggcaggctgagcaggcggcaggcagcgcgccgctgctgtcggtacgcccgtttgtcaggcgcacggcggcggtcatcacgaccggcagcgaggtcgcaaagggacggatcccggacagcttcacgccggtcgttgagcgcaagctcgccgccttcggcattcgaatgaccgagcacatactggtcgaggacggacaggagaacgtcctcgaagccatagagcagatgaagcgcagaccggtggacatgatcctgtgcacgggcggcatgagcgtcgatccggacgactcgacgccgggcgcgatcaaggcgagcggcgcggacatcgtgacctacggtgcgccggtgctgccgggcgcaatgttcctgctcggttattacggcgacggccgtccggtcatgggactgcccggctgcgtcatgtacgcgaaagcaacgatcttcgatctggtcctgccgcgcattgcggcggatgtgcggctcgaaaagcgcgatttcgtcgtattcggcgagggcggactgtgtctcggctgcgaaagctgtacctatccgcattgcggcttcgggaggtgagcatggtggtcacagcaaaggtcatcacggtcagcgaccgttcctaccgcggcgagcgggaggacgcaggcggccctgcggtcaaggcgctgctcgagcgcgcaggctacacggtgggggagatcgtgctcgttcctgatgagcgcgagcgcatcgaaaaggcactcatctgcgccgccgacgaggaaaatatcgcgctgatcgtcacgacaggcggcacaggctttgccgagcgcgacgttacgcccgaggcaacgatcgccgtgtgcggcagactcgcgccgggtattcccgaggcaatgagggcggcgtccatgcggatcacgccgaaggcatgcctgtcgcgcgcggcggccggtatccgggggaagagtctgatcgtcaatctgcccggcagtccgaaaggggcgtgcgaaaacctggaagcggtgctggagtcgctggaacacgggattttcatcctccgcggaggaaaggaataaaaaatttttctctcagcagatggcagactttccgccgatgcagcggtgcgccgctggaggcgaggaaggccctcccgggacggggatgttcgccatgacatggcgtgtacattgccgccgcccggcggcgggggcaaaaggggcagggacaccaaggtttccctgcccctcttgactcccca

SEQ ID NO: 12953 - DNA, 17282 bp, Unknown
  gut microbiota DNA sequence
ctcgcgccgcagcaaaacccgcgacatgcgcgtgggttttgctaccccgacccagccgccttgggcggcgtcgttcgggtactgaacgccggtttccccggaaccggtgttcagatatagggggcttgtgaagccccctataagcgcagcagaagttaaacctctgcaagctccttggacttcttagcgaccatcgcgtcaacttccttgacgtacttgtcggtcagcttctgcatcttgtcttcgccctcgtgcagctcgtcctcggtgatctcgctcttcttctgcgcggacttgaacttgtccatcgcgtcgcggcggatgttgcgcagggcaaccttcgcttcctcgccggtcttggacgcacccttgatgagctccttacggcgctcctcggtcagcggcgggaaggacaggcggatctgcttgccgtcattctgcggattgatgcccagatcggagacctgaatcgccttctcgatcgccttgagcaccgagccgtcccacggctggactgccagcgtgcgcggatcaggggtcgagatcgccgcgacctggttgagcggagtcggtgcgccgtaatactctacggtgatcttgtcgagcaccgccgggtttgcgcggcctgcgcggaccgctgcaagctccttcgcgagtacgtcgagcgtcttctgcattttcgcctcgtgggccttgagctgttctttcatttattttgcctcctctacgagcgtgccgatcttctcgccgtttacggcacggtgaatattttcggggtcggaaagcgcgaatacaaggatcggaatatggttgtccatcgacagcgaggtcgcggtcgagtccataacgccgaggccctggttcagaacatccatgtaggacagctggtcgtacttcttcgcgtccggattgaccgccggatcggaatcgtaaacgccgtcaacgttcttcgccagcaggataacgtccgcgccgatctcagccgcacgcagcaccgctgcggtatcggtcgagaagaacggacagccggtgccgcagccaaagatgacgacgcggcccttttccagatggcgggtcgcacgagagcggatgtacggctctgcgatcttgttcatctcgatagcggtctgtacgcgaacgtccacgccgcgctgctccagcgcatcctgaagggcaagggcgttgatggtggtcgcgagcatacccatatggtctgcacgcgtgcgctccatcttgccgccgccgtccttgacgccgcgccagaagttgccgccgccgacaacgatgccgatctcacagccctcctcgctgcatttcttgatcacgtcgcagaccgggccgattacatcaaaattcagaccgaaatgcttgtcgcccgcaagggcctcgccgctgatcttgatcagtacgcgcttgtatttctgtgcttccatgctccacactcctcatgctattttcctaaattatagtttactcgaaaaccgtataaaatgcaaggacatttctctgccggaagcggagcagcgcaaagaccgccgtccttcctgcctctttcagatgcagtccgccgcgagcagccagatggaattgtccgagagcgccgccgtgtagaccgtgcacgcgccagcgaccccgtaccgcccgagcacattcgccgcgagcgaaatgccgtccgaggcggcgaagtaatccgtgccggcgttcagcgtatacgcgcggccgtcctgcgcgaccgtgatgctgcgcacgctcctgccctgcatgggcaccgcaaagcgcaccgccgccggcgacgcgctccgataggctgccgtgagcgcattgacgcctgccggggtcgtgtcgctgaccgtcaggtcgaccgcctgcacactgccgccgctttgcgtctcgacggtcacggtataggtgccgctcgggagctgcgcaagcgttgcgcggcgcagggtcagcgtgcgcgaggcctcgtcgaactcatacgagagcggcgtcagacccagaacgacctttgtgatgtcgctcttcgcgttcacgccctcgagtttgaccgaaatatccttgaaattcgtgctgcggtaatagcggtcgaatgcggccgtctgcgccagctgcgccgccgtttcgcgcgcggccgtgaccatgacggtcgcggtctgcccgtccgacaggcggaacgtcagcgtatggctgccggtcgagagcgtcttcagcgtgtccgccttcacgcggaggccgcggctcgtggtttcgaaagccgtgccggtcagctcactgctgtccagcagcagcttttccgccgtgacgccggacggaagcgaaaactccacgccgtccgcaagcgactcctcgtctccgaggtcaaggatgacgctcgagggcgagaccgccgccgtactcgacgcagtcctgttctcgcccgccaccgagaccgaaacaccgctcgcgagcgtatagccgccgagcgctatgtccttcgtaaagctgacgccgtccgtgcggacatccgcctgatacaccgagccgtagccggtgacggtcgcggccctgttcgcccggagatgatacaccttcgccgccgccgtcgtcgtgacggtcgccggggtgttcacggtcagcttcagcagatctgcgtcgaccgtcagcgagaccttgttcccgccgcagaccgttacattctcgaagccgtcatagccgtcggtcagcaccttttcgtacagcaccgccgccgtgcggacctctgcctccgaaaagcgcgaagcgcctgtcgcagtggtctgcagcaggcgccccatagacgaggacacgatgatgtggtcgctcgtcgtatttgtcattgtgactgtgccgcccgaaataatgatcatgccctcgaccgttacgttgctcagcgcaaccgcgtccgtgccgaggccctccgtaatgaacagatcgccctcaatcgtcgcgtcggacagcgtgcagctttccgaaatggtgacattggtcgtgtcgccccggaggtctgcacccgtataagccttgcccgcccgtgaaagtgaggtgccaaggtagtaatagatgattttcgcgacttcgccgcgcgttacctcgcgtgtcggctgaaaggttccgtcgctgtatccggcaagaaagcccttgtcgaccgccgctctgatgtagccggccgaccagctcgagatcttcgccttgtccttgaagtcgaggctcgacggagagacattgcccgggtcggccttgtacaggcggccgatgatggtcgcagcctgctcgcgcgtcacggtgccggtcgggtccattttgccgctgcccacgccgttgatgtagccgtacttctgcgcgatgcacacagtctcatagtaccacgcgttcttcggcacgtcggtgtagctgatggaggccgtttccgtgaagtggaacgcacggttgatgtagcgcatgaactcggcacgggtcacctttgcatccggctggtatttgccggtcgtcgcagagggattgatgatgtcctcatccgcaagatagtcgatatattttttcgcccagtgaccgtccagatcggacgccgcgaaggccgtcggcacaagggtcagcagcaggacggcgctcagcagagcggcgagcagtctttttttcatcgcgaacacctcttttgaaaatccgcagaccatgcgcggaacgggtatagtttgttgctgttatatccagtataccataggggtaatcgcttggcaacaggcggtttttgaggcaataccgcataattgaacaagagcgatttgcgagcaaattttgcgtgctgacaaggcgcggttttgcggtaatacttgatgtattaccgtgaaatcgcaacgaagtcagggcacaaaatttccgcaaagcgccgcagctttaattgtgcggtgttgcctttacatatttcgaacaaaatcaaaaaatattctgcccttccggctggtcccgccgaagctctcgaccctcgcgcgccccagtccgcgcaccgtgatgcggtcgccctcagcgatctgacgctccggcttgaggcagggcgcgttgttgacgaacacgagtcccttttcgatgcgcgcctgcgcgtcctttcgcggcagaccgaaaatgagcgaggcaatgctgtcgagacggggcgaggcgaccgagccggtgccgcgcttttcctcggtcacggcctgccggagatcggacagctcctcgcgcgtcagcgaaagattcttgcggcccgccttgccgaaattcatcaggatgaactccgccacgtcctccagaacgatgatgtccgcgccctcgtcgtgcacgagaatatcgcccacgacgctgcggtcgatctgaaggcccatcagagcgccgagatagtcgcggtgggtcagcgtgtcgctgcggcttttgtgcgcgcgcagcagcgcgagcggcgcggacagccttgcgctctcctcgtccatgtaatccgggtaaaacagataaatgccgcgctcggcgtcctcgtagccgccccagaacagcgcatggccggtcgccccggcctgatgcaccgcctcggtgcagagcgcccgctcgctcatgctgagaaagcgggtgctggtcgcgtagccgcgcgtttcgcaggtctgctccttgtcgagcaggcttgcgagcaggatcttttcctcgccgctgtgcgcgagcgcggtcagtatttcatgcttggtcttcaaaacggtattcacctccgaattttgatgcggtttatcgtcttactgtattgtactattttcgtttttcgtttacaatagatgagacagaaaatccgtttgggaaggatgaacatactcatggcagtgaaggacaaggtgctcgcggcgctcgagcaggcgcgcggcgaaaggctttcgggcggcaggctcgcggagacgctcggcgtgtcgcgtgcggcggtgcacaaggcgatcagcacgctgcgtgcggacggcctcgccatcgacggcgtgcccggcgagggctaccgccttgcctgcgatgacgacagcctgaccgccgcaggcgttgaggcgctgcttcagacccggtgcatcggcagagaaatcgtcgtcgtgccctccatcacctcgaccaacacggtcatgaaggagcagtatctcgaccggccgcacggctttgtgctcgcggcggaggagcagaccggcggccgcggccgtctcgggcgcacgttcgtctccccctccggcaccggcgtgtacttcaccatcctgctccaccctgcgctgccgctgacgcacatccagtacgccacgctcgcggcggcggtcgcggtcacgcgggccgtttccgacaccgcaggctttacccccgagatcaaatgggtcaacgatgtgctcatgcaggggaaaaagctcaacggcacgctgaccgaggcggtcatcgagggcgagagcggcacggtttcctcgctcatcgtcggcatcggcatcaatctgcgccccaacccggcgtggccggaggaggtgcgccgggtcgccggggctatctcagacttcggcccggtgccgcgcagagccgccctcatcgcctcggtgctgacgcattttgagcaggcgtactcgctcgtcgagcagggacgcgagggcgagcttgtcgcgctgtaccgcgagcgactgtgctgcatcggccggaaaattacggtcgtctccccgctcgaaaaatacgaggccgagtgcgtcggtctggacggcgagggacatctgctcatccgcaccgccgacggcgccgagaccacgctctcgaccggcgagatcagtattcgtttataaaaatcatcacagcaaggagatttccgatatgtttcaaaccgcagcaggcgttaccgtgccttatcccgaaaagctgaacgagcagtatctgcgcgacggcaataccatcaccgcaaatctgagctttgaaaagctctccgacttcatccatgcgttctatgccgagcttgacgagccgctgttcctcgcggtgcatcccgacgccgaggccgacgaggtctggtatctggacggcatgaccaaaaagcagctgaccatgatccttgacggctacggcgagctgctgtgccaggacggtctgtccgcgttcgccatcggctcgctcacgaccgaggaggagcttttcgtgcagaagtacaaggtgctctcgatttacagcgagaccgtcgagcgcttcgagccgctgctccggcagttcgatgtggaaaagaccccgaacctcgtcaccgcgtgggacaccttctccgaagcgcatcccggctctgccgagcgtcttgaggtcgccggccagaccatccccgacatgatccgcgagctgtgcagaatcggcatgtacaaaggatgacttgccgcgcagctgctgttattgtctgaaacaatgcttatcgacagacaaaaaccgggaccggctctcttataagagaaaccggtcccggttttgttatattcttttttacggagaaaatcagatttcctgaatgatgggcagcaccatcgggctgcgcttggtctttttgaacaggtagtcgctgacgtcgcccttgatggcagtcttgaggctgttccagtcgcgcaggttctcgaccgagcagcggtcgagcgccatctgcgaaatggtgcgcagctcctccatgagcgcctcggcctccttgacgtagacaaagccgcgggagacgatgtccgggcctgcgataacgacgccggtcgtcgcgtccaccgtgacgacgacgatcagcaggccgtcctcggacagatgctttcggtcgcgcagaacggcagtgccgacatcgccgatgcccagaccgtcgacaagcagtcggccggacggcaccggattgcccagacgggcggaattctcgctgatctcgaccggacggccgatctcagtgatgaggatgttcttcgggttcacgcccatctcgcgcgccaggccggcatgctgcacgagcatgcggtactcgccgtgcaccggaatgaaatacttcggcttgcacaggccgagcatgagcttgaggtcctcctggcaggcgtggccggaaacatggatggctgcggagcggtcatagatgacctctgcgccctgtttgtacagctcgttgaccatgttgttgatggacttctcgttgcccgggatggcggacgccgcgatgaggatgcggtcgccggcattgacctccacctgcttgtggctgccgtatgccatgcggtacagcgcggacatggtctcgccctgcgagccggtcgatacgatgatcagctggctgcgcgcgtagcgcctgatctcggaaatgtcgatcatgaccttgcctgtgtccttgaggtagccgagctcggtggcgacacgcgagatcttctccatgcttcggccgcagaccgcgacctttcggcctgcacgggccgcgatgtcgaggatctgctggagacgggacacgttggaggcgaacgtcgcgatgataatgcgctggtcgctctctgtgatgaacttctcgagcgacttgccgacgatcttctcgctcggcgtgtagcccgggcgctcgacgttggtcgagtcgctcatcagcgcgagcagacccttcttgcccagctcgccgatgcgcacgaggtcgatcatctcgccggagaccggcgtcaggtcgatcttgaagtcgcccgtgtgcagaatggtgccgagcggcgtggtgatggcgagcgctaccgaatccgcgatcgaatggttggtgtggatgaactcgatcttgaagcagccgagcctgatcgtatcaccggcgcggacatggttgagcttgaccttctggggcatcctgtgctcggagagcttggtctcgatgatgccgcaggtcagacgggtcgcatagatcggcgcgttgcattcgcgcagaacatacgggatagcgccgatgtggtcctcatggccgtgcgtgatgacgtagccgcgcagcttgttgatgttgcgcttgaggtaggtcgtatccgggatgacgaggtctacgccgagcatgtcgtcgtccgggaacgcgacgccgcagtcgatgacgacgatatctccgccgtactcgatcacggtcatgttcttgccgatctcgttgagaccgccgagcggtatgatcttcagtttttctttcataacggttttatcactttcctttatcagtcgaaatttgttctctatttacgcggtataaagcgccgcaaagacagatctgacgttcatctgccttttttcaacataatgagataaaatatgatgcaggcctgcggacctgtcgtccgtccccacgaaatcctgcaaacacttattatcagcataccacaaccctctgccgctgtaaagtctttttttgagctgtcgcgaaacttcggcgcgccggaggcgatgagcgcccttcttctttaccatcagcagacggcagacctttcgccgatacagcggctcgccgctggaggcgagatttacgctcgaagtgagcgtggacaatggccgccttcggcggccgggggtgtcggtgcccaccgacaagggcaaaaggggacaggacaccatatggtttcctgtcccctcttgactccccttaccttcctttggacgcgactcccttcggtcgcgcgtctaaaagcgaggggcccacagatgcgtttggtgctccaagagtacacgtttgatcgaagcaaagcttttcgcagcgcaaatcaagcgccctgcactgtctggccgcgcactgttatgcgcggcggttcacgcaaagtaaattcagggcagtaatgcgtcccaaaagctgcccgacgcacggaaccgagcccccgtaacccccgtttcgctgcacatctccgatgtgtcagcgcaaaggagggtttgggggagtcaagagggggcaagggaaccatacggtgcccttgccccctcttgcccctcgccgtgggcacggcgtcacccttgcggataaaaaaactcccacacatccaccggaatatgtgagagcctttggttttgcaggcttacgccttcgtggagcgcggaacagcgaggctgaccggcttccagatgagaatggaaatcgagtagtcgagcatggaatggatgagtgtgccaaggccgacgagcaggacaacactcgtcacaaagccgttcgccagctgctcgggcgtaaacagcgcgcccgacaggaagaacggtgcaacgacgatcatctccgccgctgcgtgcagcagcgcgatcacaaaattgaacacggtgcttgcgaccggacggtcgatggtatccgggtgctttttgaggtaaaatgcgccgagaccggcaaagacgatatgcgatgcggcgcgcagcgcgatgatcgccggagtggtcaggaaaaagccgagcgtcgtgccgatgcagaccgcgacagcgaccgccggggaaatgaacatgccgaggaatacggcaacatggcttgcgagcgtgaacgacatcgggccgagcacgatgcggggcatgaacatcggaacaacgatgcctaccgcacagagcacaccggcgagcaccatgtggtacaggcgactgcttttcatcatcaggaaaacttcctttcaaattctgtatttttcttgctggtaatgagtataccgcaaaaccatgcacctgtcaagacacctgttaacgcgatgtaaatatttttatgcgcggcagaaattcacggttttgtcatgactttctatccggcctatggtatattgaaaacagtaaatgcgaaaggaaagagtgctgtgatttccattgatcgttttgaagagatactgggcgagctggccgaggagctgcccgccgaattctataccggtctgaacggcggcatcctcatcgaggaccgccatcccctccatccggccgaccggaacggcgacctgtatatcatgggggaataccggaacgacccgtccaccggacgctgcatcgtgctctactacggctcgttccgccgcgtgttccgccatctggacgaggacgagctccgcaccgagatgcgcagggtgctccgccacgagttccgccaccatgtcgagggccgcgccggtgtgcgcgatctggaggaatgggacgcggaccagatccgcgcctatcgcgcacggaaggatgccgaataaacagaaaagcactgccgcacaggttcagtccccctgcggcagtgctcttttttcagttttcctcttcgagaaggaagcccttctccttcagtccggcgatcacgcggtcgagcgtcctttcgtccggcgcgcgcacggtatgcagatggatgccgcccgtgaggtcgcacagcggccgcgccttcgagtgctccagcttgttgcagaaggcatccgcgtcgtagcgcgaaaagatatgcagcggcgccgtgatctgaccgtagatcgaatgctcgaccgtcacatcgatcgccgcgccgcccagatcgacgatcgtgtacagctcctcgcgcagccggtcttcatcgtgatgcgcgacgatgcgccgttccgcatacgccggagcggaggcggcgttttcgaggatatagccgcgcggcgtcgccatgaccgccacaccgcccgcgcgcagcagcgcgacatcgccgacgatgatctggcggctgacgccgcaccgggccgcgagcgccgtcgcggacatcggccggtctgaggccgcgagtaattctgtgatttttgtgcgccgttcggcagcattcatggtctctcaccatccttgtctctctatgatagcaaacttgcgccgctgttgcaagcgaaaatccggacaaacgaaaagagaccgcgattttcgcggtctcttcgattttttcctcagccgagaaggtatacgtttgcgtactggacgcccagctcttcggcacgctcgtgcgtggatacgaagatgtcgatcttgctgttcttgatcgcgctgccggtgtcctccgcgatgaaggtgccgtagccctcgatatagacgcggctgccgagcgggatgatggacgagtcaacagcgatcgtgcgtccctcggccgggggcgcgccggaggccgtcttgctcgcgccgagtgcgccgttgcagcgctcgcacgggcagtagaacgtcagcttgtaattgccgagcgccgtggcgttcgccttgatcgcatcggtcgcgaggtagtcagtcgaatagctgaccgagcgcgctgcgaccggcgcggtgatcagagtcgccagcgctttcgcttcttcctcggccttctttttcgcctcagcgtctgctctggcctgtgccgctgccttcgcatcggccgcagccttggccgccgcagctgccctagcctgcgcttccgcatccgccttcgcacgggaatatgcctttgccgcgttcgtgacctcatccgatgtgagtaccgttccgaccgaagcattcagactggaagagagtaccgcaaccggctgctccagtgccgcagcgttcgccgcagtcactgcgctgacggtcatgaccgccgcgatcagcctggcagcaagctttcgcaaagaaatagacatttgtgttacactcctgatttctggtgaaaacgtgccggaccatcgaggtccggtgacggcaaaatgccgttctgttttcgggtttgttaccgttctgtcagtgttctgtttccgaactgtaacttactatacttcacgtttccccgtttgtcaaatactttgaccgaattttgtggattgcgcacaaagcttattctgcactttcgtgaaatctgtatgcattcgttcataaaaaactgtaattccctgtcgaatgcctttttttcacattctgcctgtttttccgaacaaaaacagcgctgcgcagattatccacaggctgtgcatgacccggcgtccggcagattccaacacttttccaacgaccgaaacgacgggagccgcacctttcggtgcggctccctctctctcttttttcctttacgcagctggcagttttatttcttcagacgattgatatactccagaatgatgtcggtcgaatactcgacgcccagacggccggcgttgatgcacaggtcgtaatggtcgcacttaccccataccttgccggtatagtagttgtaataagtagagcgctgcttatccatcttttcgagcgcggcctgcggggtcttgccctcgatctcatagtcgccgcaggactgaatgcgctttacgcggtcctcaatcgagccgtggatgaagaagtcgaaccggttcgagaaatcacgcagtacatggtcagcgcagcggccgacgatgacgcaggaggacccctctgccatctcgcggatgacgttggactgtgcgaggtagagctgatcggtcaggctcatgccgttaaggccgacagagccgaacatggtcagcgagtaaaggaagctgttggtcgcgcgcttgtcaagctgctcgaacagcttttcatcaaaaccagtctttttcgccgcgcgcgtgatcagctcgcggtcataaaacggaataccaagacggagcgcgagtttctggccgatttcacgaccgcctgtgccgtattcacggccgatagtaataatcaggttgttattcataacgcatcctccttaccggacgaattatacatattgcataatcctttgtactattaccatacatcatttcggcataaatgtcaatagtcattgtgaaattttttcatgttgcgaaatccgccgctctcctctcctgccggaataccgttaattttctgtgaacattgtatgttttccatcgacacgctgttgacttcaaaacacgatgctgataaaatgaaggcatctaatccggcaggaggctgcgccatgcccaaagagaccgtcaaccgtcgtgtacaattcaccaaaaccgcgctgcgcgatgccatgatcgagctgatctgcgaaaaaccgctcacctcgatcacagtcaaggatgtctgtgcgcgcgcggacatcaaccgcagcacattctacctgcactacaaggacgtggactcgctgctcgtcgcggtcgaagactacgcgatcgagtatatccagtcccacttcaaggggccggataatgcttttgatgagcttgtcggttttcttacctatatgaagaacacgccgtgcctgcgcaatctgtttttcgcgctggccggtgaacgcggcgacccgcgttttacgcgccgtcttcaggagctcacctttcaatcctttgagcgcgggtggcatgagcacctgccgaacggcggtctggacgacgagaaaacgcttgtctattcctacgtgctgccgggcatcgtctcggtcttttattcctggctgaccgacaaaatgcctgatatgtcggcggagcagctggtccgtctgctccagaagctcttgctgcacggtgtgaccggtctcggcgaggatctgttcccgttcggcaacagccggacttgactttgccctctgcatctgctatcatagggtgcagttcgatttttatatgaaataatatacattatatatacaccgcttttatcgccggataagagcattggcgtctgccctccatcgtaggcctttgaagatggagcgcggatgcctttttatatgaaggaggtctgttcctatgcaaaccgcagtatccccgggcgaatttcgccgctacgctgcgccgggtgtcctcggcatgatcggcatttcatgctacattctcgcggacacctttttcgtcgccaagggcaccggctcgctcggccttgccgcgctcaacatcgccatcccggcctacaatctgatgaacggtctcggactgatggtcggcgtgggcggcgcgacgcattattcgctctgccgcgcgcagggcgatgccgtcgaggccgaccgcacgttcacacacaccctgcttctcggtctgtgcatcgcgctgctgttcgtgctcacggggacgttcggcgtcgttcccctgtcgcggctgctcggtgcgaacgctgaaacgctcgatatgacggccgtctatctgcggctgctgctgtgctttgcgccctttttcgtgacgaacaatgtcatgatcgccttcgttcgcaacgacggcgagcccggccgcgcgatggccggcatgatcgccggaagcctgttcaacatcgtgttcgactgggtgttcatctttccgtgcggtctcggcatgttcggcgcggcgctcgcgaccggcgcatcgccgctcgtcagcctgctcgtgctctccggccacctgcgccggccgtcgcgcggctttcatctgcgccgtgaacgcctgaggccgcggctgctgccgcgcatctgcgcccccggcctgtcctcgctcgtctccgagcttgcctcgggcatcacgctgctgctcatcaacctcgtgctgctgcgcatcgccggaaacacggccgtcgcggcctacggcgtgatcgcgaacctcgccctcgtcgagtcggccatcttcaccggcctgtccaccggcgtacagccgctcatcagccgaagcgccgaagccgaccgccgccgtctgctgcgctggaccgtcaccaccgcgctcgccatctcggcgctgatgtacgtccttgttttcgtgttcgcctcccccatcaccgccgtgttcaacagcgagcacgacccggcgctcgcggcctgtgcggtccccggcctgcgcatctacttcgccggctttctcgccgcctgcatcaatattatcgcggccgcctacttcagcgccgccggacaggccccgcgcggctttatcatctcgctcgttcgcagcatcattgctatcccgcccgtgctgttcgcgctgagcgcgctgctcggcgtcaccggcgtctggctgaccttcccggcggtcgaggcgctcgcctgcgcgctcagtctgctctttatcctgcgcagtccaaaataacacgaaaaaaatttgcgtccgtccgttttttgtgttataatactcaccgtgactggtgctgacggtcgcgtaccttcgggtatgaggaaagtccgggctgcacagggcaaggataacggataacgtccgccgagggtgacctcaggaatagtgcaacagagatataccgccccgtttcgacggggtaagggtggaaaggcgaggtaagagctcaccgcgccccatggtaacatggggggcctgtaaactctatccgcagcaacgccgaccgggaccatggtttgcccgaccgtcccgactggcggcttgagatgcacggtaacgtgcattcgagatagatgaccgtccacgacagaacccggcttacgcaccagtcatatatacgattcaagaaccgccttcacgggcggttttttgctgtcggaacgacctcgtccgtccggcagaccgtgtcccgcggatgctgcgttccgtccctatatataataaggtatagcgcacaaagcctgttacccttttggcacttgcaaaatctgcggaaatcctgtatactgataaacgaaaaaggcggtgttacgcatttatgacagcattagaacaataccttggcggtctttcggataagcgcgtcggcgtcatcggcgcaggcgtaagcaatatgcccctcatccgcatgctgcgcgcctccggcgtgcgcgtgaccgtacatgacaaaaaggaaccgaccgagctcggcgacggctacgcgaccctcgcgaccctcggtgtggattttgtgctcggcgagcactatctcgacgcactcgacgaggacgttatcttccgcacaccgggtgtgcatccgcgcttcctcgaaaaagcgcaggccggcggctcggagatcacgagcgagatggagcttttcttcgcggtctgcccgtgcccgatcatcggcatcaccggttcggacggcaagaccacgacgaccacgctcgtcagtgagattctcaggcacgcaggctataccgtgcatctcggcggcaatatcggcacgcccctgctcccgcgcgtcagcgaaatgaagcccgaggacctcgcggtcgtcgagctctcctcgttccagctcatgggcatgaagcattctccgcacgtcgcggcgatcaccaacctcacgcccaaccatctggactatcacaaggacttcgacgagtatgtgcaggcaaagacggccatttaccgcagccagaaggacggcgaccgtctcatcctcaacctcgatgacgaggtgacgcgcacgctccacgcctcgggcaatctgttctgcacgagcaagaaccaggagctcgcaaacggcgttttcctcaaggatgatatcatctatatcgcggagggcggcgcgcggcgcgagctgatgaaccagaacgacatccgcatccccggcgctcacaacgtctataacatgatgatggcggcggcgatcgtgcagggctacgcctctgacgacgacatccgcgcagtcgcgaccaccttcggcggcgttgagcaccgcatcgagttcgttcgcgaaaaggacggcgtcaagtattacaacgactccattgcgtccagcccgacgcgcaccattgccggcctgaattccttccgtcagaaggtgatcctcatcgccggcggctacgacaagcatatcccctacgatgtgctcggtcagccgatctgcgaccacgtcaagctgctcctgctcaccggcgcaacggctcccaagatccgcgactgcgtgctcgccgtcgacggcgagcatcccccgatctgcgaggtggagaacctcgaggtcgcggtctgcgaggcggcggcccgcgctgaggctggcgacatcgttatcatgtccccggccagcgcttccttcgaccgcttcaagaacttcatggagcgcggaaagctgttcaaaacgcttgtcaacaatctgtaaaagcacagaaatatgcaaaaaaaaaatgcaccttcgggtgcgttttttttgcatatataaaatgacatccgaaacgttttgccgtttcggatgtcatgccctgttgagacgtgttttcatattctgaatggaactccctctgtatttttccgggataaaatataaaaaatccacgcgacctctgttggttcagcaggcccgtggtatcaaatcggtaagcaaatttacttatcgcttctcgtctcacgctcatcaccgaagatcagatcatcgatatcgggacggtcgggctgctggggaatcatcagcattctcattctgttttcgcctccttctctttattctatgctctattatagcacaatatttccagattgcaaattaaatttttgtaaacaagcaacaataaaacaaaaaacggacgcaccatcgtgcat

SEQ ID NO: 12954 - DNA, 3384 bp, Unknown
  gut microbiota DNA sequence
ccgaaggcgcgcatgaaataggatttgctctgcaaatccataaaaagccggggcgtgtacctggctttttatactctgagagagaaaaaagtttctccggaacttttttccgtccgtgttctgcgaagtcagaacacttttatctgaaaacctgttttcagataaaaatagccccgccctgccgatgcgtcccaattagtaacctgcacgactcatgcaggtgggttttctgtttgatacctctgcgcttccaacatccgtgtatacccgggaggcctgctgctcagcatcaaaactttccgaaatcccgtactaaaaatgtgggttaaaaaagggccgctgtcgaacagggcaggaccgatcaaccggcaagccggtttatcgcgatactgccgcgtacagattgtgccgggcggggattactcctcgtcctctgcctctgcgcgctccatgacgatgttgaacactgcgtctgcaatatcatcgtcctctacgccctcaagcagctcctcgccgttctcgtcggtcacgacctgcatgatgacgacctccgcgtcctcctcaacggacagctccgccgggataaacgccagataggtaacgccttcgtactctaccgtgtcaatatgctcaaactcgacctcgttgccgtcctcgtcgatgagcgttacaaaatcgttgccgtattcctcactcatggatgcggcacctcctgtgcttcaaattaatggaaacgcgcccctttttcgaggttcgcttttcctttgtcaatagcataccaaacattgcccgatttgtaaagtccttttattcatttcggctactgttatcctatgctcctgatatatttatatgataccacgaaaaaaaaggaattaaagccttgactttttcttttctatctgttattatatctcaggtaacaaggaagaaggcacagtcctcacccgcagctacgcaaacgggtcaataattcacgaaaccccggtttcgcgcattatgatgaggaacggcctgtgcgccggtcctttttctttatctaaaaaaacctgttaatcgtttggaggtgctcaccaatcagcagcatggaacatcagatcaatgaagagatccgcgacaaggaagtccgtctgatcagcaacgacggcgaacagctcggcatcgtagccatccagaaggcgcaggagattgccgtagaaaagggcatggacctggtcaagatcgcaccgcaggcaaagccgccggtatgcaaaatcatggattacggcaaattccgtttcgagcaggccaagcgcgagaaggaagcccgtaagaatcagcgtgtcgtggaaatcaaagagattcgcctgacgcctaatatcgacattggcgacctgaataccaaggtcaagaacgcctgccgtttcctcaaggacggagacaaggtcaaggtttcggtccgtttccgcggccgtgaggtcacacattcgtcgcttggtcaggacctgctccatcgctttgcggagctgtgctcggaatgcagcacggtggaaaagcagcccaagctcgaaggccgccagatgcttatgtttctggccccggcaaaagacaagtaaacccaaaagcgcgtgaatatcatccgcgccaattcagagaggagcaaccctaatgcctaagatcaaaacgcacagcggtgcaaaaaagagattttccgttaccaagaacggtaagttcaagcgcggccatgttggcaagcgtcacctgctcaacggccacggcaagaccacgaagctgaagcgccacctgcgcaaggaaggcttcgctgacgctaccaacgtagcacagctcaagcgtctgctgccgtacaagtaatttcgaacacaacatctttcatataggaggcaaacacaatggcaagagttaagggcgcaatgatgacgcgcaagagaagaaaaaagatcctgaagcgtgccaagggctactggggttctaagtccacccacttccgcgtagctaaccaggctgtaatgaagagcctgaagtacgcttacatcggccgtaagcacaagaagcgtgacttccgtcgtctgtggatcacccgcatctccgcagcatgcaagtcctgcgacatcaactacagccgtttcatgaacggtctgaagaaggctggcatcgacctgaaccgcaagatgctcgctgacctcgcagttaacgacatggctgctttcactgcactggctgagaaggctaaggcagctctctaagagacagcacaacaaaagctctgtattttacagagctttttctttttgccctcacatatgctgatacgaggtgatgacccgtgtccgcagttccccgttttccgtctgagacgccgcagacgctctccgtctgttctcccctgtccgtttctgtcgaccgttcgcaaagccgctgtgacagctctatgcagccgcactgtacaccgccgggcgagcgcactctgttcagcctgctgtgcgccgccatgcagccgctcgggaccacgctttacgtctacggcggcggctggaacctcgacgacaccggcgccgggcgcgaagccgtcacgccgttcccctctcctgcatggaaaacctttttcctctcgcaggacgaaggctatgattaccgccgtttccgcggcagcggatgcaatccgtggcacggcgccggtctggactgctcgggatacctcggctgggtgatttacgccgcgctgcaccgcaaaagcggcctcgagagctatgtctatccctcgaccgaaatggcaggtgcgctcgccgcacgcggtctcggacagctcgtccgtccgccctgccgctttctccccggcgacctgttcagcatggaggggcacatctggctgtgtgtcggcgtgtgccgcgacgaaagccttgtcatcgcgcattccagtccgacaccgagccgcagaacaggctgtccgggcggcggcgtgcagctgagcgccattccggcgtgcgacagcagaccgcgctgcgaagcgctcgaccttgcaaggctctatatgtcgcagtttcccgtctggagccggcgctacgaggctgtgagcaggccgcgtactctctataccgtgccgggcacgaactcgaacagcggcctgttccgctggagcgtcctccgcgaccccgagggtattcggagcatgaccgccggtcaggttttgcaaaagctgttcggctgacgatgccgtcggtctttctcttttttcccctcagcagagggaaagcggttccgccgatacagcggcttgccgctggaggcgagaatggccctcccgggccggtggttattcgccatgacatggcgtgtgcattgccgccgcccggcggcgggggcaaaaggggcagggacaccaaggtt

SEQ ID NO: 12955 - DNA, 471 bp, Unknown
  gut microbiota DNA sequence
gcccccaggggcgtctggtgctccaagggcacatccttgatcgaagcggagcttttcgcagcagaacgctgccgctctgcaccgtctggccgcgcactgttatgcgcggcggtttacgtaagggaaattcagggcataacagcatcccaaaatctgcccgacgcacggaaccgagcccccgtaacctccgtttagccgcgaatgcttcgctgagcggcttaaaggagggtctggggtgtcaagaggggaaagggaaccatcggtgccctgtcccatcttgtctccgccgccagacggcggcatccccccgccgtggatacggcgtcctcctgcccgtcagcagcaattatcccttcggataaaacaaaagcaccgactcaaagtcgatgcttttacttctggagcggctgacgaggctcgaactcgctacctccaccttggcaaggtggcgctctaccagatgagctacag

SEQ ID NO: 12956 - DNA, 15481 bp, Unknown
  gut microbiota DNA sequence
taaatgcgaggggcccacagtgacgtctggtgctccaagggtacacgcttgatggaagcggagcttttcgcagcgacggcgtttgcgccctgcatcgtatggccgcgcactgttatgcgcggcggtttacgcaaagtaaattcagggccttacagcgtcccgaaacctgcccgacgcacggaattgtgctcccgtaactcccgtttcgctgcacatctccgatgtgtcagcgcaaaggaaggtctggggagtcaagaggggacaggaaaccatacttggtgtcctgtccccttttgttcccgccggtgaacaccggcaccccctgccgccggtcggcggcaatccccctttagccggtgggcaccggctaagttattccagataaatgtccgcgtccattttctccgtaacatatccgaccgccgccgcctgcggcacactctgccgcagctcatcaaggcactgcgcggcatcctcctccggcagcgcgatcagcaggccgccgctcgtctgcgggtcatacagaatatcctgcatcggccgcgcgatctcgcgcgtcagtctgacgccggcttcggcgtaatcccggttgcggtacgcgccggacgggacaagccccatgtcggcgaacgcccacgcttctttgtggaacggcacgttttccgtctgaatgtgcaccgtgacgccgctgccctgcgccatctcgaacgagtggccgagcagcgcgaagccggtcacatccgtgcagctgtgcaccggatactttaccatcacatcgcgcgcggctctgttgagcgtcgccatctggcggtagatacgctcggtcagtgccttttcggcaagaccggccttcgcggcggtcgtgatgatgccgacgccgagcggcttggtcagcaggagcacatcacccggctgcgcgccgctgttcgtgagcacctttttgggatgcacgaagccggacacggcgagaccgtagagcggctccgcgccctcgatggtatgaccgcccgtgatgatcgcgccggcctcataggccttgtcgtagccgccgcgcagaatatcctgcacggtctccttcgccatgccgggcgcgagacacatgatattgagcgcgagcttcggctcgccgcccatggcgtatacgtcgctcagcgcgttcgccgccgcgatctggccgaacaggaacggatcgtccacgatgggcgggaaaaaatcggtcgtctgcacgagcgcggtattttcgtcgagcacataaacgctcgcatcatcgctcttgtcgtagccgacgatgaggcgggggtcggtatgtgtcctgaagccgtcgagcagccgcgcgagcgtgccggcgccgaccttcgcgccgcagcctgcgcacgaggcgagctttgttagctttacatcggtttccatggtaaaaacgtcctttcgggccgcgctgttttgtatgagcggcatgaaatctgcgtttattatagcataaatttgtgcccggtgcaaaaaactcttgtgttttgcggctttatccgatataatgatagaagtatctatataacattacacagggaggtgtaattacaatgttcatggcactggataaaatgcccgcagcaggcgactacggtacgctcctggcacagtttcttccgctggttgtactgatcgtcgttttctatttcgtactgatccgtccgcagcgcaagcgcgacaagcaggagcgcgagatgcgcaactccatttcggttggcgacgagatctcgaccatcggcggctttatcggccgcgttgtcagcatcaaggacgacacgctggtcatcgagtcctcgagcgaccgcaccaagctcaagatctaccgctgggcgatccgcggcaaggaagctccggctaccgagaccgttgaggctccgaaggaagcaaaggacgcaaagaagtaagcgcttctctgcggcataaaagagtatcttgctgaataggtttccatatccatattcggcgggaggatgggacatatgaggaaaaccaatgagggcgcgtcgccggttcggccggttcttttcggcgcggcagccggactgctcgccacgctcgttctgatgctggtgtgcgccgttctggtccatcagaggacgctcggggaggaattgatccccacgatatcgctcgcctgtctggcggtcggatgtatgctcgcctcgtttctcgcggcgcggcgtctgcccgacggcaggctcgccatcgcagtcgcaggcggaccggtggtttttctgattttgctggctgtctgcgcgctcgcgttgtcgcagcccgtccgattcggtcgcacagccgtcagtctgctctgtgcagtcgcggcttcggtgctcggcactgctgccggcatctatatgcgtacaaaaaacaaacacagtcatctgaaaaagtaggagggaaacatccatgaagcacgtatctaccctgacctctgcaaccctgaagcagaccgcagcacacggcggctgcggcgagtgccagacttcctgccagtccgcttgcaagacttcttgcaccgtggctaaccagaagtgcgagcacgctaagtaatcgcagatttcaaatgagcatgggcgcgccttgggcgcgccttgctatgtatatcggaggaaataacaagaaatgatccatcgttaccagaaaaaaggtctgaactttgtcctggacgtcaactccggcgcagtccatctgctcgacgatatcagctatgcggtttccggtctgatcgacgagaacatgaccgagaagtgcccggagagcgttgtcgaggcgctgccgcagtatgcggcggacgacgtgcgcgaggcatacggcgagctgtacgagctgaaaaaggcaggccagcttttcgcggaggacgactacatcgacgtcagccgctacattccggtcggcgcaccggtcaaggcgctctgtctgcacgtcgcgcacgactgcaatctgcgctgcaagtactgcttcgcgtccaccggcgacttcggtcagggccgcaagatcatgccgcccgaggtcgcgaagaaggcgatcgacttcgttatcgcgcgttcgggcaagcgccgcaacatcgaggtggacttcttcggcggcgagccgctcatggcgtgggacaccgttacccagacggtcgattacgcgcgctccatcgaggagcagcacggcaagaagttccgcttcaccatcaccaccaacggcctgctgctcgacgaggacaagcgcaggtacatcaacgagaacatggacaactgcgttctgtcgctcgacggccgccgcgaggtcaacgatgagttccgcaagaccgtcgcaggcaccggcagctatgacaccatcgttccgaagttcaaggcgctcgtcgacgagcgcgacccgaacctcgactactatgcacgcggcacgtttacctcgcataatctggatttcgccaacgacgtgctgagcatcgcggacgcgggcttcgaccgtctgtccgtcgagccggtaacggctgatccgggctgcggctacgacctcaccgaggacgatctgccgaagatcgaggcagagtacgaccgcctgaccgacatcatgctcgagcgcaaaaaggaaggcaagccgtttaccttcttccacttcatggtcgatctcgatcagggcccgtgcgtggtcaagcgcctgcgcggctgcggcgccggttacgagtacgttgcggtcacgccggacggcgacatctatccctgccatcagttcgtcggcaaggaggagttcaggcagggcagcgtgctcgaccagtcctttgacatggatatcgcgcagaagttcgccggcatgaacatctattcccgcccgaaatgccagaagtgctgggcgaagttctactgctccggcggctgctccgcggcgaactacaacatgaaccacgatatgaacgactcctatgacctcggctgcgagatggagcgcaagcgtctcgagtgtgcaatttatctaaaagcaatggataaaatttgtgaggaagaggcaaaataacgatttacaaaaagaatgtgtaaaatccgttgcgaaaagcgtcggcggtgcttataatgtcttttgtatttatgtatttaaaatactctcgataaggagatgatattatgccgcagaatgttctggtatccgtgctcggcgaaggtaaatatctgaccgcgctcgtccgtgcaattctggaaaagaacattattccgacgcgctttctgtttctgtctgcaaaaaatgaggcctctcttcaggccgcagagggctatgacgtaacggtctgcgaagatgagctttccgctgtcatcaagagcgagatcgtgctcgtcactgcgtcccgacgcgaaatgccgaccgagctcgcgaagatctcgagcagctcgcagaaaagggttgtcgtatccgtgtgcgacagcgacaaggtcgatctggcatacctcagcgagcgcatcgttgccgcgaccgagctgatggccgctgttctgcatcgagatgaagacggcagactgagcgcgtcctacgaggcgagcaagctcgcgcgtccgttcctgtgcaagcccgcacgcgacatcgttgacacgatgtgcgagatgctgaacgaagagggctgagccgcagcgttctaacagaacgagaccgggaatatgctgttctatggcttccgaaagggggagacgtatgaacaaaaggcatattcccggtttttttgatgccctcgcgcgcacgccgtcgtttgtgttcctgtgctcgatgtttctgtgcggcgcggcggcaggcggactgaccggcctgcatgcggcggagggagactgcgcgctcgagctgaccgcgctgctgcgcgagctgcccggacaggccggaaagagcgtgctctgcgcggtgctgtggctcgtgctgccgcctgcggcggcgctgctccgtccggcggcgctctggctgtccggcatcgcagcggcgcggggctttgtgctcgcgctgtcgctcgccgtcgcggtcgcgcagggggagggggcggccgtccttgcggcggaggcgcttccggcggtcatcagcgtgtcggcgctgctcgccgcctgcacgctcgtgtgggaatgcacacagaacgccgcaccgtgggcgaaaagccgcgcgccgtttgcgctgtgtctcgcttctgcggcgctgagtgcgctgctgcgcgtgttttttgcgattttactggccgaataacgcgaatatggttgcattttttacttagatatgctaacatttagacatataaaatgtcggtctgtctttgcgatgccgatgctgtcgcgcgacagcatgaatcaaaaagcgcttgctgcgcaaacgtatggaaaacggggaaaggcgccttgattttcatgcgttcggacgacttgacttctgcggagccggaacacggactgccggaaaagcacagttttcgacagtcttatggtaataccgcataattgaacaagagcgatttgtgagtaaattttgcgtactgacgaggcgcggctttgcggtaatacttgatgtattaccgtgaaatcgcaacaaagtcagggcacaaaatttccgcaaagcgccgcagctttaattgtgcggtgttgccttatataaaactatgaagggcggcggcaaaatggcggatgcacagcagatcaacgattttctggtcgatgccttcgggcgcatcaataaaattgaagagcgtgcgatgacgaccggactcgggagcgcgatctccatcacggagatccacatcatcgagaagatcggtctgtctgagccggcgcgcatgagcgagatcgcgcatatgctcggcgttaccctcgccacgatgaccgtcgcctgtgacaagctggaggggaaggggcttgtgcgccgcgcgcgcagccgcagcgaccggcgcgtcgtgcaggtcacgctgaccccgcgcggacgggcggtctacgagtatcaccgcgcgttccacgaacgcatgatctcgtccattctggacacgctttcgcccgagcagagcactgttctggcgcagagccttgaaaaactgcaggacttcttcctccgtgaggaagccgctgccgaaggggaaaacaatggataatctgatattctgtctgaacgcgaccgtgccgatctttgcgatcatcctgctcggacggctgctgcgcggccggaattttttcagcaaacagacgctcgcggagatcgacaagctgtcgttcaaggtgctgctgcccatcctactgttccgcgacatcgccgccgggcgcatcacagagcagttcaacgcgaagttcttctttttcagcgcaggcgttacggcgctctactttttcgccatctgggccggcgcggcgctctttctgcgcgacaagagcatggtcggcgcgttcacacagggcgcgttccgcggctcgcaggccatcctcggcgttgcatttgtgcaaaatctgtacggagatgccggtcttgtgccgctgatgatcgtggcgagcgtgccgctctacaacatcttctcggtgctcgtgctgaccgtgaccgcgccggacgcgcgcacggcggactatcacggcgttgtcaggcgcacgctgcgcggcatcatcaccaacccgatcatcctcggcattctcgccggtctgccgttttcgctgctgtcgatcgactttccgccgatggcggacaagttcctgagcatgctcggcggctgcgcgacgccgatggcgctgctgagcatcggcgcggggttcgagggcgcgaaggccatcaaaaagctcggcccgacctgcgccgctgccttcatcaagctcatcctgctgccggtcatcttcctgccgatcgcggtgcacatgggcttccgcgagcaggcgctcgtcgccatcgtcatcctgtgcggcgcgccgagcacggtttccggttatgtcatggcgaagaatatgggcggcgaccatgtgctttcgtcctcgatcatcgtgctgacgaccgtgctgagcgcggtcacgctgacgctgacgctgttcattctgagatcgtttgcgctgatttgacaatgccccttttctctggtatcatgggaacagtaatgccggagaaaaggggtttttgtgttctccggggaggaaaagagggggaaaagcatgctgacatatcatctggacgcgcagagcggcgtgccgctttacgagcagctttaccgcgcggtacgggcggacatcatgtcgggagcgctcgccggcggcacgcgcctgccgagcaagcgtcagctcgcggcgaacctgcgcatcagccagatcacggtcgagaccgcctacggtcagcttgccgcagaaggctacatcgtttccgcgccgagacgaggctatttcgtgcaggagcagatcgcgccgccgccgtccgttcatacggaaactgtgcacagaaccgtgggaaaatatccgagaaacgagcggtatgattacgatttcaagacgaatatcgtagataacggctgctttccgttctcgacctgggcgcatctatcgcggcgcgtgctgagcgaatattccgcgcgcctgctcgaggcgaccgatccgcgcggcgtgcttcagctgcggcaggagattgcgcactatctgcatgatttccgcggcattgcggtctcgccggagaatatcgtcgtgggcgcgggtctggaatatctgatcggcctgctcattcagctgctcggtcacgggcatgtgtatgcggtcgagaacccgggctatcgcaagctcgcgcagatcgtcacgcagaacagcgccgctctgcggccgatcccgctcgacaagagcggtctgcgcgccgatgtgctcgctgaaagcgacgcctcggtcgtctatctcacgccctcccatcattttccgctcggcacggtcatgccggtcgcgcgccgtctcgagctgctgcgctgggcggcggggaagcccggacgctacatcatcgaggacgactacgacagcgaattccgctatgcctcacgcccgatcccggcgctgcgcgagcttgaccgcgagggccgcgtcatttacgtcaacaccttctcgaaaagccttgcgccgggcctgcgcattggctatctcgtgctgccggatgcgctcatggcgcgctaccgcgagcgtttttcgctgtacgccgcgacggtctcgagcttcgatcagtttacgcttgcggcgttcatgcactccggcggctttgagcgccacatcagccgcagccgcaaggtctatcaggcgcggcgcgacgcgctgatggcggcgatcgaccgcgaatttaccgagctgccgcacgagatctcgcgctccgaggccggtctgcacctgctgctccatatgcgcaacggtatgctggaacgcgaacttgtcgagcgcgcaaaggccgcaggtgtgcgcgtttatgcgctttctgcgtactatatgccgcctgtgcgaccgccgcgcgcaacgctcgtgctcggctatgccggcatgaccggagagcagatcgacgaggcggccgcgcgtctgcggagagcatggacaaaggaaaggtgataaatttttcttgacaaatcgcgccgcgcgtcctatactgaacgtgcaagcaagggtgccgtgatgagcggctgagagggcgagagcctaaccttttgaacctgttggttagcaccatcgtagggaagctgtcgcatcaatcgaaattcaatgccccggttttaccgcaatggtagaccggggcattttttgctgcaaaaacatatgcagcgccatggaaaggaaggatcatcatgaaggtaaacggagaagagcgctcgcttccgcaggagggtacggtgctgggtctgcttcgcgagctgggacacgatccgcagcgtgttgccgtcgagaaaaacggcagcatcgtaccgcgggcggccttcgcggaggaaaagctgaccgatgcagaccatctcgaggtcgtgtgcttcgtgggcggcggctgattgcttcgcctgaaagcgagctttcaggcgagaggggtcgtaccgcatgaatgcggatacgacccggagaactctgcgcgtcgcaggcggcacacagagttctcacttgtaaaaaaaccgtgatacacaaggtgaattgccgcgcagcggcaagagagggtggcctgggccatgctcccggtttttttgaatttgctttgcaaattctatttaatgcgcgcttccgcgcgggagcagggaaacggagggcattttgccgctcggacagaaaaagcgctttgttccgcgtttctgcgcacgaaggacaggagaacctacatgattttaacgaaagaacagctgcatgacgcgctcgtggagagacacggcgcggagatacagaaaaagctcgacggcgcgaccgtcggcatcgcaggactcggcggactcggttccaatctcgccgtgttcctcgcgcgtctcggcatcggacatatgattcttgtggatttcgatgtcgtggacatcaccaacctcaaccgacagcactacacgatgaaggatctcggcgtgccgaagacgcttgcgctcgtcgagcagctcgaggccatcaatccgtatctgaactacgagacctatactgagcgcgtgatcccggcgaacgtgaagcggctgttttctgagtgcgacatcatcgtagaagcgttcgacaagccggatcagaaggcgatgctgatcgaaaacgttcttacgcagctgccggacaagccgctcgtttcgggcagcggcatggcaggctacggctccgcgaacctcatccgcacggaaaagcgcttcggcaatttatacctgtgcggcgacggcaagagcgacgtggcggacggtctcggtctgatggcgccgcgcgttgcggtctgctcggcgcacgagggcacgatggtgctgcgcctgctcatcggcgagacagagccgtaacacagacaaaaagggcgaaccaaccggttcgccccttgcacggctatattatttattccttgggctgatccgaaccgcagtgtgcgcacttgacggctgcgatcgggatttcggagcagcagaacgggcacttcttcgtggtcggtgcggcgggcgcttcaggcttctttccgatggagagcagcttgttgaccgccttgagcaggcagaacagcacgagcgccatgatgaggaagttgatgaccgaggtcagaaatgccccgtagcggagctcgatgccgccgagactgagcacaaaaccgctcagatccgtgccgccggcgagaccgaggatcgggttgatgaggttttcggtcagcgaagtcacaatggtcgtgaacgcgccgccgatgataacaccgatcgccatgtccatcacgttgccgcgcagcgcgaaggccttgaattcttcgagaaactttttcattttttcaccccatttacattattaaccttagtttacatgcttgaccgtgacgggtcaagacacaaaaggagatttttactatgacagacaagttgattctcggcggacacgagttcaccagccgtttcatcctcggttcgggcaaatattcgctcgacctcatcaatgctgcggtgcagaacgccggtgcggagatcatcacgctcgcgctgcgccgcgccaatcagggcggcacggcgaacatcctcgactacatccctgagggcgtgactctgctgccgaacacctcgggcgcacgcaccgcggacgaggccgtccgcattgcccgtctgtcgcgcgagtgcggctgcggcgatttcgtgaagatcgagatcatgcgcgacagcaagtacctgctcccggacaatcaggagaccatccgcgcgaccgagatcctcgcaaaggagggctttgtcgtcatgccgtatatgtaccccgatctgtacgcggcgcgcgatctcgtgaatgcgggcgcggcctgcatcatgccgctcgcggctccgatcggcacgaataagggtctcgcaacgcgcgatttcatcaagatcctcatcgacgagatcgatctcccgatcatcgttgacgccggcatcggccgtccgtcgcaggcgtgcgaggcgatggagatgggtgcggcggccatcatggcgaacaccgccatcgcgaccgcgggcgacatcccggcaatggctgaggcgttcaagaaggccatcgaggcaggccgcgcggcttaccttgccggtctgggccgtgtacgcgaaactgcgtctgcctcgtctccgctgaccggatttttacaggactgattagggaaaagaagggtatttgtcatggaaaacgaaaaaacggagatcatctccgcaaaatatattaccgccgagaccgaccatatggcctatcagccgggcatggacaacatcggctcggaaattcaggatgaggtcatctcgcgcatgaacgcctacgacgcggatgcctataccgcggctgacgttctgcgggcgctccgcaaggacgtgctctcgcccgaggatttcgcggcgctgctgtcgcctgccgccctgccgttcctcgagcagatggcgcagcgtgcgcagatggaaacgcgcaagcatttcggcaactcggtgcagatgttcacgccgctctacatcgcaaattactgcgaaaactactgcatttactgcggcttcaactgtcataacaagatccgccgcgcaaagctcgacatggacgagatcgagcaggagctcaaggccatcgcggacaccggcctgcaggaaatcctgctgctgaccggcgagagccgcgccatgtcgccggtgtcgtatatcggcgaggcggtcaagctcgcacgcaaatacttccgcgtcatcggcatcgaaatctatccgctgaacgtggacgagtacgcttatctgcacgagtgcggcgtggattacgtgaccgtctttcaggagacctacgacgaccagaagtacaagaccctgcatctcggcggccacaagcgcattttcccgtaccgtctgaacgcgcaggagcgcgctatcatgggcggtatgcgcggcgtcggcttcgcggcgctgctcggtctgtccgacttccgcaaggatgccttcgcgaccggtctgcacgcctacctgctccagcgcaagtatccgcacgcggagatcgcgttctcctgtccgcgcctgcgtccgatcatcaataacgacaagatcaatccgaaggacgtccacgagccgcagctcctgcaggtcgtctgcgcgtatcgcatcttcatgccctacgcctccatcaccatttcgacgcgcgagcgcgccggtttccgcgacaacatcatcggcatcgccgcgaccaagatttccgcaggcgttgatgtcggtatcggcggccattcgggtgaggagaagggcgacgagcagttcgagatttcggacggccgctcggtcgacgaggtctataacgcaatctgcgagcacggtctccagcccgtaatggccgactatctgtacgtataaagctgcgcatcgtgcataagccgcggatttttctgccgcatttcgccttcggcgaaacaggcagaacaggcgctccgcagagcgccgcgtaaaattccctatcaaagtccagctttgccggactttgataccgatgcccgcgccgccgcggcgcggcctcgtttgctgtgcaaacgagagggggatatccggacaagtttccctgggaacttgttcggtatctaagggggacagcgtcccccttggaagctaaatgcctgccgccgaagcgcggcggacgcatcaggacagagcgcaccgcatgcctcgatgcgtcggaaaacgccgtgctccggaagcaataaatttcacttcaaggagtatcagtaaccatgagaaattatgcaacgcagatggatgccgcgaagcgcggcatcgtcacgccggagatcgagacggtcgcccgcaaggagaaccgcccggtcgagttcatcatggaacgagtcgcaaagggtacgattgcgattccggcgaacatcaaccacaaaagcctgtccgcggaagcggtcggcgacggaacccacgtcaagatcaacgtcaatctcggcatttcgggcgactgcaaggactatgagatggagctgcgcaaggtgcgcatggccatcgacatgggcgcggaatccattatggatctgtccaactacggcaagaccaacacgttccgcaaacagctcatcgatatgtcgcctgccatgatcggcacggtgccgatgtacgacgcgatcggctatcttgagaaggatttgctcgagatcaccgcgcaggacttcctccgcgtcgttgaggcgcacgcgcaggagggcgtggacttcatgaccattcacgcaggcatcaaccgacgcgcggtcgaggccttcatgcgcgagggacgaaaaatgaacatcgtctcgcgcggcggctcgctgctgttcgcgtggatgcagatgacgggcaacgaaaacccgttcttcgagtattacgacgatgttctggacatcctgcgccgctacgacgtgaccatctcgctcggtgacgcgctccgtcccggctgcatcgacgatgcctccgacgccggtcagatcagtgagctgatcgagcttgggaaccttgcgaagcgtgcgtgggacaaggacgtgcaggtcatgatcgagggtcccggccacatggcgatgaacgagattgcggcgaatatgcagatggaaaagcgcatctgccacggcgcgccgttctatgtgctcgggccgctcgtcaccgacatcgcccccggctatgaccatatcacctcggccatcggcggcgcgatcgcggcgcaggcaggcgcgaacttcctgtgctacgtcactccggccgagcacctgcgcctgccggacgagaatgacgtccgtgagggcatcgtcgcgagcaagatcgcagcacacgcggcggatattgccctcggcctgccgggcgcgcgcgaccgtgataacgcgatggcggaggcacgtcacaagctggactggtcggcgcagtttgcgcttgcgctcgacccggaaaaggcgcagcgcttttatgaacaggttccgccgaccgagcgtcatacctgctcgatgtgcggcaagatgtgcgctgttcgcacgacgaacatgatccttgaaggaaaaaaggtagagttctgctcggaaaagggcagctgctgagactggtcgaaaaacttcgtttttccgacaagccgtgattcgctgcgcaaatgctgtttcatgtgcgctggcgcgcggctgtttcagcatcgcgaatatgaattttaccaaaaacagaaacggcacgcctttggcgtgccgttttgctgcatatattatgtctttttatctgccgagcagtcggttctggacgttttcgaagccgagacggtttactgtgtccgagaaacgctcaccggcgctgccctcgtcgcggaacagggtgagggcacgctcgatgacctcgagcacttcctcctcgctcgtaaatacgtgcgcgagcatacggccctgcgcagtgcgcttgccccagcggccgccgatatagaccgcgtagccgcgcttttcctcgccgacaacgccgaacgggcacttgccgacacagcgtccgcagtggttgcacatctcctcgttccagtcaagtctgctctcgcccagacggcttgcgccgatggggcaggccttttcgatctggcagaccttgcagccgcggcatttggagaggtcgtgcgacggcacgcgctggccgatgacgccgaggtcgttcagatcgggcttgacgcagttgttcgggcagccgccgacggcgatcttgaacttgtgcggtagcctgacgtcgtgccagcccttgtagaagcgctcgtgaatggtacgcgaaaacgcgaccgtgtcgatcagaccgtactggcaggtcgtgcccttgcaggcgacgacggggcgaaccttcgggccggtgccgccggtctcaagaccgtgctccgcgaggaaggcgcagaacggctcgatattggcgaacgggatgcgctgcacctcgatggtcagacgggtggtcatggcgatctcgccgctgccgaacttctctgccgcgtctacgatcgcgcggatctcgtccggctgaaggcggccgtttcgcgtgatgacgcgcgcgttgaagcagtccgccgtggttttgtcgtgcaggaaaccgagtcccttgacccgtttgatgtcctcgggggtcggaagcgtgccgttcatgctcattgatgtatcctccttgtcgcgccgcgggaaaacggcgattatcctctatgtatcattatatcaaaagatagagggaaaagcaatttctctcttttccctcagcagaggggaagcggttccgccgatacagcggcttgacgctggaggcgactttacgccctcggagggcgtggacagtggccgccttcggcggccgggaaatgccgccgcccggcggcgggggcaagagggggcaagggcaccgtatggttcccttgcc

SEQ ID NO: 12957 - DNA, 1235 bp, Unknown
  gut microbiota DNA sequence
agagccgcagcgtgcgcatcctgagcatccacaaatccaaggggctggagttcccgttcgtgtttttgtgcgacacggcgcgcctgttcaacaaatccgacacgcgcgcgagcgtgctcgtgcacccggcgctcggccttgggccgaagtgcacggatctggagcacggcgtggaatacccgaccatcgcgcggcaggcgatcgcggcgcaactgctgaccgagacgctctcggaggaaatgcgcctgctgtacgtggccatgacgcgtgcgaaggagcgcctcgtcatcacgggcaccacgcacagcatcgccaaaacgaccggctggctggacgccacggcgcgcgcgccgctcccgccggagctgctgcgcggcatggcaagccccctgttctggctgctgcagagcgcgctgctcgaccgggacgagcgctacctgcgccggaactatgtctatctgaagccggacgccgcggccggaagcgcgcaagccgagaccgaacccgcgctgccggagccggacccagccctgctggcgcagctcgagcgcgcgctcacgttccgctatgggcacgcgcaggcagtcgatctgccgtcgaaggtgacggcgacggagctcaagcggctggaggcggaggacacgccgcccgaggacgccggcgcaccgctgctggcgggcgcgccgcgcacgcagaccttccgccggccggacttctcggcgcgcgcgcgcaagctcaccgccgccgagcgcggcacggccacgcaccgcatcctgcaatacctgcactttgccgacgcgcgcacgccggagggcatccgcgcgcaggtggagacactggccgcgcgcggtcagcttacggcgcgcgaggcgcaggccgtggacacggcctcgctcctgcggctggggcgcacagagctcggcgcgcagctcgcagcggcggagtcagcgggcacgctgcggcgcgagtttcgcttctcgctcctgtgcccggcggagacgttcttccccggcgccggggacgagcaggtgctgctgcagggcgtggtcgacgcgtggttcgagacaccggacggcctcgtcatcgtggactacaagaccgaccgcatccaccctgaggacgtgccggcgcgcacggcgtactatgccgcgcagctgcgcgcctacgccggggccatggcgcgcatcaccgggcggccggtctgccgccgcgtgctgtatttcctgcactgcggc

SEQ ID NO: 12958 - DNA, 813 bp, Unknown
  gut microbiota DNA sequence
cttccggcagcgcctgctcacccccgcagtaggggcaccagcgcgcatcatccgggatatctcgtccgcagtagggacactgcattggcttcacctgccctttcacacacacaaatgtttttcctcaatgtaccatattcccggccataccgcaaggataaaaaatgtcccccggttgttcgccgggggacaaaagaaacactgttaacccgcgatgcgcttggcgcccacgtagttcttcaggtagtagctcgagctcaggtcgctgatgacgacgcagcctgcgccggagctgctgtggatgaactggccgttgccgatgtagataccgacgtggccgatgctggagctgttgctcgcaaagaacaccaggtcgccgagctggaggttggccttctcgacataggtgccgttgttgttgtagatgctgctggccacacggctcatggaatagccgcagagcttgtacacgtagttgacaaagccggagcagtcaaagccagagggactcatgccgccgtagacatacggcgcacccatgtactgcttggccgtggcgacgatggtctcgccgatggagccgctgggcgtgctgctgccgccggtactgccgccgtccgacttcgtggtggtgacgtaggcgctgttgacatagcccttgacgccgttgatggtgacggccgtccagttgccgctcgtgccggtgatggtcagcggcgtgccgttgttgtacgtgccgaggatggaatagttcgtgccggcgccggaacgcagacgcacgtcgttgcccttgatgtagccggtctggctcgt

SEQ ID NO: 12959 - DNA, 998 bp, Unknown
  gut microbiota DNA sequence
ccttgctgtcggccccgccgccggagacgtagtccgagcggatgtagccgctcacgccgccgatggtgaccttcgaccagccgttttccgtgccggtcacggtcagggccgtgccgttctggtaggtaccgaggatggagtagttcgtgcccgggccggagcgcatgcgcacatcgctgcccttgaccgaaccgttggagccggccgtgctgccgccgctcgacgtcacgcccgagagcgagacatagtccgagtggacgtagccggcggtgccgttgtagctgaccttgtaccaggcgccgctgacgccggtgaccgtcatggtcgtgccggagttgtaggtgccgaggatggagctgctcgtgctcgcgccggagcgcatgcgcacgtagctgccgtcgatcgtgccggtgccgaagctggcatccatttcattggcgcgtttgaggtaatcggaagatatgtagccgacggtgccgttatagaccaccgtggcccagccgccgctcgactgcgaggacaccacgacgtgggtgcctgccgggagcgtggagataatgccgtaattcgttccggcgcccgttcggaagttgacggccgtcgtcgtcgttgcgccgccggcactcgccgcggaagccgaaacggccagcgtgagcgcgaagagcgcggaaacaacggctgttttcagaaatcgtttcgccatagaatcatcctttgcttagttattcgcgagcgcgcggtccagccacacagccgccacgtccatggcgttgtagaggccgtccttttctgtctttttgaccacacggtcgcgggatttcagatccgggtcggtgagctgaagctgcacggagacccgcgtcgccacgtcgaggtccttgacctttttcgtgtcgaggatctgcatcataatgatgtacttgtcggccatgctgccgtaatagagcaggttgtctttccggcgcagcggatggcctttgtagcacagttcggtcgat

SEQ ID NO: 12960 - DNA, 1127 bp, Unknown
  gut microbiota DNA sequence
ggcatcatcctgagcatttcgcgcgatattccgacgaaaaaagcgcgctagtatctgactttgtaaagcatatccggcagcccgcggcggccttcggcgcggactgcccgatttccgctttttgatcctgggaggcattgctatgaactttctctttacctgcggcggcactgcaggccacatcaatcccgcgctcgcggtcgcgggcatcctgcgcgaccggatgcccgactgcggcatcctcttcgtcggcgccaacggcaagatggagaccgacctcgtcccgcgcgcgggctacgacatcgtgaccgtggaggtcacgaacatccaccgcagcctcaagccggcggagatcgcgtacaacttccgctcgctgcacaatgcgcggcaggcgacgaaggacgcgcgcaagatcatcgaggactttcagcccgacatcgccatcggcaccggcggctatgtctgctaccccgtgctcaaggcagcggcgcagctcggcatcccgaccatcgtgcatgagtccaacgccgtgcccggcctgacgacgaagatgctcgccggcgcggtcgaccgcatccttgtcggcttcgaggagagcaagcagcactacagcgagcaggaaaaggtcgtcgtcaccggcacgccggtgcgcggcgcgttcacggcctgctccaaggcggaggccaagcgccagctcgggctcgacccggacaagccgctggtcgtgtcggtctggggctcgctcggtgcgtcgtacatgaacgaggtcatgacggcgttcatcacgcgcgccgccgtcacggacgcgccgttcacgctcatccattcggcggggcgcaacggctatgagaagatgcacacggccctgctcgaaaagtgcccggtcgatctcgccgcgcacggcatggacgtgcggccgtatatttacgacatgccgctcgtgatggacgcggccgatctcgtgctctgccgcgcgggcgcgtccacgctcgcggagctcacgtgcatcggcaagcccgcggtgctcatcccgtcgccgaacgtcacgaacaaccaccaggagcgcaacgcgcgcgtgctcgagcacgccggcggggccaaggtgctgctcgagggcgcgttcacgg

SEQ ID NO: 12961 - DNA, 309 bp, Unknown
  gut microbiota DNA sequence
aataaatcggtaaggattttattagacaccgccgatttgcacgctttcaaaaaccatggcttctgtttccatattgcccgtaaacagcctaccctgtaaaaacaggggaatggtgcgacggacaaagaaaaagggcggcaggggagccgtccttcgtgcttcagccgggaaatcctgttttccgcgcacgaccatcagccatgacgcttgtcatggctggttttttaatcctgatattcgccgcgggcaatcgcttcttcacggcggcggcgtgcctcggccttctgtgcgagccatgcctgctcccag

SEQ ID NO: 12962 - DNA, 855 bp, Unknown
  gut microbiota DNA sequence
gcgtacagcaataaagcgaagaacgccaacttgcagcgttacgccgaggcgtttagctttctgcaatccaaaaacctttacactgtggacgatctggaaagtacgcttcacgctatgcagaacaagattgatacgctgaaaaggtctgcatctacaaatcaggctcgtatcaaagaagttgacgagttgctgcgtatggtggactactacaaatccggcaagtccgctacggataagctgaaatccatccgctttgagaaatcacggcagaagtacaaagcggaacacgataacgagctgcggacattctacatggcggaacgcaagctgaaaccgtatttcaaagatggcaagctgcccatcaccgcatggcgcagggaacgggagcagttggagcaggaatatagggacattcagacagagcttgcgccgctccatgcagacgcgaaaaagctctgggcaatccattacaacatctacgaagtgcagcatgagcaggagcgccagaacaccacgacgcggcagaaaaagcaggaaattgaacactaaggagggcattgcctattgagcatttttgaagctgtcaagcagactgtgaccacccggcaggctgcggagcgatacggcatccgggtggaacgaaacggaatgtgtcgctgcccgttccacgatgacagcacacccagcatgaagctggatcgccggtattactgctttggctgcggtgctaccggggacgtaatcgacttcgtttcccggcttcgcggaatcggcagcaaggaagccgcaattctgctggcacaggattttgctattctgtatgagagcagcgcagataagccgtgtaagccacaa

SEQ ID NO: 12963 - DNA, 424 bp, Unknown
  gut microbiota DNA sequence
tatcgccatccccgcgcatcatttcaaaatcctcttgatttacgattgcaaccggaaattttgttccgttcacatctgcagagacgatttctctcgtctgtacatccgttacaccggggatggatttgatttctttaatcaaagaatcattcagtggattgttctgtaggattgtgtccagattattctccgaataggcttcatcataattctgggaataatccagctgcaactcaaattgtccatagttgattgcaatccgcgcctcgtgctccgtgtcaatattcccaacataattagagataattacaaacaatacacaggaaagccccatggtaagaatcgtagcaatggttcttttcggattgcctgtcacatttgccattgccatggagaaaacggtgacatcttttctgccttttcg

SEQ ID NO: 12964 - DNA, 367 bp, Unknown
  gut microbiota DNA sequence
gaccttgtcggtgtccggctccttggagtcgagctggaacgggttcttgccctccgcgatgcggcgcgggtcgtagcggtacaggtgccagtagccgcactcgaccgccttcttcatctcgtcctgcgaggtgcccatgccggccttgatatgctgctcaaggcacgggcagtagcagatgacgatggacgggccgtcgtaggactccgcctcgcgcagcgccttgagggtctgcgcctggtctgcgcccattgcgacctgtgcaacgtaaacgtactcgtactgcatcaggatcgcgccgaggtccttctttgcgacctttttgccgcttgctgcgaactttgcagttgcagaagtcggggttgcc

SEQ ID NO: 12965 - DNA, 1505 bp, Unknown
  gut microbiota DNA sequence
cagcgcgtactgaaactgcccatcgtctgtgatctgcgctgccgtggtgaatttctcgttttcttcggcaatatggtcaccgattttactgccgatcaggaatcccagcgccagcataacaaacacgattgcaacgctgaatgccatttcacgaggcttaatttccatcgctgtcaccgaacaggttctgcggagcatcttccggtgcgtcgtagtccgcataggtcgtgtcgattgcctgatagttcattacgcgcagcaggaaaccagttgggaaagaccgtaccagtttgttgtatgtccgtacctgctgattatagttgttgcggtactgcgcgatctggttctcggtcagcgcaagctcggtcatgagctgcttgtaattttcgtttgccttgagttccgggtactgctctgcaacggcgttcaacgcaacctgcgcttgttcgaccttaccggacgcggcagcagcgcgagcctgtgtaatcctggtcagcgtatcgccctcgtaattctggtaggacttcaccgcgtccgccagattgtacacgaggtcaacacggcgtttctcggctacctgtacgtcggctgccgccgaactgacctgttcctctgccgacaccgcacggttattggccgatatgaatgcagcggcaatcataagtaccagcgctgccacgatggccagcacgattaaagcaattttcttcatttccgttcatccctctgcgtttctgttttgccgcgtcgcaagtccttccacgtgtcacagagcctccaaaacgcgtctgtggtttcctgccccatgaacaagaacaaccgcagcaaaccaagcgtgataatcgatccgcccagaatgacagccgcatagatataaacgcttgcgattctggtaactatatcaagcatcatcactcgaagcctccatctttaccgccgcgccctcggcgtaaaaacggcagttttcgcagctcataccgtcacctctgcgcactccgcgccgcaggccgcatagcctgccaggtcgacaaagctgtccgccgtgccgccgacgcagctcgtgccgacacgcgcgattttaagcagcgccatcagcatcgcgacatctgccgccgtcaccgtgacaatggcgtccggcgagacgcacgccgcgcggagataagtctcccagagctctgcgatgcagccgaagctgtcctccggcgagccgtagtcctcctcgcgctcaccgcacacgcacgcacgtgccttttcgagcaccgccgcgcgcgtcagctttttcgcctcgccctcgccctcgtccggctcatcctcagtttcgagcttttccgcctcgacggcaatgccctcgatcggatagcttgccggctgcgcgcaaatcctctcgttcagcagcaccgactgaatttccacatccgccgtgcgcagcctgtcctccacatccgcgaaatctccgcagatgcctatcagcgccctgcgcatcgcagcggcgacctttttgtatt

SEQ ID NO: 12966 - DNA, 792 bp, Unknown
  gut microbiota DNA sequence
caccccctttggccggaagctccgtctgcggagattctcgcccgccgggggcggttttatacctattataatatgtcgcaccgtgtcgggtccggtcactgcacgagccgggcgagcgccggccccgcgctctcgccgaacaggcgcacggcgcgcgtggcctcctgcagcgtgttgccgctgctgccgacctcgatgatgagcgacccgcgcgtgaggtgctggttgtagcgctcgttgacgagcgtgatcggccgcatcagcgtcgggtgcgccgcattcaccgcatcctgcagatacaccgccaggcgcaggttctcctcccagtacgggtggtagagccccgaggcgttcgtgcccacgagcagcatcacctgcgagcacgcggcatcgggcagctcggccacggtcttatagaccacgctgtccgagcacagcgcgtcgcggtgcaggtcgatgacgatgcgtaggctcgggtactggttcaggtactcctgcacggccgcgcccgagcggttgtacgagcccgtgtagctcgggtagtcgtagatcgtccggtcgtgcagcacctgcagcccggcggacgcgagcgtgttggccagcacgtcgcccacgtgcacaatattataattggtgtcctccgtgcggcacgtgtcgctcgcgggatagaggtcgcgccccgcgggggtgaaggcttcgctcgcgtgcgtgtgcatgatgaggatctgcggttcgcccgccggcagcacgacggccgtgccctgctgcagcagcgcggccgcatcgaccgcg

SEQ ID NO: 12967 - DNA, 487 bp, Unknown
  gut microbiota DNA sequence
cgagcagcatcacctgcgagcacgcggcgtcgggcagctcggccacggtcttgtagaccacgctgtccgagcacagcgcgtcgcggtgcaggtcgatgacgatgcgcaggctcgggtattggttcagatattcctgcacggccgcgcccgagcggctgtacgagccggtgtagctcgggtagtcgtagatcgtccggtcgtgcagcacctgcagcccggcggcttcgagcgtgtcggccagcacgtcgcccacgtgcacgatattataattggtgtcctccgtgcggcacgtgtcgctcgcggggtagaggtcgcgccccgcgggggtgaaggcctcgctcgcgtgcgtgtgcatgatgaggatctgcggctcgcccgccggcagcgtcacggccgggccctgctgcagcagcgcggccgcgtcgaccgcgatgtccgtctcgtttttgatgctcagcccgcccgcgatgctcgtcgccacgatggg

SEQ ID NO: 12968 - DNA, 667 bp, Unknown
  gut microbiota DNA sequence
gggcgtcctcgtcggtgtcggcgtccgtggtgggggcgggtgtcgcctccggcgcgggcgtggctgcgctgagcgccgccgctgcctccggcgtgggggacgcgtccaccggcggcgcacccagctccatgcgcaccgatgccagaagcagctgctccgggtcgagccagagccgcagcctgtccgcgagcggcgcgccgcccgccgcggccgatgcgatctgcagaccgaacacggtcagccccacacaggccagtttttgccgcagcgtcatatctgctcacctccgatcaagttctccacaatatatatggtttcgggggtggaattatgtcaccgcatctgctatactgggagcagaaaaaatttagaggaggcgtcgtcatgacgatcacataccggccgaagggtgtctgctcccgcctgatgcgggtggaggtggaggacggaattatccgccaagttgaggtgcaaggggggtgcagcggcaacctgcagggcatttcgcggctcctggtggggatgccggtgcagcaggccatcgagcgcatggagggcgtgcgctgcggcggcaagccgacctcctgcccggaccagctcgccaaggcgctgcgtcaggcgctgtgaggcgggaaaaagattaacataattctttcaaataataaaa

SEQ ID NO: 12969 - DNA, 397 bp, Unknown
  gut microbiota DNA sequence
aatctccgcagccgaagctgcggagatttttttacgatgttccaattacacgttcgtcccggcgacggcagcgcgcagggcgtcggtgcggtcggtgtcctcccagcggacgccgagctcctcacggcccatgtggccgtaggcggcgagctgccggtagatcgggcggcgcaggtcgaggtcgcggatgatggccgtcggccgcaggtcgaacacctgctgcacggcagcggcgatctgcgcgtccggcacggtgccggtgccctgcgtgtcgatgagcacgctcacgggctcggccacgccgatggcatacgccagctgcacgaggcagcggcgggccagcccggccgccacgatgttcttggccacgtagcgcgcggcgtaggcggcgctgcgg

SEQ ID NO: 12970 - DNA, 279 bp, Unknown
  gut microbiota DNA sequence
cactgaaggcaaaggaaaattgcaccttgtaaattaaacaacgatgtgcttaaaattttgttcgatatgaacaaggttgtagtgcgaacctgaaatttcgagagttttttactcttggtaaatcgctggaagtcacaactccagttaaaataaagtgacacgtcagactctaaagtcggttaaaacgaaggaaacttcgtcttaatacaatttttagagagtttgatcctggctcaggatgaacgctggcggcgtgcctaacacatgcaagtcgaacgg

SEQ ID NO: 12971 - DNA, 1264 bp, Unknown
  gut microbiota DNA sequence
cgcgaaggtcggcgcgtactcgtcgcgcgccgagtcgaacaccttcttgccctccatgagcttgccggtcctcttgtcgcgctttttgacgcgccagccgtactcatgcaaatgcgccaccgggtcggacgagtaaacgcggatgcacaccgccttgccgcggtagtagagcttgccgcgcttgatgcttttgtggtacgtgccggcggcacgctcgacgcccttgcggtgcaccgcctgcttgcgcaccttcgcgcgcgccttctgcgccgtctttcggcgcagcttcgtgccgtggtcgcgcagcagcttcttgaccttcttcgtggtctccttgtccgcgtcccggagtgcgtccgcgaacgcatagatctcgctgcatgtaaagccgtcacgtgccatcggccgtcacctcgccctcgtgcgccgtgcagaagatctccatccagccgcgccggctgtagatcggcagccagtacgaaacatcgagccgcagcccgcgcacgacaaagtacatctcccggcagatgtccggaaggcttgcctcgcggaccacgacgcggtgcgtaagctccgcccgcgtcgcgccgccttcgaggctttccgcccgtccggacgtcggcgtcaccgccgcccagaccgtccgctgaaaagcgtactcgtaaacggtctcgccgttgtcctgctcgtgcgccgccgcgcgccagacctccgcccggtcgcgcagatcgctgacctgagttgccatcagctgtcgcctccctcgtaagcgcacacgagcttgagctgcgtgagcatctgccgcacgatgggcggcacggactggagcgcctgcgccgcattgtcgacgcagcgcccctcgtactgctcgagcaccatcgcgtgcgcgatgatgtcgtacagcgcctcgtgcccctcgcgcacgcatcccgcgccgtcgaggtaggcctccgccgccgcgagcagaccggagagcagctcatcgtcctcgctgtagtcgatcttgcagtagcgtttaacggccgcaagccgctccgcctctgccatccttacgagagggtcagcttgacggcagccgccgccgcagaatcgaacacccgcgcgtccagacgggtgatcgcgcggacctcggtggagttggtgcgccatgcgctgccgccgacttcagtagacgcgatctccatcggctgacggcggaacagggtcgcgtactgggtgaagtcaccgaagtagatcggcgtggtggtcgagggcgaggacgttt

SEQ ID NO: 12972 - DNA, 5466 bp, Unknown
  gut microbiota DNA sequence
acggccgaacagcatcttgccgacagcggcggacggatccggctgcagcagcgggcgcttgttggcgtcgagcagctggtcgagcgcgttgaagccgtcctggtttacgatgaagtgcgcggttgccgagatagccgggtcgagcgagacgttgagcagcttcttgagcgttgcgatgacgttcgccgcggttgcagccgttgccgcagcgtccagggcggcgagcttggtcacgagcagattgttctcggtgatgacctgcttctttgccatccagcgcgagatatacgcgagcagcgcctcgtcggtgtcgcgcagcaggtcgttggaaaccggcaggaacagaccgtagtcctctaccttgtagctgagcttcgcaaagaccggcttatcgtcgttcgggatggtctccatctcgctcatcttggtaaagcccttggtcggctgggtgtcgacgacgcgggtgccggacaggaaggacacattctcgacggaaaacaggtccgccagcggcacgaggctgcggcgcagctcgttgatggtggtctgcacgtcctccggcacgatcaggccgccgtccgccggggtgccctcggtcatctggttcgcgttctcgacggcagccgcacggcgcacgatgtccgcattctcgtcgaacgcgcggcggttgccgcgtgcctgggcgcggatgcactccgcaaaggcgtgcatgcactcagcggagtttaccgcctcgccctcgccggactgcgcgcccggctcctgcggcatgccgccctccggcgccggtacggacgcctctgcatccatgatggcctgtacgcgcgcgatctccgcgtcgacgtcggcgagctcgttctgcgccgcggcaaagcctgcggtgtcgcccgcctcgttggtggacttcatgcggtttacgatgccctgcttcttgttcagcagctccagcagcttcttcttcatgtggttttcctccttcaagagtaaaagttcggttgattttttacagttccgcgcgtgcgcgctgcagcgccgcctcggcctctgcaattgcgatcgcgccggtgttcaaattgaacaccgcgccctccggcgcggcgggctcaccggctcgggcctctggggtcttgccctctgggctctggctcttcgtcgcctcgatgtacgccgcgcgcagcttatccatgtcgggcaggccgccgacggcattgaagatgttcgccggatttaccggctcgccgggctgcggctcctcgccgatgatctcgtcgacgagtcccgcgtcgagcgccgcgcgcgccgagagaaaggtctcgcggtccatcaggcggcgcagcgcgtcgtgcgaggttttgccgcgtaccttgccctcgtaggccgcaataatgctctccgtgatgctctcgagcatctgcacgctctcgcggtgcacgccctggttgccctcggtaatggtgctcggcagatggatcatcacctgccccaccggcgacaccgccgccgtgtctgcgcccgccatgacgacgctcgctgccgaccccgcgaggctctgcacctcggcgcgcgtgtgcacgccctggcgggacgcattgcgcagcaggctgtacatctcgaaccccgcgaacaccgagccgccgcccgagttgatctcaagcacgaactcctcgccctccgggttctgcgcgagcgcgccgcggatgtccgccgggcagctcgccggaatgccccaccagcgcaggatcggcgcgtcgccgtccgctacgatgtggccgtttaagctgtatcgcatcctcactcacctccttccctaccgttgccgccgccgttgcggctgcggctgagttccctgaaatcctcgagcggtacatagttgagcgacgccagtctgtcgccgccgccgggcacgtccggcaggtcctcgagcgcgcggatgtcgttgacggagtaaacgccgttctggtgcatggtctggtaccacgcgccgcgggcgctccagtcgcccctcagctcgcccatcatgttgcgccgcagctgtaagcctcgtgcgctctcgctctcgagcagcaacttgtgcgtgtcctcctgctcgtgctcggagacgatgggcgatagcgttcgctgcatgtactcgatcgccgcctgcgtgtttgccgcatagctttccttgcccgcgccgagcttgtaaaacggaatgttgaacagccgcgcgatgtcctcgacgctcgccgccttggtctcgatgaactgcgcgtcgcggttcgtcgccgtcagcggcgtgtatttcaggccttggtcgagcaccgcgatgcggaaggcgttgtccgcgccgctgtggatgctctcccagttctcgcggatgcggtttttcagatcgatggcgttgccgttctcgtcgaagcgcgttttgctcgaaaggtcggtctcggtcgcgagcacgcccgacacctgtccgccgtttttgtagtagttggcctcgtaccgctgcgcctgcagcgccgtctcgatggtctccgcgccgcgcctgaggtagctcacgccctcgaggccgtcggtggaaaatgccttgtagtgcagcacatcctccggccagaacttgcggtattcctgcgtcttcgggttaatgcccacgtaccacagctttgcgttgctgtcgagcagcggcatcatggcccccggcgcgatcggcagcagctccaccggcacgccccacttgtcgcgcagaatgagcgcgtaggcgttgccgtaggcgatgcgccgcgactccatcagcttgtgatagtcgaacgccgtcagcgcctcggtcggcctgctcgtcagcagccgcagcgccgggtggtcggtcacgcgctcgcgcgtaccgctgtccatcaggtacaccggcatcttcgcgatgctgtccgagatgatctcgatgcaggcgttcaccgccggcagcttcatcgcctgcatttcctttccgccgaacagcggccggtcgctgctgtaccagcccgtcgggtcgtcgagcgtcagcgtgccgccctgcccggtgacgcgccggataaactgtccgatcatgcgctgtcacccccgatggcggagatcacgccctcggcgatgaggaacaccccggccgcgatgaacgccgccgtcacgctgaccatcgtcagtccgacaacgatgcaaacagcgccgccgcagaccagaagatcgggcagaatttttgtgatatccttcatgcctctgtcacctcctcgggcacatctgcgtccagctcgtcgagcagggcgcactcgtctgtcgtcgcgatgccgatgtaggcgaaaaatgcagctcgcgcgtgtgcgtcctcgccgtgcttctcctcccacatctccaccgcctcgcgccatgtcaccgtgcggcactgctcgttgcggccggccgcgatgcgtcggatctcttcctccgccgcgatgtagttcagcttcttcttgcgcatgtaatctcaccccctttcacatgtgccagtcgctcgccgccacgctgtccgcgagcgtcggctccggcgtcagcaatgccgtggcgaacgcgatgatccacgccaccgtcatgtcaatacggccgcggctgcgctttttcgtcggcttgatgttctcgttgtcgtcggttacgcaccgcacgttcaggaagcactgccgcgccgccgtgttgtgcacgtgcagcatctcgtgctcgcggatgagccgctcgagctccttcatcggcggcgagatcgtgcggataccctgcgggatttccaccacctcggtcgccgtcccggcgagcctgtcgcggatgttctgcatcaccgtcgcgccgagatacgggtcaaagccaaccatctggaggtcgtagtcctgtgccgcctgcacgactgcatccgctaccgcctcgaaatcgatgatgtcgccctcgcagccgtgcaggaagcccgcccgcatccagtcgcggtacggacagtgatcctcgcgctcgcgcgcttcgatgccgtcgagcggcatccacccggtcggcagcgccacccagtgcggcaacccctcctgcggcggaaagacgagcacgaaggccgtaaggtcggtgctcttggagaggtcgacgccgccgaagcagcgcttgccgcgcagcagccgcaccgcgtccgtccagtgcgccgcgccctccggattccactgcgtcttgtcgtagatcgtcacgggaatccatccgacgcttgccgtcgcgatccactggttaagcctgagccaccggaacagccgttccgccgcctccgagcgtttcgcgtcctgtgcttccgcgcggatggcgctcagccgcagcgtccgcccaaccgacgggttgcagtctcgccacagctgctcgtcgaaaatgttgatctcgcggagcttgtcctcgtcctccacgaggccgaggccgtagatgatcggcagccagcgcggatcgtcctgcgcccgctcgtcgcggtctcctctgcggtaccgccagatgccgagcgccttctcgtgcacctcccagccgatgctcttccggtccgggtcgtcgcctgccgtcgtcagcacgatccacaccggctgacggcgggcagcgcccgcgccgaacgtcataacgtcccacagatcgcggttcggctgcgcgtgcagctcgtcgaaaatgacgcagctcggcttgtagccgtgcttgctgtaggcctccgaggacagcaccttcatcttcgagccgctcaccgtgtcgaagatggtcttggtggagtccacgatgcggctgcgctttttgagcgcgggcgaggactctaccatgaacttcgccgccgcgaacacaatgcccgcgttgtcgcggtccgccgccacgaggtagatctcgccgttggtctccccgtccgcgaacaggtggtacgtgccgagaccggccgcgatctcgctcttgccgttcttcttcgggatctcgaggtaaaggtattgatatttgcgcagatactcgcccggctcgtcctcgtcctcggtcatctcgccgtaaaacgactgcaccatatcgcgctgccagtcgatcagccgcagcggcacgccgctcgagcacgtcaggcactcgagatagtcgcacacaaaatccgcctgctccctgtcaaacaccgcgccgcctcctttcgtttatccacatcatgcacagccttatccacaccggcacaatatcttgtggataaagccaaaaagaaaagccgacacctcacccctctttcggggttaaagatgtcggcttggaggctcgctggcctctggctcgcgctgcgaaaacgcagcggacattggttttgcgctgcatttttgcagcggtttgtctccggtgctccggcggaaggcgcgcccgttccgtaaggcgcgccgcccttggagagtcgcatatgacctcggacggcctgaccacgccgcccgccgcagcaccggctcactacttgtaactacttgaaactacttg

SEQ ID NO: 12973 - DNA, 812 bp, Unknown
  gut microbiota DNA sequence
gtttcacttactctttgacgctcttatctccgctgtttccgggtgttccagcaccgtctgtggtaatctatgtggtcaaaaacgcttcccgcccggtttccggtgaagattcaccggtgccggatgggaagcgtttctcgttgctgtgtggtctgtattgtaactctggggagggtattatgcaagtggtttctgcggggtggcggctcagaagctgcggcgctatagacaaagaatagcatcacgccgtcgctctctaaaggtgaaactcgctttccctcaataactatcacattcccgtaattttaggggcattttaagggaaagcatattgaaatacgagaatgcatttgttcatatgaacagttgctgcttacactgccttgcccgaagaaataccgttttatatctgagacaccgccatccttatcgcagaaccactcgtaatcagagtggcaattttggcagtgggcaattacatcaaatccgcctggtgaatgctggttgtcggcaatgctcatgacctccaagggcttcccgcaggctgggcacagtctgatttttcttgccttacgagtggcacgctctctctgctctgtctcaagtgcacctaaaaggtcatgccaaagattcggattcggctcgtgttctgcgtaatcttcaagatgccgcctaatctcatcggcagccagtacgagaaacttatcatccagaagctgaatgtgacgcttaatataatcagcgactaccatgggcatacaagtattcctgcccatcgcataccgcattgccgacagcaggatcaagcgaaa

SEQ ID NO: 12974 - DNA, 297 bp, Unknown
  gut microbiota DNA sequence
tagcgactaccatgggcatacaagtattcctgcccatcgcataccgcattgccgacagcaggatcaagcgaaagtcagagtcgcagatgggggcgagcaggtcctgagggaacagcagaaactccttgccattattcatacatacgcgcagtggccgctgctcttccgttaccagattcagtagactgttagcttgatctttcagctcatcaacggtgatcgattcgtagtcctgaaacgggtttacttcataattcatcatttgacctccaatcagtttgtcctcacgatgaggtg

SEQ ID NO: 12975 - DNA, 847 bp, Unknown
  gut microbiota DNA sequence
ccggggcagccggagcggcagccttagcagcagtggaagcggccgtgtaaagaccggcagcgggcgcctgcgccggagcggcggcaggctgctcggcctgcgccttgcccggctcgtcaaagccggtggcgatgacggacacgcggatctcgtcgtcgagcgagggatcgaagctcgcgccgaagatgatgttggcgtccgggtgtgcggcctcctgcacgaggttggcggccgtctcgacatcctccaggcccatatcctcggagccggtgatgttgatgagcacgccgcgcgcgccgttgatggacgtctccataagcgggctggccacggccatgcgggcggcgtcctccgccttgcccttgccggcggcgcggccgacgcccatgtgggcgaagccggcgtccttcatgacgcaggtgacgtccgcaaagtcgaggttgatgaagccggtgttcttaatgaggtccgagatgctcacgacggcctgacgcagaacatcgtccgcgatctcgaaggcgttggccagcgtgaccttctggtcggtggcgaacttcagccggtcgttcgggatgatgagcagggagtcgaccttgcccagcagctcgttgatgccgaccatggcctgatccatgcggcgcttgccctcgaacttgaagggctttgtgacgacgccgacggtcaggatgccggcctcgcgggcgatgtccgcgatcgtgggcgctgcgcccgtgccggtgccgccgcccatgccggcggtgatgaagaccatgtccgcattttccaggctcttggcgatgttgttgcggctctcctcggcgctgcgcttgccgacgtcgggatcgct

SEQ ID NO: 12976 - DNA, 611 bp, Unknown
  gut microbiota DNA sequence
cgacagaggcaaacttctgctccgggcgcaggaacttgtaaaactccagccgcacctgacggttgtagaggttgccgtggtagtcaaggatgaagctctcgacgctcacgcgctggccgccgctgaccgtcggccgcacgccgacattcgtgacggcgtaatgctcgctgccgtcgtcgagatacacctttgcggcgtacacgccgtggcgcggcacgagcaccccgtccggaaactgcatgttgatcgtgggcgtgcccatcttcgtgccaaggcggtagccatagtgcaccgtgtccgacagggtgtgcggatggccgaggaaggcgttggcgcgctcgacctcgccgttttcaagcagctcgcggatgtaagtagagctgacgacgcggccgtcgagcgtgacggcgggaataacgtcgcagccaaggccgcgctcggcgcagtaggcggcgagcttttccgccgtgccctcgccccgccagccaaagctgaagtcgtgcccgacgacgaacgctgccgcgtccatctcgtcgacaagcgtctggatgaacgtctgccacggcatctgcatgaccgtgcggtcaaagtggataaagaccacgctctcg

SEQ ID NO: 12977 - DNA, 486 bp, Unknown
  gut microbiota DNA sequence
cggtcacttcttgcagcgccagaggaaggtcacgatctgcgctctggtgcaatccgcattggggctgaatgtggtgctggtggttcccttggtgatgttctccttgaccgcccagagcaccgcgtcggcgtagtaggcgtcagacttcacatcggcaaagggattggctgtacccgctgccggggacttctcggaacgccacaggaacgcgacgatctgggcgcgggagcaggtcatgttggggctgaatgttgtgtcgctggtgcccttggtgatgccgttttctaccgcccacagcacagcgtcgtaataatagctgcccacggggacgtcggtgaagggcatggcgcgggtttcgggtttgggactgccagcggcacgccacaggaaggtcacggcctgcgcacgggtgcagatgccatccggggagaaatgggtatcatcggttccctgcgtaatgccgttctccactgcccaatccacagc

SEQ ID NO: 12978 - DNA, 1037 bp, Unknown
  gut microbiota DNA sequence
cggaagaatattaacctgtttcaaatttatatatctataatcaaggaaaattcccatgaacattccaactaacatggttataacagggagaatttggaaatcaaaaaacgacagtatgatagctgcaattccaaacagcaagcgaaccattttaccccggcttgcgtcagttcttaccagcattattccgataatcaatgcaaaaaacagaaatgcacccatgtataaggtggaaaatccatcatacatcagcgccgcaataaaggaaacagaaagcaggttccagccacattcagatattgttgcctttcgccgtgatgtcattacatgaagatagagcagattgagataacaaagcaagacggcaatcgacaataagttgatggctccgtcattcgcaattcctttatgtgttctatccaatataacccataaagtcacaatacccgcatgaagaaacagatacggatagaagcgtttatcctgcatagcccccctcctttcagctaaaattcattatgttagtaatatgatgatacgatccgttctttagtcatcagacataaaccacacgcagtcaaaactattatactcactggagaaaatagtagcaacacccacacattattcgttttcataaatatcccacattttaagacaaccagcaaaatatgaagcagtgttgcaaagataggaatactcttaaaccagttcatatttctaatccagagaatcaaaacatttataaatgccgaatacaatatgctaaggatcagaaaataggtgcctaataacaagataaggtttggcaggcgaatggaaattatcaaaagtagaggaaacaaaaggatcagcgttccaatccatagtgatagcagattctccttaacaatacttgagattttaataccattagcaagtttccattctattctctttgtgattttttcttgctgcaacatatccttgcttatttctccggcaaaaaagataaataagcacaggtatccatcaagcataaaatactttatatcaac

SEQ ID NO: 12979 - DNA, 1663 bp, Unknown
  gut microbiota DNA sequence
atgccgaagatagctgctaccgcactcataaatataaaattccagttcaatacccttttaaggtttaaggttatcaaacccattcgccatccctcctgataactgtttcgttgctcatgtgccgagccttaaagaaacttaatagtacaaacatcatgcaaagtgcaacatcaaccacaataatcaaatagtcaattcctatatgatgttgattcacaaactctgtaatctgttctgccgacatcgcaatcaaataaaccagtgcaaaattaccaaagaacagaacatttttgaacagttttactcgttttacatccagtacaatgatattcaaagcgacaatctcacaaaaactaagtacaagaatactaagataaacgcatacgatccgcccaaagctcattgtccagtcggtaaagtaatagcaactcataaaaacaaagaacgggataataccagaaaagcggaaaatctgtatcgaatactgttttataatctcttttactgcaattccagaagctgcaaaaaattcaattctccggcttaacttatcctttgctgtcaaatctacaatcatagcaccggattgcagggaggtaagaccaaaaataaccgcatagagcattaggactaaataatcttctcccttagactgcaaggtgtccatctgcattgcaaagctcataaaaatcgccagaatggcaacaatcgcagtatcaattaggaggcttttacttctggtaagatagtagcctgcgccttttcccatgttactcatgccgattgccctccttaataaagatttcttccaatgattgtccttgcatttcttgaatacccttatcaaacagcaatctgccatttttaatcatagatacatcatcagcgcacttttcaatctcgctaaggtcatgtgaagtgataataaccgtttttccgtcagcttttagagcctctatcaaactacggatttctactctggatatggggtctacacccgatgttggttcatccatgagcagaatatcccgtcccatcataatcacaatcaaaagggacagttttcttttcattcctttagaataagtgctaacacgctttcctaaatgctcggtcaatcctaattgcgtacaatagccgtctgaacgatcatttatttcaaatccaaagtatttcccaaaaattttcaaattttcaagaccagtctgttcttcatacagatagtcattttcaagctgcattgcatatttccctgcaatgttgattgtccctgcatttggctggtatacccctgtaatcaagcgtagcagtgttgtctttccagaaccgttcgggccaataatcgcatggattgtatttgcttttacattcaggctaaaattctcaaacaaaactctgccaccaaaacctttttttaagttctttacttcaatcgcattttgaatctcagacatattttttgctcctttcatttggtgctccaccatataggtatagtgtataaaacgaagaagcattttgcatgagtaattactgcaatttcgatactgccatcaggcaaatgtcacagaaacctcacaacgagaaaaaaatttagtattcagtcagcctcacaattacattactttgcagatacagccagtccgtaaattctttcgggctg

SEQ ID NO: 12980 - DNA, 221 bp, Unknown
  gut microbiota DNA sequence
tccgtcaggaggttcgacggctcctcatacgggcgcaccgacagatattccttgtcaaacacggacgtgcatccgcacagcgacaccagcagtgccgccagcaggatgccggtgatgcagcgtttgtgcataccccgctcctttcaatcgtcgccgtagatgtttccaaagccgcggccaaacacttccttggcctcggacacgatgacaaatgcgtgctc

SEQ ID NO: 12981 - DNA, 674 bp, Unknown
  gut microbiota DNA sequence
ttgatggcgccgacgttgttggtgatgatgtagcacacctccgacacgccggggccgtagagcacgaggttgacgaccttcgagctgatgaacatctcgatcatggtgtacatgcagctgtcgtacttcttgaacaggaaggcaaacgtcagcacgacgacaacgttcatgccgaacagcagcgtgccgaagttgatgtacggatagcgccggcgcagcatcttggccacaatgtccgtgccgccgccggtcgtgccggtggtatagatcaggccgtagcccgcgccgttgagcacgccgccgtagaccgcgccgagcatcggctcgtccgtcacgacaaggccggtcagcgcgagcgcgtcgatgagcacggagatgagcgccatgacgcacagcgccagaatgagccggcgtgtgccgaggcggtgccgccagccgaggtagaaaatggggatgttaatcaggatcgacagcacgccgaccgggatgcgcgtcagcagatggatgatctgcgcgatgccggtcacgccgccggaaacgatgctgttcgggaacgtgaagaactggaacgccgcagccacgagcgccgagccgacgaccagcttcatgtaatcaaaagcggaaaaacgatgcagatccatatctctctcctcagatcaggctcatctgctcct

SEQ ID NO: 12982 - DNA, 8420 bp, Unknown
  gut microbiota DNA sequence
ctgcactgcgagttgttttggctggcagctcaaatatcgcaatacactgcggctattattggctttagtccttgtagaatgcgccgaagcccttgtaggccatatagaggtcgagcttggcgatgcactcgaacggagcgtgcatggacaggaccggaacgcctgcgtctacggtatcgatgttgcggtttgcgaggtacatcgcgaccgtgccgccgccgccctgatcgacgcggccgagctggccggtctgccagatgatgccggccttgtcgaagatgcagcggatgcgcgccatcagctccgccgtcgcgtccgacgtgccggatttgccgcgtgcgccggtgtacttgaccagggcgaagccgcagtttgcgcgcgcgtcgttgcgcttttcggagacctccggataattcgggtcgaaggcgttgcacacatcggcggacaggcagaccgagttctcaaagcactcgtcgagcagcacatcctgtgcgcggcacagatcgcccataaaagtctcgaacgcgcgggactgcatgccggtcacgccgtccgagccgatctcctccttgtccacgagcaggcagacgccggtatgcgcgggcgtttcggtcaggtcgaacagggaagtggccgccggataggagcagacgcggtcatcatggccgtaggcgccgacaaacgagcggtcgaaaccgatgtcgcaggcgccaaacgccggcacgcagcacagctctgcggacaggaaatccgcctcggtcatgccgtattcgcgattcagatgctccattacggcgagcttgatcttttcgctgcacttttcgtccacggtctcgctcgggaccgagccgacgaggatattgaggccctcgcccttgacgatctcggttgccttcctgctcatctgatttgcggcgagatggggaagaaggtcggtgatgacgaatttcgggtcgcccggcttgtcgcctacgcggacctcgacgcgcttgacctcgcccttgtcgcagacgcagacaacgccgcgcagctcgagcggaatggtagtccactgatactttttaatgccgccgtagtaatgggtcttgaaaaaggccatgccgttgtcctcgtagagcggcacggtgcggatgtcgacgcgcggcgcatccagatgcgcggcggtcaggcggacgccctcagcgaggctcttctcgccgatcacggcgagcatgatgcccttgtgacggttgatgcggtagatcttgtcgccggtcttaagggtatcgtcgcgcgtccatgcgcggaagccctttgcctccgccatacgtgcgatctccttcacggcgtcgcgctcggtcttggcctcgtcgaggaaggtcttgtagccctcggcgtaggtctgaatgccctgcctatccgcctcggtcaggcggtcaaagccggtctttttgtcataaaaaagctgttcggaagtcatagttcattctccttttgcgaaaatccgaattacttcataagaatttgatataaagcatcggtatcccggtacagtgtatcgagatcgccgttgttttcgatgatatagccgcattttgcgcggtagaagctgtccggcggctgcgcgtcgatgcgcgcgcgggcggcctcctccgggagatggtctcgctcgatgatgcgcgaaacgcgcgtgtcatgcggcgcgagtacagcgatgaccgcatcgcagaaatcgtccgcgcctgcctcgaacagcgtcggcgcgtcgtacagcacgacagggcaggcgctctgcgcacggatggccgcgagcgacgccgcacggatataaggcgtagtgatacggttgagctccgcaagcttttccgggtcggaaaacacgatcttcgcgagcttcggccggtcgagcgcaccgttttcgtcagtcacgccgccgaacgccgcatcgagcgcgtccagcattgcgcggttttccgcgcagagcgtgcggtacaccgcgtccgcgtctacccagcctgcgccgagcgagcgcatgcgtgccgcaaccgtgcccttgcccgtaccgctcccgccggtcaagccgatgattttcattagtgtcacttctttcggaaggttctatactcttatttagttatcgttcaatccaaatttaatcgtattcagcttacttttccacaaactctctatttctattacgcttgtgttatctactgccagagatttcggtaaaatttgcagaatgctgaactgaaacttgtgatagcgctctgaatcttctttcagcagttccttaattttcttatttccgccatgtctggtattgacatactcgctccatctgccatacaatccattttttccgtatgccgaaccaacatattgttttccgcttacggtatcagtaatcaaataaattgcatacgttgtggataatgcaccaacccaatcactgtaaaaatccggcgccgcaataatgctctccagctcatcaaacgacagccgcatattttcaaaatcggtcagcttggaaacgagctgtgcatttcgatgtggcatgagtgcaacaatttctttctccgttgtgccgttatgacaccaatttcgtgcaccttgtccccagtcgattatcagccgatcctcatattcctgcataatatcctgtttttccagatcataataaaattcaggcgggtttttgggctttataggaaatcctttcggaaactccatgcctttagcggaatgtacccctttcacaaggtaacagccctcataacgtcccaatgttccctgtgtgccgacaaaattcagaatataccgacagttttcaaatcttttctttccctgtgttttcaggtagagttcaaaaaatccgttttcataacagaattttgcttctttatcggacatcggatgtcttgccagcttgacttctttgggattcaatcccgcattacgcatcacatcggacaacttcaaaagcattctttacacctcaatcaccgagaatcccgccgctttcttaatccggtttgcgacggcgaggccgagcccttcgtccgaggggcactgcgcccagatctgccgcacgtcggtatcgtcgaacgcgcgcagacggtcgaacacctcacgcgcctgcgtgccgaggtcgttctccgagccgaagcactcgacgacgcagccggggaagcagtcgcggtactcgtcgaagcacatgacgccggtctgctcgccgaggtgggcggcgatatatgccgccgtcttatccgggtcgccgcgcacgaccgtgaccggcgctttcggcgcgtagtggcggtatttcatgcccggagcggaaaccttgacgtcgtctccgatcttctcgtacagcgcgcggtccacatcgacctcgccgagcaccgagcgcagctgttcgagcgtgatgccgcccggacgcagcagacgcggccgctcgagcgcgagcgtgatgaccgtgctctccacgccgacaccgcacgcgccgccgtccagcaccgccgcgatctttccgtccatgtcgcgcatgacgtgctcggcggtcgtggtcgaggggcggcccgaggtattcgcggagggcgcagcgagcggtacgccgctctcgcggatgagcgcgcgcgccatcgggtgggacggcaggcggatgcccaccgtgtccagaccgcacgagacctcgtccgggatgcagccgcccttgggcacgatcatggtcagcgggccgggccagaacgcctcagcgagctgttttgcctgcggcggcacgctcgggcacaggtcatagatctggtcgaaatccgcgatgtgcacgatgagcggattgtcctgcggacggcccttggcgaggaatatcttcttcactgcttcgccgtccagcgcgtttgccgcaaggccgtacacggtctcggtcggcatgccgaccacctcaccctgacggatgagcgccgcggcagtctttaccgcgttttcatcggtttccggggtcaaaagagttgttttcatagatttacacttccatttaaggtatcaaaagttgcttgtacagtctgtatgccgaatagcaggaggtttgacggaggggaccgcaaacaacttttcagtgcgaggtctgctccacctgcgttacaatgccgctcttcagcgtcatatcaagcgtcacttcgtcaaacggctgcgcaatgacataagacaaacacgccgcagtatcctgatagtccggcgcaccgagaagctcgcgcacctcatcttcgggcataccgataagcgctatctgctcttgcaggtcgtccaccatgaaatgccgctgttccggcttcgttttttcccagttttcaggagaaaacaccttcggcgtgcccattccaaggtcaaaaaagtcatttgcgcaccagacgccgcgccccacaagcagcgccgtcaccaaacaggacaggcaccagtatcgctttctcaccttgcctgaaaacagcagcacgccgcacacaagaaatacggcaatacctgccacaatctgcggaattccggttgtcagcatcgtaaatcctccctctattgtcttgttgttgttacgcttcgctctgctgccgcagcttttccgccgtgtcggcggcgatgagtgcgtcaaggatctcgtccatgtcgccgttcaggaactggtcgagcttgtaaatcgtcagcttgatgcggtggtcggacacacgattttccgggaaattataggtgcggatgcgctcagagcggtcgcccgtgccgacctgactcttgcggtcggccgcgatggcggcacgctgcttttctacctcggcctcgtacagccgcgaacgcagcacggacagcgctttttccttgtttttgtgctggctgcgctcatcctggcactcgacaacggtattggtcgggatgtgcgtgacgcggatggcggacgaggtcttgttgatgtgctggccgccggcgccggacgcacggaacgtgtcgatgcgcagatccttcgggtcgatatagaagtcaagctcctccgcctcgggcagcacggccactgttgtggtcgaggtatgcacgcggccctgactttcggtttccggcacgcgctgcacacggtgtacgccgctctcgaacttgagccgcgaatacacgcggtcgcccgcgacgcggaacacgatttccttgtagccgccaagctcggtctcggacttgctcatcacctcggtctgccagccgcgcctgtccgcgtacatcgtgtacatgcggtacaggtcggccgcaaacagcgcgctttcctcgccgcctgcgccgccgcgaatttcgacatagatgttcttctcatcgttcgggtccttgggcagaagcaggattttcagctcgtcctcaagccgcgcgatgtcgctcttggcctgctggagctcctcctgcgcaagctccttcatatccgggtcggacagcatttcagtcgcgtcggcgagctgctgctgtgcccgctcgtatgcgcggtatgcttcgacgatcggctcaagctcgttcctctcacgcagcagccgcgccgcgcgggcaggatcatcgtacagatccggcgcggacaggcgcatttccaactcgtcgagccgcgcggacagcattttcagtttctcaaacataatctatctccaaatcgtgcaattcaccagcgcccggtgagcatcagtcccataatggagcagtactcccggcagcgcaccgccgcccattgactggggtacggcgttttcgccggtacgcctgcatcgcccagaccggcgtgcgcgagcaggcggcgcgcccgggcgagatggtagtcattcgtgatgaccgcgaccgccgcgccttcgggcagcagctttttcgcgttcgcgatattctcgatggtcgtactcgatgcatcctccaggatcagccgcgccgggtcggcgccgtgcgccgtcatgtagtcccgcatggcctccgcctcggtgcgcggctcgtcgccgccctgtccaccgcacaggatggcgcggctcgccggattggcattcatcacgccgatcgccgcgtcacaccgcgcagcaagcgccgctgacggctgtccgtccggattgacgagtgcgccgagcgtcaggtaatagtccgcctttggcgcggccgccgggtcattttcctcgaaatgcaccccgatgatgcagatctgcacgagcgcgaacgtcagcacaaacaggctgaaaagcacctgccccacgcgcgccagcacgcggcacgccctgtatttctcgcgtcctcgcagcatcagccactcccccgtgcagccgaccgcgagcgcgatcagaaagatgccgccgaaccgcgacggcttccagaacagctgcggcacgccgacaatcacgcatagcaccgcaagccctatccataccctgtattttttcactgcattgcctccagttccgccgcaacggcctcccattcgtccattttcgcagcgagcttttcgtcgcaggtctccttttcggtcatgagctcgagcagacgcgacgagtcggacgccgcatccaccatctgctgttccaaatcgcccgactgggtctccagctgcgagatctcgcgctcgagcgtgctcagctgcttctgaaggtttttcgtaccgcccgtgcgcttcggcttttcgggcggcttcggcacatcatccagcgtcggaacagctgcctttttcttcttcggaacgggcgcagtctccgcctcaggcagtgcgccgccgccctttgcgcgccagtcgaggaacgcgctgtacgagccgataaagtcgatgagacggccgttttcgaggtacagcacgcgcgttgcaaagcgctcgacaaagtagcggtcatgcgagacgaacagcagcgtgccgtcgaacgcctcgacggcctcctcgatccattcacgcgaggcgaggtcaaggtggttggtcggctcgtcgagaatgagcagattgagcggatcgtacatcagctcgcacaggcgcaggcggcttttctcaccgccggacagcatatccacagttttcatctgcgtttcgccggtaaactggaacgaaccgagacggttgcgcgcgacctgcatggaaacgttcttgtcgtagatgagcgtgtcgatgaggttgcggtgcggattggcaaaatgcacctgctgcggcagataggccggcttgagaccgacgcccttgcggataacgccgctgtccggcgtctcctcgccgagcaggatcttgagcatggtggtcttgccggcgccgttcgcaccgagcagcgcgacgcgctcgcggttgcggatgttaaacgatacgtcatgtaatatttcgcggccatcataactctttgtaatatcccgtaccttgagcacctcctcggtctcgtagttcggatcaccgaaggtaacggtcattttcttgtcggttttcggtcggtctgtgaccttcatgcgcgcaatgcgcttttcgatagacgccgcacgcttcgccagatgctcggtgccgtgctcatgcatggaacgagcggtcgcttccagacgttttttctcggccagctcgtgctcgtggtgcttgagctgttcctcgcggcggcgttcgcgctcgaccgcatagtaggaatagttgccgttgtagaaatcgcaggtgcagtcgtggatttcgatgacgcggtcacagcactggtcgatgaaccagcggtcatgcgaaatgatcatgaccgtgccgcggtagctctccagatagctgccgagccagtccaccgcatccatgtcgaggtggttggtcggctcgtcgagcagcagcacgtcagtctgctcgagaatgatgcgcgcgagattgatgcgcgttttttcgccgccggagagcagactgaacttctgcgagcgcatctcctgcggaatttccagaccgttgcacacgcggttgatctcgtaatcgcgattgtagccgccgaggatctcgagacgggtctcgagctgcgcgtagcgcttgagcagggaggcatcgtccggcttgcgcgtcatttcgtcggtcagctcgtccattgctgccgcgacctcgtccgattccttgaacgcgagccggaggatgtcctccaccgtgcattcgggcgggaaatccggcatctggtcgatgacgcccgccgtgcggccctgtccgaagccgacgtggccgccgtcatacggcagacgtccggtcaggatgttgaggagcgtggtttttccggcgccgttcgcgcccagaatggcgaccttctcgcccggctgtatgtcaaaggaaatatccttcaaaatcaggcggtcgccgtagtatttggtcaggttctgtacggtaatatcagccacagagggaaacccctttcattgcattcttattcagaatatattatagcacaggatgcacgcaaataggagataaaaagcaggcaaaaagcaaa

SEQ ID NO: 12983 - DNA, 482 bp, Unknown
  gut microbiota DNA sequence
gcgatcgcggcgatgaacatcagcccgcccatggtgggcgtgccctgcttggacatgtgccacgtggggccggtttccttgatgctctggcccgccttgatgcgtttgagatacgggaccaggaaaaatccaacgacggccgacaccgcaaacgcgatgacgaacgccagtatcagcttcagcgtcatttctctctcttcctcttctcgagtatttcggcgacgatctcgcgctcgtccatgtgcactttcgtcttgccgatgatctggtaatcctcatggcccttgccgcagaggatgatgacatcgccggggcagtggttctcgatcgcgtaagcgatggcttcgcgccggtcgggccgcacgacatagggcgtgcgcgtctccttgaggccggggaggatgtcggcgatgatcgcctccgggtcctccgtgcgcgggttgtcgctcgtgacgatgacaaagtccgccttctggcccgcg

SEQ ID NO: 12984 - DNA, 554 bp, Unknown
  gut microbiota DNA sequence
gagatcgcgccggtggtggaggaaatgatgaagctgctgccgctggtgttctatctgctggtgttcgagccggagggcgataaaatcaaggctgccgcaataacagtcaccctcgccttcgccacctttgaaaatgtgtgctatctcatccagaatggcgctgaccgcttctccttcatcttcttccgtggcttcggcacgggagccatgcacgtcctctgcggtctgatcgtgggcggcgggcttgcctttgcgtggcggcggacgtggctgaaggtcgcgggcacctgcggactgctgggcgcggccatcaccctccacgccatctataatctgctgatcgcctacggcggcgcggcgcagtacatcgcctacgccctaccggtgctgctggtggcggcaggaaggctatccgttttccgattatcacggaagcaataaccgaatatccactccttgagagctgctttttggcggctctcaatttttttgaaaaattttgcgttttgggtgagagttttttcgattttttgtacctatataagtgaaggggt

SEQ ID NO: 12985 - DNA, 2629 bp, Unknown
  gut microbiota DNA sequence
gagagggagaaagttttcgcatgggaactttcggacgtccgtgttctgcgaagtcagaacacacttaccggcagaacatgagttctgccggtaagtaaaagagtaaaagcggtatggttttgtttatcagtcgaacttcttgtacagtatgcggaccgagttgagtacgcacagcatcgcgacgccggtatctgcgaacaccgcgagccacatggaggcgtggttggtaaggccgagcaccatgacgagcagctttaccgcgagggcgaagatgatgttctccttggaaacgatgttcgcgctgcgtgcgatattgaccgaggccgggacggagctgaggtcggccttcatgaacacgacgtccgccgcctcgatggcggcatcggcgccgctgcccatcgccgcgccgacgtccgcgcctgcgagtacgggtgcatcattgatgccgtcgccgacgaacatgaccgcgccgttcttctcacggatctcattcagtgcagccagcttatcctgcggcagcaggcgtgcgtgcacctcgtcgatgccgatcgactgcgcgaccgcatccgcgctcgcctgaccgtcgccggtcagcatggccgtgcgcaggccctgcgccttcatgcggccgatggcctgcttcgcgtccggctttacggtatccgcgatgtcgatatgaccgaggaacctgccgtcgagcgccagcagcacctcggtgctgccctgcgtgccgtggtagccggaaagatcaatattgctgtgctccatgagctttacgttgccgcagagcacggtttttccctcgaccgatgcaatgacgccctcaccggccagctcgcggatgttttctaccgtgctattgccgtgctcggcgccgcgctcctcataggcggtgaggatggaacgcgcgatcgggtgggtggacgcgctctcgcacttcgccgcaagccacagcagctcgccttcgttcagcggaacgcccttcgccgggacgatattctgaacgacgaagttgccctttgtgatggtgccggtcttatccatgacgatggtctttacgttattgagcgcctcgagcgacgcgccgcccttgaacaggatgccgcgcctcgagcctgcgccaatgccggagaagtaggtcagcggcacgctgagcaccagcgcgcacgggcacgagataacgaggaaggtcatggcggtgtatacccatttatgccactcgccggtgaacaggctgggcacgatagcggtcagcagcgcgatcgcgacgaccgccggggtgtagacacgggagaagcgggtgataaagcggtcgatcttcggcttgcgcgccgcagcattttccacgctgtccaggatgcgctgcaccatgctctccgcaagcacatgcgtgacgcggatcttcacggcgccgtcggtgttgacgcagccggaagtcaccctgtcgccgacggtcacgcggaccgggaccggctcgcctgtgacagccgaggtatccagacgggtctcgccctcgctcacctcgccgtcgagcggcacgcggtcgcccggacggacgagcacgatgtcgccctccgccgcgtcctctgccgggatgaccgaaatgcttccgtccgccccgacaaggtttaccgtctccggacgcaggtcgatggcatccatgatctgtctgcgcgagcggtctacggcgcggtcctcgaagtattcgccgacacggtagaacagcatgacgccgaccgcctcgtcgaacgagccgaccgcccatgcgccgatggtcgcaaccgccatcaggaagttttcgtcgaatacctgtccgcggccgatgttcttgaccgccgtcagcagaacgtggtggccgagcagcagatacgccgcgaccatcagaacgattttgaccgccgtcgccggaatgaccagacccgcaacaaagagcgccgcgccgatcagcatttccgcgagagggtgactgccttcctcgtcctcctgctcctcctcgggggcgatgaccttgacctcgctctcgatattcgagcagatctcgcggattttcgggagcagagcgtccgggttttcgcccttgacgcgcagctgtttggtttcgtagacgagcacgcagtcgtcgatgccgtcgagctggctgatctggtgctgcatcttggcggcgcagtgggcgcagccgaggttttcgagcgtgtagacacgctggccgtttttgccgtagtgtctgggcgcgggagcaatgaccttcgcctcgctctcgatgcccgagcagatctcgcggatctgcgggagcagggcatccgggttttcgccggtcacgcgcagctgcttggtttcaaagacaagcacgcagtcctccacgccgtccagctgactgatgcgctcctccattttcgccgcgcagtgtgcacagccgacattctgaagcgtgtaaacgcgcttgacgctgtggccccctgcggcgtgctcgtgatgatggtggtgatgctcgtggtcgtggtcgtgaccgcagcagcagtcgtcgtcatcgtcgtgatggtggtgatgatgctcgtgctcgtggtcatgaccgcagcagcagtcgtcgtcatcgtcatggtggtggtgatggtgatgatgctcgtggtcg

SEQ ID NO: 12986 - DNA, 1083 bp, Unknown
  gut microbiota DNA sequence
agcagtcgtcgtcatcgtgatggtggtgatggtgttcgtgctcgtggtcgtggccgcagcagcagtcatcgttatcatcgtggtgatggtggtggtgatgctcgtgctcgtggtcgtggccgcagcagcagtcgtcgtcatcgtcatggtggtggtgatggtgttcgtgctcgtggtcgtgaccgcagcagcagtcgtcgtcatcgtgatggtggtgatggtgttcgtgctcgtggtcgtgaccgcagcagcagtcgtcgtcatcgtgatggtggtgatggtgttcgtgcgcttcttctatttcctgtgcgtccgcagcggcttttttcttctcctcttctgccattgctgtcgcctccttattcggaataacatatgaacagttgctcatatgttcatgtattcatattaaaacacacaggctgctttgtcaatatcccctgtctaaaaatatgcacaaaagaaatcgaccaaaattgcacattttgcaagatattccgcgtgccgcgtcattccccgcctccgttttcttcttctgcggcagctgatgcgctgaggcaggcgtccgtcagccttcattatgcaggatatatctccgcattattcattttcgttttgtttttccttaattatcacctctcaaacgattgcaagtgaattatttttctgttatacttgtatatattaaatacaggaggatattcaggatatgagaaacatctggcatgacatcgacccccacgcgatcaccccgacgcatttcaccgccgttatcgagatcccggccggcagcaagaagaaatacgagctggacaaaaagaccgggctgctgcgtctcgaccgaatcctgtacacctcgacgcattatccggcgaattacggctttattccgcgtacttatgccgatgacggcgatccgctcgacgttctggtcttttgctcggaaacgctcgaccccatggtcgaggtggactgctaccccatcggcacgatgcgcatgatcgacggcgacgcgatcgacgacaagatcatcgccgttccctttcaggacccgacctggaacttttacaaggacataagcga

SEQ ID NO: 12987 - DNA, 1307 bp, Unknown
  gut microbiota DNA sequence
tcgcactttttcgagatctacaaggcgctcgagcacaagcacaccgcgacctcggatgcactcggcagcgagcaggcgcaggaggtcatccgccgctgcatcgagcagtacgaaattcatttctgcggcagggtagagccggcgctcgaaccgtaaacgcccaaggaggaccgcatgaactattactttgccccgatggagggcatcaccggcgcagtattccgccgcacccaccacgaatttttccccggcatcgacaaatatttcatgccgttcatcaccccgacgacgcaggaaaagctgacgccgcggcagaagcgcgatgtgctgcccgaatgcaacgagggcgtgccggccgtgccgcagctgctcacccggacggccgccgactttatctgggcggcgaacaccctcgcctcgctcggctatgccgaggtcaacctcaatctcggctgcccgtcgggcaccgtgaccgcgaagggcaagggtgcaggctttctcgcccatcccgacgagctcgaccgctttctggatgctgttttctccgcctgcacggttccgatctccatcaagacccggctcggcgtacacgatccggcggaattcgaggcgctgctcgagatttacagccgctatcccgttgcggagctgaccattcatccgcgcgtgcggcaggacttctacaagggccgcgtccgcgaggacgccttcgccgccgcgctgccgcactgccccatgccggtctgctataacggcgatctggtcagtgagcgcggcatacgggaaacgatcgaacgctatccatcgctttccgcgctcatgctcggccgcggcctgctcggcgacccctcgctcgtgacgcgcgtccgcggcggcgaacgcgccggcagcgcccggcttcaggcgtttcacgacacccttttcgcgcgctactgcgatgccttcggcgacagccgcattgccgtgctgcgcatgaaggagctgtggttttacttcggaaacctgttcgaaaacagcgaaaagctccagaaatccatcaaaaaggcaagaaattccgaggaattcgaacgtgcggcggcggcgctcttttgttcgtgcgaggtgcgcgggaatgtcgttccggcgtggttccgcccgacgtaacgccgtgcgccttcgcgccgaaacagactatgcacaatatccaaatcagacaaacgatgcgaaatacttgccatatgcaggcgaacgcatcgttttttcttatgcaaaaattccgaaaaaatgccgagaatgattttccaaaccgccgtttttttaccccgaac

SEQ ID NO: 12988 - DNA, 3838 bp, Unknown
  gut microbiota DNA sequence
acagcttatttattatatcaaaccgaaatccgtttgtcaagaacttttttcgttcttttcaagccgcttttcagcccgaccgccgcgcctctcagcgacagctttaatagaataccacaacactccccctcctgtcaacaataattttcagtttttttcatatttcgtttttccgccgcatgtgcaggcttttcccgcatatgattcatcacccacgcgaacgctttcgccgttcgcagaccgggttctttgaaatgattgcccggattccactcaagtgtacagtttatgccctgctccttcatccatgcaaagcagtatctggcgcagtccccgactgtgcgcatcaccggatttcgcgttttttcctcacgcatgcctagactcaaatataccgtttcgcatccaaggcctttttccttcatatatgcagaaaatccgggaaaccagagagacggtgaggccgccgccgcgccgctgaacacatctgtccggcaggcgctccatagtgcaaacagtcccgcaagcgaatatccgccgattatgtagtctttatcctgctccgcgcaaagcggcaggatttcctcaagcagtgcttctgcgccgtcaccgaagtccttatccccgaataccgccggagccgtccacggcgacagatcccgattccagttttccacctgtaccgcaagatagcggaacggccggtcggtcatatgaccgatctgcgcgatttcgtcgtcgatcagcggcagttcatgctgtccgaccggctgaacgagcatgaccctcgccgcagggtcgccgtattcgcgaattatcatccacgtcgcctccttcattcctatattataaggcagcagaaaccgcggcgcaaggtgcgcgagaatacgctttctttgttattttgaacgatggcagcaatatatcttagcgtttgttgtactgtttgcgtgcgcagcctcgcgaaaccgcatgaattgttcatcatttcgacacattacaggtcgctccttctccgttcgtcttgactttttcctacaaaaatgctatgattataattcaagtttgaacaaaggagcgcagtgctatgatttatctcgattacgccgcccacgcaccggccgaccctgtggtgcttgagcgtttctgcgacatggaacgtcgttttactgccaatcccaactcggtccacgccgcaggccgggccgcacgcgagcaaatggcctgcgcagccgagcagatcgcgtcgctcaccggcgcagccccctccgaggtcattttcacctcgggcgcgaccgaggcgaacaatctcgccatcaagggtatcgcacaggctgcgcgccacatcggcaggcacatcatctccactccgctcgagcattcctcggtcagcggcagcctgaccgcgcttcaggagcgcggctgggagatcgacctgctgagcatcggccgcgacggcacagtcgactccgaggaggtgcgcgagctgctgcgcccggataccgtactcgtcgcgctctgcgcggtggacagcgagctcggcacggttcagccggtccgcgagatcgcagaactgctcgccggttatccgaactgccgcctgcatgtcgacgcgacgcaggccatcggccgcatcccggttaatttctccggcatcgacacaatgagctttgcaccgcacaagttcggcggcctgtgcggaagcggcgttctgctcaagcgcagccgtatgccgctggagccgcagatgaacggcggcgcaagcacgacgctttaccgcagcggcacaccggcactggggcttgccgcatccgctgctctcgcgcttcagctcgcctgtgaacagcgtgaaaaccgctgtgccgttgtccgtcagcgcagcgaacgcctgcgcagggcgctcgccgcctatccggccgtgcatatcaacagcccggagcacgccgtcccgcatattctcaacctcagcgtcaaaaatgtcaagggaaccgtgtttcagcgtgcgctctccgaaaaaagcgtctgcgtgtcggtcaaatccgcctgctcggcggacggcctgccctcgcgcgcggtattcgctgtcagccgcgaccgccggaacgcactttcctcatggcgcatcagcctgagccacatcaccaccgatgaggagattgatgcttttctcgccattttcgacgaatgctatcacgaactcgtgaaataacgatacagggagcctgtttatgaaacgcacattagagccgcacgaactaatcgagcgcagcaccatcaagaaatttcgaaagaccatctggaacccgtttaccctggccgtccgacagtatcagctcattcagccgggcgacaagatcgccgtgtgcatctccggcggcaaggactccatgctgatggccaagctgatgcagctgctccagcggtacagtgaggtcccgttcgaggtcgttttccttgtcatggatcccggctataacgagatcaaccgcaataagatcgaaagcaacgccgcgctgctgcacattccgatcactgttttcgagactgacgtattcgaggtcgccaacaacagcgaaaagaacccgtgctacctgtgcgcccgcatgcgccgcggctatctttacagcaaggcgcagtcgctcggctgcaacaagatcgcactcggccaccacttcaacgacgtcatcgagacgacggtcatgagcatgttctacggctctcagatgcaggccatgctgcccaagctgcacagcacgaatttcgcgggcatggagctgattcgtccgctctactgcatccacgaggaagacattctcgcgtggaagcagtataatgacctcgaatttatccagtgcgcctgccgctttaccgaaaactgcaccatgtgcgacaatggcggcggcggctccaagcgtcaggaggtcaagctcctgctgcgccgtctgcgccgcgacaatcccaacatcgagcgcagcattttcaacagcattcactcggtcaatctggatatgatgcccggctacaagaccggcggcgtacttcattcgttcctcgaggattacgatggttacgcaggagaaaacaggtaaaagcccctgcgatacctcgaagaaaaccactgttgaacgcgatgatctttaccttgcagccaggcgattcagcatatcatattttactttgtgaaaaaaacgagcaggacagagacattctgatttgtccctgtcctgcggcagaattgatgattttttaatctatttacagattttccacacaaatgatctcaatcagcacgcacagtatcacgaacacttgataactctgctggaccgatctcctgcgtgatgaagtacagacgggtcaaaccgtcggttctgtgctggttttagcggagccgagaggagttgaactcgcctaaaattattttttctcgttggttttggaacatttggacggtttccgagcgaaatggggagtccagaatacacgcagtggacggcgaaaccgcttgtcagagggccgtaaaacggcgtttttttcgttttggctacaagttggctacatggagccatggtggcgacacctcgtagccacggagttttgaaactcacgaggctgaaatcaatcatcccgaaaagtacctctttgctgtacttattatagcatatcggcgtgaattcgtcaaatttgggaaggttttgcgaattgctgacgtcccgctcgcaccgccgtttattgcgagcgaaatgagggtcgatgggatgactgccggaagatttggctacagacggctacaaggactgaatttcgtgcagcgccagaacaaaaaatccggcaaaat

SEQ ID NO: 12989 - DNA, 1031 bp, Unknown
  gut microbiota DNA sequence
cttctccatgcagaacgaacggattccctcggggcggagaacaaagccgggaattttcatcagatggctgacgagggcgaacagacccttgctcgcgagggaaatggacttgtcgcgcaggaccgcagtggaaatattcgtgtagtcgcgctgggcgtcggaaatgcagatgacgtcgccgttcgggcggtcgatggacggggaatagacgaagtcgaccggcgcggacgggtgctgcatcaggttgtagacatgacagaacgcaccattttccgactgggagaaatagtgctgcaaatatcccttttgctttaattctttccacgccgcgttcagcaggtagccgctgtccgagcaggcataggaaaggcggcgcttgctgagcgcgaaatccggcaggccgacaaaggacttgatgacggcaaacagacccttggcgtcgagggaaagtgtgctgtcgcgcaggacttcgttgtagattgtggtgtagccggtcgcggacattgctttccctcctttccgatggtcaattttttgcagaagaaataaaaaaatcgtctgatgctctcacaccagacgattgaaaaaccatgtctaaattcgcactaaaaatcgaaaattcgtaatgttgcacaagtaaaatgtgtcgtacaaggaagaaaaattgatttttgtcgaaaaacgcgcgtcgtattgacataaccgcttgttgaatgtataatagttatacaagtaagcggtatgcgccatttggcgcgttacaggtctcagggctgtgagatcttaccgcccgctggtgttggaagcaccaagtggcggataccgtttatcaaagagctgatgcttgccggcattggctctttttgttttctgtaattaagaataccatggaaaatagaaaatgtcaattgcaaacatggaaagttgaaaaatactcggggaatttgtgtgctgcccgaaccggccgcggggttttgggaagacgccgccgtctggcggcggaggtgccgttcccacggcaggggggaatt

SEQ ID NO: 12990 - DNA, 473 bp, Unknown
  gut microbiota DNA sequence
gtatttcgatgttgtgcgctcagtccagcacctgcgccagcacggccagcagcgcgtcgacctgcgcgtccgtcgtggcccacgaggtcacaaagcgcacggcctggtgcgccgcgtccacgcgggcggtcgtgtaaaacgcgacctgctcctgcagccgcgcgatctgcgcgtccggcaggatggggaagatctggttcgtcggtgagggcacgtacatcgctattctccggtccgtgagcgctgcggcgatgcgctgcgcctgtgtgtcggcgtgccggcccatgtcgagccagaggtcatgcgccattgcggcggcaaactgcacgccgagcagacggcccttggcgagcatggcgccattgcgcttcatcgcgcggcggaagcccggcttgagcgcatcgttgacgatgaccatcgcctcgccgaagagcaggccgtttttcgtgccgccgatgtaaaacgcatcgcac

SEQ ID NO: 12991 - DNA, 393 bp, Unknown
  gut microbiota DNA sequence
gtgcacatcggcacgctcgagcagtatgacaacggggacgtgaccgtctccgacggcaagacccgccgtgtctttcaaaaatccgccatcgcacaggtgcgcctgcacctgaccatataaggaaagggaattcgaccatgaacgcagaattttttgacgcagttgcagatatcgaaaaagaaaaaggtattccgcgcgaatatatgtatgagaagatccgtcaggccatgctgacggcgttccgcaaggacacgccagactgcgaggacaacgtggaggtcattctcgacgaggacaaaaagaagatcgagatggtcgtcaagaaaacggtcgtcgcgcgcgttattgacccgtatgtcgagatcagtgaggaggcggcgcaccgcatcagca

SEQ ID NO: 12992 - DNA, 892 bp, Unknown
  gut microbiota DNA sequence
agccaagcaggtcatcattcagggcatccgcgaggcggagcgcggcatgatctacgaggagttcaactccaaggagcatgagatcctcaccggcgtcgtcaataagatcgacccgcgcaccggctgcgcgtttttgaagatcagctccaactcggactataccgaggccatgctcgccccggcggagtgcatccgcggcgaggtgctgcatgagggcgaccgcatcaaggtctacgtggtcgaggtgcgcaacagcacgcgcggcccgcaggtgctcatcagccggacgcatccgggtctggtcaagcgcctgttcgagctcgaggtgccggagatcttcgacggcacggtcgagatcaagtccatcgcccgtgaggccggcagccgcacgaagatggccgtctgggcggaggatccgatcatcgacccgatcggcgcctgcgtcggcccgaagggcggccgtgtcgcgagcgtcgtcaacgagctcggcggcgagaagatcgacatcgtcaagtacagcgaggtgccggaggaattcatcgcggccgcgctggcaccatctgaggtgctggaagtgaccctgctcgacgagggcaagagctgccgcgtcatcgtgccggataaccagctctcgctcgccatcggcaaggaggggcagaatgcccgcctggccgcgaagctcaccggctataagatcgacatcaagccggagagcgaggcataaaccgaaaggaggcagtcacccatgcccaagtccattccccagcggcagtgtgtcggctgccgtgaaaagaagcccaaaccggagctgatccgggtggtgcgcgcgcccgacggggccatctcgctcgatgcgcgcggcaaggcggcgggccgcggcgcgtatctgtgc

SEQ ID NO: 12993 - DNA, 1183 bp, Unknown
  gut microbiota DNA sequence
ggagcaaaactatatgccgtatgcgatgagcgtcatcgtctcgcgcgcgatcccggagatcgacggcttcaagcccagccaccgcaagctgctgtacacaatgtacaagatgaatctgctcacgggcggacgcacaaagtcggccaacatcgtcggccagaccatgcgcctcaacccgcacggcgacgccgcgatctatgagaccatggtccgcctgtcgaagggctacggcgcgctgctgacgccgtttgtggactcgaagggcaacttcggcaaggtgttttcgcgcgacatgtcctacgccgcctcgcgttacacggaggcgaagctcgcgcccatctgcgccgagctcttcagcgacattgacagcgacaccgtcgattttgtcgataactacgacggctccatgaaagagccggccctgctgccgacgcgctttccaaacgtgctcgtgtcggcaaacctcggcatcgccgtcggcatggccagccagatctgcggcttcaacctcgaggaggtctgccgcacgacgatcgcctacctcgagaacccgaaccacgacctgctctcgacgctcccggcgccggactttccgaccggcggcgagatcctgtacgaccgcgacgagatggcccagatctaccgcaccggccgcggcagcgtgaaggtgcgcgcccgctggcggcacctgccgaaggaaaacatcatcgagatctatgagatcccgtattccacgaccgtcgaggccgtcattgacaaggtggccgagctcgtcaaggcgggcaagctgcgcgaggtggccgatatgcgcgacgagaccgaccttagcggtctgaagcttgccatcgacctcaagcgcggcgcggaccccgagcaggtcatgcagaagctcttccgcctcacgccgctgtgcgacagctttgcctgcaacttcaacatcctcattgccggcaacccgcgcgtgatgggcgtgggcgaaattctcgacgagtggatcgcctggcgcatggagtgcatccgccggcgcgtgttcttcgacctgcagaaaaagcgcgccaagctccacctgctgcagggcctcggcaaaattctgctcgatatcgaccgcgccatcgccatcatccgcaataccgagcgcgaggccgacgttgtgccgaacctcatggcgggcttcgacctcgac

SEQ ID NO: 12994 - DNA, 13242 bp, Unknown
  gut microbiota DNA sequence
ctccgggcggaatcgaaccaccgacacggggattttcagtcccctgctctaccgactgagctacagaggcatttgctgtctcgcaaagtgcttgtttagtatagtcgaattttgaggaaatgtcaagcggttttttgaaaaaagttttcgtggaattttcaaggccttttcaaaaatgtgcgcgcgcacgcatacaggccgcgtgtacgcgcaaaaaacgtgcggcggaagaggcgcaccgcttgcgcagggacggcgcctcatggtatcatgaaagaacgaaagagagtatgaagggaggagccttatatgcgtatcgtgaccggtctggctgcgagcggaaaaacatccatgctcctgcgcgagatcgcggaaaaggcagaggcgaaccgtggacggcagattttacttgttcccgagctgaattctcatcagatggaacggcggctcgcggcggcaacgcacaaccacggcgcgcgcacggcggaggtgctgacgttttcgcgccttgcggaccgcgtgttcgcggtagtcggcggccttgcacagcagatgctcacgccggcaggtcagcttctgactctgcaggaggcggcgcgccgcgtgcaggtcggactgaccgcgtggagcggtcttgccgacaagcccgagctgctgagcgagacgctcgcgctcatcgacgagtgcaaaagctgcatgatcgagccggaaacgctgttccgtgcgtccaaggagagcgcgctcgatgaggacgcggcgctcagcgccaagctgtgcgatctggcgcagatactgacccagtatgacagcctgtgcgaggaaacgctgcccgatccgcgcgaccggctgacgcatctgcgcgacggtctggcggaaagccatgtgctcgacggggcggaggtctatctggacggcttcctcagctacacgccgcaggagctcgccatcatcgaggtgatgctctcgtcaggcgtgccgctcaccgccgccgttacctgcgatgtcgagctgcccgatgtattcgtgaccggctgcaggacgctgcgcacgctgacgcgcatggcggagcgatgcagccgcaggcccgagctcgtcgacctcggcgcgggaaaaatgccgcggccgacaggtctcgccgccgtggcgaacgaggcgcttctgcctgtccgtcaggcacatgaggacgcctcgggcgtccggttgtatgaagcggcctcgccgttcgacgaatgcgagcacgcggcggcgtacattcgcagaaaggtgcgcgacgagggggcacattaccgtgatttcgtcatcgcggcacgcgacatcgggccgtacagcgcctcgctcgccatggcgatggggcggtacgatatcccgatgttcctcgcggacaagcctgatctgctgtcgcggccgccgatggcgctcgtcatcggcgcgctcgagagcgtgcgctcgaatttcggatgcagggagctgttcggctgcctcaagaccggtctgaccgggcttgcgtgggacgagatcgaccggctcgagaactacgcgatcacctggaagatacatggtgcggcgtgggagcgcgactgggtcgagcatccggacggctacggtattccggtcgatgaggccgcacagatgcagctggacgagctcaacgagctgcgtgcccgcgccatcgcgccgtttgccgcgctgcgtgagcggctgaagggcgagcagccctcggccgaatgcgtgcgcgcgctgtatgatttcctgctcgcggtggacgcgccgcgccgcatggaggagcgcgccgccgagcacgatgcggcgggccgtttgcagctcgcggacgagtaccggcagctgtgggagatccttgtctctgcgatggagcagttcgcgtgggtgcgcggcgatatgccgctgacgctcgaccgcttcgcgcagctgttccgcctcgtgctcagcggctattcggtcggcagcatcccggtctcgctcgaccgcgtcagctgcggcaacatcgagcgcgtctgcggcggcaatgtaaaatatgtgatcctgctcggcgtgaacgatggtctgatcccgaaggatacctcctcggcgtcgctgctcagcgacatggagcgcgacagactggacgcgctcggcgtggagctcaaggcctcgggcgaggagcgcctgctcatggagcaggaaacgctgtaccgtgcgctcgcgtgcccgtgtgaggagctgctgctctcgtggcacgcaagcgacgcgagcggcggcgaaacgcggccgagctactttgtcggcacggtgcgcggcctgctgccgaacgtgccgttcacgacccataggaccgagaccgtgcgcgaccgtttgcaggcggagcggccggcggtcgagcttgcgtgcgcgtatctctcgggcgaccgcacaccggcggtctcggcggcctattccttttataagaatgacgagcgggtgctcgcggcggcaggacagcgccgcacgcgcggtccgctgacgaaaacggacaccatcgagggtctgtacggcaaaaagctcaatctgaccgcttcgcgcgtggataagttcttctcctgcccgagcgcgttcttttatcagtatggcctcaaggcgaaggtgcgccgtccggcggcgtttgccgcgcccgagaccggcacgttcatccattatgtgctcgagcacgcgctgacggcgctcggaaagcgcgagggcggcgctgccgccgcagggaaggacgcggtcgcgcgtgcgtgccgcgaggcggtcgaccggtatatccgggaggagcttggcggtctggcaaacaagacgccgcgcttccgctatctgttcgggcggctggtcaagagcgtgcagcagatcctggacaacgtcatcgaggagctgcgcgtgtcggagttccgtccgatcgactacgaggtggatttctcgcgcggcggcgacctgccgcccgtcacctgcgagcaggacggcgtgacggtctcgcttgccggcaaggtggaccgtgtagacggctatattcgcgacgggcggctgtacctgcgcgtcatggactacaagagcggcaaaaagtcgttctcgctgtccgatatctggtacggactgaacatgcagctcatcatttatctgtacgcgcttcaggaggagggtctcgaccgctaccgcaggctgctgagcgaggagctgaacgagatcgtcccggcgggcgtgctgtatgtgccggtgcgcgacgacatcatcgacggcgaccgtgccgcgaccgaggaggagctgcacagcaagcgcgaggccgcgctgcgccgctccggcctgctcagcgaggatatgtcgctgctcgacgcgatggagcaggggatcgaggacaaggggcgatttatccccatcaagctaaaaaagatcaagggcgaggacgagaaaacgctcgacccgaagtccgcggtggcggatctcgcgcagttcggcaggctcgcgcgctatacgcacaaaaagctgctcgagatgggcgcagagctgcgcaggggcaatgtggaagcgtcgccctgccgccatgacaggaacagatgcgcctgcgactggtgcgactaccgcgccgcctgccattttgacgagagcgcaggcgaccgtgagcgcccgctgaaggcgctggatgacagtgaggtatgggagcttctgggaggtgacggcaatgcctgaatggacgcaagaacagaaaagcgcgatcgaggatcgcggcggcacgctgctcgtttcggcggcggccggttcgggcaagacggccgtgctgaccgagcgcgtgctgcggcgcgtgaccgacccggaaaacccgatcgacatcacagagctgctgctcgtgacgttcaccagggccgcggcggcggagatgcgcgagagaattgcggccgcgatcggcgcggcagtcgcgcaggacccgtcctccgtgcggctgcgccgtcagcttttccttgtgcaccgcgcgaagatcacgaccgtgcacgcgctgtgcatgtcgctcgcgcgcgagcaggcggccgcgctcggcatcgcgccggatttccgtctgatggacgaaaacgagagcaagattctgcgttctgaggtgctcgaggaggtgctcgagactgcctatgagcgtgcagatgaaaaattccttgcgctgagcgatctgctgaccgcaggacgcgacgacaggcgcctgggggaggtcatcctcggcacctatgataagattcaggcgcaccccgacccgagagcgtttctcgaggatgtacgcgccgggctgtatgcgcgcggcatggacacgccgcacggccgcgtgctcatggagcaggcgaaggcggcagctctgcacggcatggcgttcctcgagaccgccatcggtgaggtcacgggcgtggacatcgtcgagggcgcgtatcttccggcgctcgagagcgatcatgcgcaggcgaaggccctgctcgacgcgctcatggcgcacgactgggacaggagcgtagaggcctcgcgcaatatctcgtttgcccgtctcggctcgacgcgcaagttcgatgacaaggaattcctcgaaggggtgaaaaaactgcgcgaggaatggaagactgtcgcaaaggcgatccacgacagatggctgaccgagacggcggcagaggcggagttcgaccgcggcctgaccgccccggcgctgttcgccctcatcgacgcggtaaatgcctttgatgatgcgttctcggcggcgaagcggtcgcggaacgcggcggatttcaacgatctggagcattttgcggtgcgtcttctgtatgacggcggtgcgccgtccgcgttggcgaaaacgctgtccgcgcagtacgccgagatcgcggtggatgagtatcaggacacgaacgccgtgcaggacgcgatcttccgcgcgctctcgaaaaacgagagcaatctgttcatggtcggcgacgtcaagcagagcatctacggcttccgccttgcggacccgtcgatcttcctcgagaaataccgcacgttcaccgatgcggaggaggcagcggagggcgcgccgcgccgcattattctcggccgcaatttccgctcgcgcggggcggtgctcgaggcgtgcaactatatcttccgcgcggtcatgggagaaaccgtgggcgatctggtctataccgaccgggaggcgctgcatcttggtgcgggatattatccacaggctggggacaaacgctacaagaccgaggtgctgctcgcggatacggcaggcggcgacgaggatacgcccgaaaagaccgagcttgaggcgcggctcgtggcgcagcgcgtgagaaggctgctcgaggagggcttccctgtgacggataagcagaccggtgagctgcgtccggtgacggcaggggacatcgttatcctgcttcgctcgccgaagggcaaggcgcgtacctatatcgcggcgctcgagcgcgtgggcgtgaccgcgacggcggagcagcgcggcggcctgctcgagacgaacgaggtcggcacgattgtgtcgctgctgaacgtgatcgacaatccgcggcaggatgtagacctcatcggcgtcatgctgtcgccgctgttcggcttttccgaggaggagctcgcggagatccgcctgaccgaccgcacagccggcttttacgacgcgctgctgctcgcgcgcgaggccatgccgaaggccgagagctttgtgcagaagctcgactatctgcgcgcgttcgcctgcgaccagccggtctaccgcctgctgtgggagatctacgaccgcacgggcgcactcggcctgtacggcgcgctgcccggcggcgcacagcgcgagagcaacctgctcgcgtttttcgagcgggcgcgcgcattcgaggagcagggctttcgcggtctgtacagcttcgtgaacctgctgcgcggcatgcagcagaacggcgaggatttccagaccgtaggcgcggaggcgaccggcagcgcggtgcgcatcctgtccatccacaaatccaagggtctggaatttccggtcacgatcgtggccgactgcgcgaagaacttcaacgagagcgacctcaaggagccggtgctcatccatcaggagctcggcttcggcagcaagtgccgcgatgtgaagcgcggcgtgcagtatgatacggtcgagcgcgtcgcggtcgcggtcagacagcgccgcgagatgatctcggaggagctgcgcgtgctgtatgtcgcgatgacgcgcgcgaaggaaaagctcatcctgacgggcgcgtcgggcacgctcggaagctcgctcacaaagtgggcgcagctggcaggcctcgacgaactgccgcagtatgcgatgggtacggtccgctcgccgctcgcgtggatcattacgccgctgctgcgccatccgtgcacccgtgcgctgcgcgaggcatatggtctcgcggtccccgagcacggcacagacaacgacgcctttgaagtgaagctgtatacgccggatatgctgcccgagtcggagtgcgaggttgagggctttgccgagccggagcgcggcgaacttgaggtaaagccggcgctgcggtatccgcatgaatgcctgatcgagctgccgagcaagctgactgcgaccggcatcggccgcggctaccgtgcggatgaggccgccgaggagaccgcgccgccgcgccgtgaggtcaggctgcgcgcgccgctgttcgacccggcggagagaaggctctccccggcggaggccggcaccgcgcatcatctgttcatgcagttctgcgacttcagcgaggcggaaaagccgggcggcgtcgagcgggagcttgcgcggctcgccgcgcgcggcatcctgtcggaaaagcaggcggcggcagtgaagatcccgcgcatcgaggcgtttttcgcctcggagctgtaccgcggactgatgaagaacgcaaaggtccgtcgtgagttcaagttttccgttctcgtcccggcatcacgctatttcccggcggcggagagcgagccggaggagaacgtgctgttgcagggcgtcatcgactgtctcatcgagacggaggacggctacgtcatcctcgacttcaagaccgaccgcgtgagtgaaggaacgctgcccgagcgcgcggaaagctaccgcgcacagctcgacgcctatgccgcagccgttcgcgagatctgcggcggaacggttcaggggagcatcctctatttcttccagaccggaacgatctggaaaatgtaagaaatcagtttcgcgacagggctgtctcatattttgcgcggtttgcataatccggacgagacaaaactgttaaaaatctgtcacatgatttctttactttgcaaagcaaagaggatataataaaaaataagtattcatatataaccggaacggagaaaaggagctataacgacatggcgtattatttcagtgaaccctctcataccttcaatgaatatctgctggtgccgggctattcctcggcggagtgcatgccggcgaatgtcagcctgcgcaccccgatcgtaaaattcaaaaagggtgagcagtctgcactctatgccaacatcccgatggtgtctgcgatcatgcaggcggtatccgatgaccgcatggcgatcgcgctggcgcaggagggcggcatttcgttcatcttcggctcgcagtcgatcgagagcgaagcggccatggtcgcgcgcgtcaagagctacaaggcaggctttatcgtttccgactccaacgtaaagccggagaacaccctcgccgaggtactggcgctcaaggagcgcaccggtcactccaccatggctgtcaccgacgacggcaccgcgaacggcaagctgctcggcatcgtcacgagccgcgactaccgcgtttcccgtatgagccgcgacgtcaaggtcgaggaattcatgaccccgttcgacaagctcatcaccgccccggcggacaccagcctcaagaccgcaaacgacatcatctgggaccacaagctcaactccctgccgctcgtagacgacaagcagcacctcgtctacatggtattccgcaaggactacgacagccacaaggcaaactcgctcgagctgctcgaccagcataagcgctatgtggtcggcgcaggcatcaacacccgcgactacgcagagcgcgttccggctctggtcgaggcgggcgcggacgttctgtgcatcgactcctccgagggcttctccgagtggcagagccgcaccctgtcctgggtacgcgcgaagtacggcgacgacgtaaaggtcggcgcaggcaacgttgttgaccgcgagggcttccgtttcctcgctgaggcaggcgcggacttcatcaaggtcggcatcggcggcggctccatctgcatcacccgtgagcagaagggcatcggccgcggtcaggctactgcgctgatcgaggttgcggcagcacgcgacgagtatttcgaggagaccggcatctacatcccgatctgctcggacggcggcatcgttcatgactaccactgcacgctcgcgctcgcgatgggtgcggacttcctcatgctcggccgttacttctcgcgtttcgatgagtcgcccacgaacaaggtcaacatcaacggcagctacatgaaggagtactggggcgagggctcttcccgcgcccgcaactggcagcgctacgacatgggcggcgacaagaagctgtccttcgaggaaggcgttgactcctacgttccgtatgcaggctctctgaaggacaacctcggcctgaccctgagcaaggtccgctcgaccatgtgcaactgcggttcgctgtccattccggagttccagaagaaggcaaagatcacgctcgtttccgcgacctccatcgtcgagggcggcgcgcacgacgttgttctcaaggagaccgcttccaccagcaaataatcggtagtttacgccgaaaaccaatcccccttgcgcgcaagtttcgtgcagggggattttcgtagaaaaagagagaaacagaaagggacgaacggcatgtcgcacagaaaggcactgcttcgccgtatctacggctcatattaccgcatcaggcgcaatctcggcgcgtttatccgctggtgcatcttctcgatcattatcggcctcgtggccggcgcagtcggcgcggccttccatcacgcgctcggctgggcgacccaaatgcgcaccgaacacgggtggacgctgtattttctgccgctcgccggtctgttcatcgcgttctggtacagccggatggatatgccgctcgagcgcggcacgaatttcatcctcacctcggtgcggcaggaccatccggtgcggctgcggctcgcgccgagcatttttatcacctcggtgctgacccatctgtgcggcggctcggccggccgcgagggcgcggccattcagctcggcggcgcgatctcgggcaatatcggccacctcatgcatctggacgataaggattcgcgcacgatcaccatgtgcggcatggcggcaggctttgcggcgctgttcggcacgccgctcgcggcgagcgtgttcgcgatggaggtcgtgagcgtgggcgtgatgtattatgcggcgctgctgccgtgcgtgctcgcgtcggtcatcgcgcagcggttttcgctttttctcggcggcgaggcgacggcgttttccgtttccggcattccgcaggaggcggacgcgctgctgatcgcgaagctgctgctgttcggcgcggcgtgcgccggtcttgcggcgctcgtgtgcatcgtgttccataacgtcggccatctgttcaagaagtggttcccgaaccgctatgtgtgcatcgccgccggcggcgcggccgttgtggtgctgacgctgctgctcggcacgcgcgactacaacggcgcgggcacgcaggtcatcgaacgcgcgatggcgggcgaggcctcgtatgcggccttcttcatcaagctcgtcatgaccgctatcacgatcggcgtcggctacaagggcggcgagatcgtgcccgtactgttcatcggctcgacgttcggcgcggcctacggcggatttttcggacttgcaccgtcctttgcggcgggcctcggcatgacggcggtgttctgcggcgtgacaaattcgccgctgacctccatcctgctggcgtatgagctgttcggcggtcagagccttgcgcttttcgcgctgcccgtcacggtggcgtacatgctcagcggctactacggcctgtacagtgagcagaagatcctgtactccaagctcaagccgcgctttatcgacagaaaaaccaagtaagcagggaaacgcgcttcgccttccccgaaaggaattatcccaatgcagaatatcaaaggtgcaattttcgacatggacggcacgctgctcgactcgatgccggtatggaaacgcctgacgcagaactacctcaagcagtttgacctgcatatcacagatcaggattttgcggcgtgcgagggcttttcgcagccgcaggtcgcggattactttctcgcacgccatcccgagctgccgctgacgcgcgagcagatgctagacggcatggacgagctcatcacctcgcgctatgagaccatcgcaaagccaaagccgggcgtgatcgagtttcttgagcggatacgcaggaagggcgtaaaaatggcgatcgcgacgctgaccgcgcgccgccacgcggaaaaggccctccttgaccgcggcatgatgcagtatttctcgttcatgcttacgatcgaggatgtgggcgtgccaaaatacgagccggatatttatctggaggccgcgcgccggctcggccttgccccggcggagtgcatggtgttcgaggacgcgccctacgccggcgtcaccgcgcacagggcaggctttcagctgtgcggcatggcggagccggcctacgccgacggggaagccgagcttcgaagcgtcagcgacatctttgttgagcgctcgttcgacgagcttgacggaaagctgtagggaacggcggaagaaggctgcggtttggacaaaaacacggttttgcagaaatgcagcgaaaactcttgcattatacaggataatgtcttacactatacataagaagaaataaatcaccgactgcgtcagataccgcatatctgacgcggtttgtttgtctaaggagggtaaatttggaacagcagaacaaaatgggaaccgcgaaaatggggccgctgatcttttcgatggcgctcccggcgatgatctccatgatcatcaacgcactgtacaacatcgtcgacagcatctttgtcgcgaagtattcgcaggatgcgcttgcagcggtctcgctcgtctatccgctccagatgctggtcgttgcgattggcgtcggcacaggcgtgggtgtgaactcgctcatcgcgcgccgtctgggcgaaagaaggcaggaggcggcggacttggcggcggaacacggcgttgcgctggcagtcgtcggcggtatcgcgttcttcatcctcggctggggattgtcgggtgtattcgtcggcgcattcggtgcgagcgaggcggtttcgacctttgcgatccagtattcgcatatcgcggtcggcatgagcattttcgtgcttatctccatgatgtgcgagaagatccagcagtcgggcggcaacatgatcatcccgatgtgtcagggtctggtcggcgcgatcatcaacatcatccttgacccgctgatgatcttcggcatcggcccgttcccggagctgggcatccgcggcgcggcgctcgcgaccatcatcggccagatcttcggcatggcgctcggcctttggggcgtgttccgccatcagaaggtgctgaacgtcaatatgaaggcgttcaaatggaaccgcggcacggtcggagacatctaccgcgtcggtctgccgggcatcgtcatgcagagcgtggtctcggtcatgaccgccggcatgaacggcattctgatcgccttttcgcagacggcggtcaatgtcctcggcgtatatttcaagctccagacattcgtattcatgccggtgttcggcctcaaccagggcgcgctgccggtcatgggctataactacggcgcacgcaaccgcaggcgtctgatgggcgcgtaccggatcacgctgaccgcggcggtcgttatcatggcgctcggtctggtgctgttccagctgctgcccgagcagatgctcatgctgttcgtggacaggacggacgcggcggccgcacaggagatgatcgaggtcggcgttcctgcgctcaggatcatcagcctgtccttcctcggcgcggccttcggcatcatcaactcgacgctgttccaggcaaccgcgcgcggcatgaacagtctgatcgtgtcggtctgccgtcagctcgtcgtcatcctgccggcggcgtggatactgggtcagcagttcggcctgaatgccgtctggtatgcgttcccgatcgcggaggttgcgtcgttcttcatctcgtatatcctgctctggcgcgaataccgcaccgaacttcgttttcttgggactgaaaaggagaaaaaagcatgaaaagaattgcaagctttgaggtaaatcacgacaagctgaagccgggcatgtacacctcgcgcatcgacggcgacatcaccacctatgacatccgcatggtctatccgaatgcgggcacctatatcgagcctgccgcaggccatacctttgagcacctgttcgcgacctacgcgcgcaactcccgttttgcggacagcatcatctactgcggcccgatgggctgccagaccggcttttacttcctcgtgcgcgacatgaagccgtccgacgcgatcgcgctcgtgcaggagagcatggcgttcatcgcggcctatgagggtgagatcccgggcgcgagccgcattgaatgcggcaactatctgctgcatgacctggcaggcgcaaagaagctggcgtcttccatgatccccgtgctcgagggttggaaagaagaaaatttaatttatgaaaaataatgcttgcattttatctaaacctgtggtaagataattttacgactgttggagatatgtaaacatatccgtggaaagaggtgaaacaacatgaaacagggcatccatcccgagtacaagcagaccacgatccgctgtgcctgcggcaatgtcattgagaccggctccaccaaggagaatatcgtcgttgacgtttgctccaagtgccaccccttcttcacgggtaagcagaa

SEQ ID NO: 12995 - DNA, 98578 bp, Unknown
  gut microbiota DNA sequence
gttgatcgcttcaagaagcgtttcaatctggataagtaatgcgaaaagccatcgaaacgttatgcgttcggtggctttttcgttgtacatcaagtgatttttgtaaaacggaagctgcggaggtgtttgaaatgcgtagaaacctcgtgtcgcctctgggattgttcgctgcgcatgcggccgcgtcccttgtcaatatccggttcctttttcacggcagaacgacgccggtacaatggctctgctttgctgtcacgcttttatatatcggatactggctgctgtacagcagaaaagtaccgaacgccggcattgcagcatacaccgttctgtttttcgtattcatggcaggcttcgcggctgcccggttcgactggaacagcagcctgctgctcgctgtcgtgcttttgctgatgggcccttttgcagggctggaggcagtctttccggcgccgtggctgtggattgccggtgcgttggtgagcacggcggtggtgctgttcagcctgcgagtgaaacatagacgctgaccgcagcaggtttccggatataaaaaacgctgcggaaccggaccgcagcgaagaagattttctttttctgtgcttataacaccacgaaatgcgcagaaaatcaagccttgaacgattttgcgtatgggtgtattaacaaacacgcacgagagcagcagggaggagatttaccatgccgtttaccaacgaaaccgaagagaagcaggtcgagcgcgccgttctggtcggtctgtcctgcccgggctttaacgccgatcaggcggcagacgagcgcacgatggacgagctgcgcgcgctggcggagaccgcaggcgcggaggcggtcgccatgacgctccagcgccgtccggcgccggacgcacgcacgttcatcggcgagggcaaggccgaggaggtcaaggcgctcgccgaggcgaacgacgcgagccttatcctgttcgacaacgagctgtcgccctcgcagatgagcaatctcgaggagctgaccggacgcacggtgctcgaccgctccgcgctcattctggatattttcgcgcagcgcgcccggacgggcgagggcaaattacaggtcgagctggcgcagtatcagtatatcctgccccgtctggccggcatgggcaaggcgatgagccgcctcggcggcggcatcggcacccgaggccccggcgagagcaagctcgagagcgaccgccgtcatatccgcagccgcatcgacaagctcagacgcgatctcgagcaggtgcggcaggtgcgcgcggtgcagcgccgccagcgcaaaaagaccgagctgcccatggtcgccatcgtcggctacacgaacgcgggcaagagtacgctcctgaacacgctgaccggcgccggtatcgaggcgaatgaccgcctgttcgatacgctcgacccgaccacgcgcaaaaagcgcatttcggacacgcaggaaattctcctgtccgacacggtaggctttatccgcaagctgccgcatcatctggtctcggcgttcaaggcgaccctcgaggagcttgcctacgccgacctgctgctgcacgtggtagacgtatccgacgaggactggcaggtgcaggcggaaaccgtggacaaggtcatcgcgcagctcggcgcgcaggacattccgcgtctcatggtctacaacaaggcggataagtgcgacccggacgtcatcccgtttttccgcccggacgagggcgttaagatctcggcaaagaccggcgcgggcgtggacgacctgctcgccgccatcgaaaaggcgctcggcaagggcaagcatcgggtgaagctctgcattccgtacagcgacggcgcggtgctcgatatgctgcaccgggaggcgcagatcgagtccaccgactacgccgccgagggaacggtcatcgaggcggtcgtggacgacaagacctgcggcagggtttccgcctatatcatcgacaacgagtaaaagagatttcctgattatgcaaaggaacggctgatggaaaaagactactttgtgccttttgccgacttcggcgaggataaattcgaagaaaaacgctccaaattcaccggacggctgtggcacgtggaaacggcggagcaggcggtggcgaagatcaaggagatgcgcgagaccttctgggacgcgacgcataactgctacgcctacatcctgcgcgagggcaacgtcatgcgttattcggacgacggcgagccgcagggcacggccggcatgcccattctggaagtgctgcggcacgaaaacctgaccgactgcgtgtgcgtcgtcacgcgctatttcggcggcatcctgctcggcacgggcggccttgtccgcgcgtacacgcagggcgcgcaggtcgctgtcgcggcggcgggcgtgcagcgcatgagcctgtataccgtcgcgctcatcgcgtgcccgtacaacctgtacgacatcgtgacccatctgctgccggagtatgactgcgcggtcgaggagaccgactacggcgcggacgtcacgctgaccgtgaccctgccggcaggcggcgaggacaggctgaacaccggtctcgcggaggcgaccgccggcacggtctatgccgaggtcatggagacgaaattcatgggccgccgcgtgaaataacggagagcaaaaaatttttcgaaaaactttcggaaataaaaagattttcaagaccctgcgcggtatatatataatatgaccttttctgcatagacgccgcatagaggggaggggctgatatgaccatccgcgaacagcttgaagcgagggagcacgacattctttcgccgtgggcgacgtttgcagacgaaagcgcgggacgcgagcgggaaatgcagccctgtccgtaccggacctgctttcagcgcgaccgcgaccgcatcctgcacagcaaggcgttccgccgcctgtccaacaaaacgcaggttttcatttctcccgagggcgaccactaccgtgcccgcctgacgcacacgctcgaggtggcgcagatcgcgcggacgatcgcacgggcgctcggcctgaacgaggatctgaccgaggcaatcgcgctcggccacgatctcggccacacgcccttcggccatgcaggtgagagcgcgctcgatgaggtctgtccgttcggtttccgccataatgagcagagcctgcggctggtggacctgctcgaaaacctgaacctcacgcgcgaggtgcggagcggcatcgtctgccacacgggtccccgcaaggcggcaacgcccgaggggcgcatcatccatttcgctgaccgcatcgcctacatcaatcacgacatcgacgacgcggtgcgcggcggcatcatccgcgagagcgacatcccggcgcatctgcgcacgagactcggcgcctcgcacggcacgcgcatcgatacgctcgtgaccgcgatgatcgactacggcctgcaatactgcgagatcggcatggaccgcgccgtgcacgatgatatgatggagctgcggcagttcatgttcgagcatgtgtaccgcagtcccgaggtccggcgcgaggaaacgcgcacgcggaccatgctgcaaagcctttaccgctattttgccgagcatcccgacgagatgccggatgattattttgtactgatgacgaagggagagccgctcgagcgggtcgtgtgcgactatgtcgcgagcatgaccgaccgctactcgatcgcggtgttccgccggctgttcatcccgaacagctggagcaaaacggactgatcggaggtgagttctgtgccgtttgaccgtatctttctggacgagctgtccgcgagaaacgacatcgtggacgtggtctcgcagtatgtgcagctgaaaaagagcggcgcgaactacttcggcctgtgtccgttccataacgaaaagaccggctcgttctcggtctcgcccgacaagcagatcttccactgcttcggctgcggcgcgggcggcggcgttatcacgttcgtgatgaaggccgaaggactgagctttccggacgcggtgcggtatcttgccgaccgtgccggtatgcaggtgcccgagcagggcgaggccgagcgccgcgccgcccgtcaccgcgaccgactgtatgcgctgtgcaaggacgctgcgcggttttattacgaaacgctgtggaagccggaaaaccgcgccccgcagcagtatttcatcggtcgcggtctgtcgcggcgcacgatgaaccggttcggtctcggctatgcgcccgactcgtttcatgcgctcatggacgcgatgacggcgaaggggtatacgcgcgacgagctgctcgacgcgggccttgtcagccgcagcgagaaggggcgcatttacgaccgcttccgaaaccgcgtgatgttcccgatcatagatgtgcggggcaacgtcatcgccttcggcggccgcgtcatggacgactccaagccgaaatacctcaactcgcccgaaacgccgatcttccacaagagccgcaatctgtttgcgctcaatctttccaaaacgacgaaaaacgactactttatccttgccgagggctatatggacgtcatcgccctgcatcaggcaggctttgactcggcggtggcctcgctcggcacctcgctgaccgaggagcaggcgcgcatcatcgcgcggcataccgagcgcatcgtcatctcgtatgacgcggacggcgccggtcagtctgcggcgcagcgtgccatcgacattctgaaaaagtgtgatcttcaggtcaaggtgctgcgcatttcgggcgcgaaggacccggatgagttcatcaaggcgcggggcgcggcggcgttccgtgcgctcatcgagcgcagcgaggatcacaatgcgttccgcatcgagcagatcgcggcgaaatacgaccttgaggacgatgaggcgcgcgtgctgttcctgaaagacgcggcgcgcatgctcgccggcatcgaaagctcgatcgagcgcgaggtctatgcagggcgcgcggcgaaaatggccggcgtcacgcctgaggcgatggcggtcgaggtgcggcgcgagctcggcattcagcgcaaacggcgccgcgccgcagagcggcgcgagatccgctcgccggtcggccttgcgcagccgaaggaccggacgctcgcctatgccgatgtaaaaagcgcaaaggctgaggaaaacgtgctccgtctgctgttcaccgaccagaagctgatacacggcatggaagaacagctgccggcggcgtggttttccgccccggttctgcgtaagatatacgagcgtgtgctcgagctggaccgcagcggcagccttgtcgatgcgctggccttcgagggacagctcgaaaccaacgaaatgagcctgcttgccgggatactggagcagggtgtaccgctcggcaatcatcgcgcggagctgcgggagtacataaatacgatacgattacagcgcgtcaaggacggaacgctcacgcaggcaggggaggacccgctgctgacgttcggacgcatgaaaaaccaaaacgcgggaggacaaacgatatgacgaacaacaaggcacagcagagcgctgaaaagacggcggagcagcagcaggtcctgcgcgacctgctcgccctcggcaagaaaaacggccgtctgacgctcaaggaaatggcggacgcgctcagccatctcgagctggagagcgatgacatcgacaagctgtacgagacgctggagtctatgggcgtcgaggtcgagaccgaaggcgttctggaaaaggcgctcggcgacggcgacgacgacagcttcgagccggacacggtcgaggaggttcccgaggaggagctgatcgacacctctgccatggcggagaccttcgccatcgacgacccggtccgtatgtacctcaaggagatcggcaaggtcgacctgctcacgcccgaggaggaggtaacgctcgcggagcgcatgcagaagggcagcgccgccgccgagcgcatcgcggcagagggcgacgccatcccgcccgaggagcgcgcacagctcgacaaggacatcaaggcgggcgaccgcgcgaaaaagcgtctggcggaggccaacctccgtctggtcgtttccatcgcaaagcgctatgtcggccgaggcatgctgttcctcgacctcattcaggagggcaacctcggcctgatcaaggcggtcgaaaagttcgacagcaccaagggcttcaagttctcgacctacgcgacctggtggatccgtcaggccatcacccgcgcgatcgcggatcaggcgcgcaccatccgcatcccggtacacatggtcgagaccatcaacaaggtcattcgtgtttcccgtcagctgcttcaggagctcggccatgacccgagcccggaggagatcgcgaaggaaatgaacatgccggtagaccgcgtgcgcgacatcctcaagatcgcgcaggagccggtttcgctcgagaccccgatcggcgaggaggaggactctcacctcggcgacttcatcccggacgacgacgcgccggaaccggcggaggctgcctccttcatgctgctcaaggagcagctcgttgaggtgctcaagacgctgacgccgcgcgaggaaaaggtcctgcgcctgcgcttcggcatcgaggacggccatacccgcaccctcgaggaggtcggcaaggagttcaacgtaacccgtgagcgtatccgccagatcgaggccaaggcgctgcgcaagctgcgtcatccgtcccgctcgaagaagctcaaggatttcctgaactgagactgcatcgcgagagcggactttatcgacaaaccgacgcctgcccggatttccgggcgggcgttttttgcgctctgacacaaaaaattcgtgcaaaatcgcgaaatgaaggcgaataatcatgcgcagacggttgagaagtgcgaaaataaatgctataattagtaaacactctggcacctatcacaaaaagaaggagcaaatgtaaatgagcccagtttttgttatcggacaccgaaacccggatacggactcgatctgctccgcgatctgctatgccgccctcaagcgcaagctgaccggagaagaatatatcgcctgccgcgcaggccatgtcaacgcagagacccaattcgtcctcgagcacttcggcgtcgagccgccgcgctatatcgcctcgttcgagccgcgactgagcgatgtgcagtaccgcgaggtcgcaggcatcaactcggaaatgtcgctgcgccgtgcatgggactacatgaacgaaaaggacatccagacgctcgcggtcgtcgatgaggaccgccatctgaagggtctgctgacgctgagcgacatcgcgcgcttttacatggaggatcaggacgcgaacgcgctggctgaggcaaagacgagctaccgcaatctggtcgatgttctggacggcacgctcgtcaacggtgagctcgagcagccgttcgagcagggccgcgtcgttgtcgcggcggcgaacccggacgttctcgaggactacatcgcgccgaacgacatggtcatcctcggcaatcgctatgagagccagctgtgcgccatcgaaatgaacgccggctgcatcatcatcggcctcggcgccaaggtctcgcgcaccatccgcaagctcgcctcggaaaacggcgtttccatcatcgcgacgccgctcgatacatatacctgcgccaaggtcatcagccaggcggttccggtgcgtcatgtcatgcgccgcaagggcctgatcaccttcgaaccggaggagaacgtcgaggacgtcaagcgcacggtttccaaaaagcgcatccgctactatccgctgctcgacgagcagggccgctacatcggcatgttctcgcagcgcaatctgctcgatctggagcggccgaacgtcatccttgtcgatcacaatgagcgcgatcaggccgccgagggcatccgctcgaccaacatcatcgagatcatcgaccatcaccgcatcgactcggtcgagacgagcgggccgatctatttccgcaatcagccgctcggctgcaccgcgaccatcatcacccagatgtatcacgaaaagaacatcgagatcgagccgaagatcgcgggcctgctgtgttcggcgatcctgtcggacacgctgatgttccgttcgccgacctgcacgccgctcgaccgcatggcggccgaggagctggcgaagatcgcgggtctgaatatccgggagtacgcggctgagatgttccgctcgagctcgcgcctgcgcgaccgctcgatggacgagctgttccacatggacttcaagtatttccaggtgcaggatcgcaagatcgcgatctcgcagatcacgagcgtgagcggggacgagctgtccggcatccgggacaagatgctcgaatatatggaaagctgcctcaagacgagcgggctgtccatgcagttcgccatgctgaccaacatcatcgaggaaaagaccgagctgctctatgtcggcaagggcgcgcaggagcttgtccgcatggcgttcaagaaggagtgcggcgagaattcggtcgtgctgcccggcgtagtcagccgcaaaaagcagatggtaacgccgctgctcggcgcgatggaggaggaagcagggctctgagacctgccgcacggctgcatcatatcaaacagagagaatttttgacggcgtacccgccgttctcaggagaaaaaagcaaatgatcaatatcgttctggtcgagccggagatcccgcagaataccggcaacatcgcgcgcacctgcgcggcgacgggctgcgtgctgcatctggtcgaaccgctcggctttcagctcgacgacaggcgcatgaagcgcgccggtctggactactggcacctgctcgatgtccgtatgtacaaaaatctggaggatttttttgaaaagaacccggacggacgctacttctacgcgacgaccaaggcgcctcatgcctatcatgaggtcgagtaccgcgacggcgactacctgatgttcggcagggagacgcgcggtctgcccgagccgctcctcgtcgagcaccccgagcgctgcgtgcgcatcccgatgcgcgagggcgcgcgaagcctcaacctgtccaactcggtcgctgtcctcgttttcgaggcgctgcgtcagaccgggtttgaaaatctgaagcttgccggaccgtttccgcaggcataaaggagaaaaaatatggagaagatacatattctgacggattcttcgtccgatatcccgcagagtcttgtggagcagcacggcatcgagatcgtgcccatcatgctcagccacggcggccgaaccttccgcgagtattatgacatcaccccggcggaatgctgcaggctgctcgaggagagcgacgagatcccgagcactgcgatggcaacgcctgcggtgttcctcgaatcgtacaaccgcgcgttcgagcgcggctgcacccacctcatcggcgttctcatcaacggcagcggctcgggcacctatcaggcggcctgccttgcgaagggaatgttcgaggaggagcacggcgagggcgcgatggtcatcgaggtgttcgactcgcgcacctatacctacatctatggacacattgtcgtcaaggcggccgagatgcgcgagcagggcgagagctttgaggcaatcacgagcgtcatacgcagccggctgagccgcgtcgaggcgtatctcggcgtgtacacgctcaaatatctcaagaagtccggccgtatttcgggcggcgcggcgttcgtcggcgaggcgctcggcctcaagccgatcagctttgtctatgacggcgcggtcaaggtctgcgacaaggtgcgcggcgaaaaggcgcttgcggcaggcatctgcaaaaaggtcgtcgcccgcgtgcagcagccggaaaagcagaccggcatcctgctctacggcgatgtgcccgaggagcgtctggccgaagtcgaaaagcgcatgcgcgaggagatcggcttcaaggacgtcgtccgctgtgcgatcggcccgtctgttctgtccaataccggcccgcttgccatcgctgttgcgtactacggcgcgccgcgcaagtaaagaaaattgtgaaaaatgtagaatattttccggtttttcggcgcaaaacgcaaaaatcctctaaaacgttgccgaaaggtgaggtttttctcaaatttgcttgcgaacagggcggattacgagtataattttgtagtggaaacggaattctttcgttaggaaatttcgttatttgggataatacaatattatcagctgtattacagacttttcactaaggagagggatatactatgcagtacaacaagaagagcgtcgaggatatcgacgtttccggcaagaaggttatcgttcgctgcgacttcaacgttccgcaggacgagaacggcaacattaccgacgacaagcgcatccgcgcatctctcgagaccatcaactacctgctgagccacaacgcagcagtcatcctgtgctctcatctgggccgcccgaagggcgaggtcaacatgaagtactcgctggctccggttgcaaagcgcctgtccgagctgctcggtcaggaggttaagctcgcaaaggacgttgtaggcgaggacgcaaagaagctggcttccgaggttcagccgggccacgctgtcctgctcgagaacgttcgtttcgagaagggcgagaccaagaatgacgcagctctggcaaaggctatggccgacatggctgagatctacgtcaacgacgctttcggcaccgcacaccgcgcacacgcttccaccgcaggcatcgctgattacctgccggctgtatgcggcttcctcatcaagaaggagatctccatcatgggcaaggctctgagcgacccggctcgtccgttcgttgctatcctgggcggcgctaaggtctccgacaagctggccgttatcgagaacctgatcgaaaagtgcgataccatcatcatcggcggcggcatggcatacaccttcctcgcagccaagggctacggcatcggcaagtctctgtttgatgcagaaaaggttgactactgcaaggacatgatggccaaggccgaggctaagggcgtcaagctgctcctgccggtcgataccgttgtttccgcttcgttcccgaaccccatcaacgcagcgatcgaagtcaagaccgtctcggttgacgcaatccctgccgacatggagggcatggacatcggtgaaaagacgcgcgagctctttgctgacgctgtaaagtccgccaagactgttgtctggaacggtcctatgggcgttttcgagaatcccacccttgccaagggcaccattgctatggcacaggcactggctgactcctccgctaccactatcgtcggcggcggcgactccgcagcagcctgcgagcagctgggctttgcagacaagatcacccatatctccaccggcggcggcgcatctctcgagttcctcgagggtaaggagcttccgggcatcgcctgcctgctgagcaagtaaaaaacgctttataccggggcgtatcctcatgccccgtataaatacataaaggataaggacgaacaagagaaaatcgtctgaatttttgaaaggggtatatccataatgaatcgcagataccgtaagaccatcattgccggcaactggaagatgaacaagactccggcagaagcaaaggctctgatcgaggagatgaagccgctcctctccaagaccaagtggtgcgagatggttctttgcgtaccgtttaccgatatccaggctgctgtaaaggctgccaagggttccaagatcgctatcggcgctgagaacatgcacttcgagaagtccggcgcattcaccggcgagatctccgctgacatgctcaaggagctgggcgtcaagtacgttatcatcggccactccgagcgccgtcagtacttcaacgagaccgacgaggcatgcggcaagaaggttcaggttgctctcgagaacggcctgcgcccgatcctgtgcgttggcgagtccctgaccgagcgcgagcaggacgttaccatggaagttatccgcaagcagatcaagatcgctctgcagaatgtagctgttgaggacatcaagaaggtcgtcatcgcttacgagccgatctgggcgatcggtaccggcaagaccgctaccgcagagcaggctaacgaggtttgctccgcaatccgtgactgcctgcgcgagaagtacggcgcacgcgctgcccgcggcatcaccatccagtacggcggctccatgaacgctaagaacgcttccgagctgctggctcagccggacgttgacggcggcctcatcggcggtgcatccctgaagagcgcagacttcgctactatcgtagaagcagctaatcagtaattaaatcgcgtagatcgcggtaacgggaagtcctcccgcgctaatcgcgaagaggggggcagcgacaggtatcgttgcccctttctgtccgttttcgcttctgaaaaggagtcacaagaatgattaaaaagaccaccgcgccgggcgcttccgacgcagcagaaaaggctgtaccggtaaacgttctggcggacccggtcgttgtcaaggctgaggagccggctaagccgaagcgcagccgcaagaccaaggctgaggcagagggcacagccaagcgcggccgcaagcccgctgcaaagacgacggccgagaaaaagacctcgacccgcaggagcactgccaagaaggcggaaggcccgaagaagccgaccgctctgatcatcatggacggcttcggccaccgtgcggagaagaagggcaatgcgatcgaggctgcaaacaagccgaatctcgaccggatcttctctgaaaatccgctgacctatatcggcgcatccggtctggacgtcggtctgccggacggccagatgggcaactccgaggtcggtcacaccaatatcggtgcaggccgcatcgtatatcaggagctgacccgcatcaccaaggctattcaggacggcgatttcttcgagaacccggctctgatgagcgccatcaaccagtgcaagtggttcgattccaccctgcacatcttcggcctcctgtccgacggcggcgttcactcccacattgaccatatgttcgcgctgctcgagctcgcgcgccgcaacggtctgcgcaaggtatgcttccactgcttcatggacggccgcgacacgccgccgcagtccggcatcgagtatatcgaccgcctgcaggccaagatcgacgccgtcgaggtcggctgcatcgcaaccgtatccggccgctactacgcaatggaccgcgacaaccgctgggaccgcgtagagaaggcatacaacgccatcgcactcggcgagggcgagcacgcagcgacggcgcacgaggcaatggagaagtcctatgccaatggcgtcaccgacgagttcgtcgttccggttatcgtaaccgagggtgcgaccgtcaaggacgacgacgcgatcatcttcgcaaacttccgtcccgaccgcgcacgcgagatcacccgtgccttcgtcgatccggagttcaccggctttgagcgcgttcagccgaagatccattatgtctgcatgacgcagtatgatgcgaccatcccgggcgtagagatcgcgttcaagccgcagagcctcaagaacaccttcggcgagtatatctccgacctgggcatgacccagctgcgcattgccgagaccgagaagtacgcacacgttacgttcttcttcaacggcggcgtcgagaaggaatatacgggcgaggaccgtgctctggttccgtctcccaaggtcgcgacctatgaccttcagccggagatgagcgagcccgctgtcaccgaggagtgcgtcaagcgcatcctgtccggcaagtacgacgttatcatcctgaacttcgcaaactgcgacatggtcggccataccggcgtattcgaggcagccgtcaaggcgatcgaagcgaccgacgacggcgtaggcaaggtcgttgacgcgatcctcaagatgggcggtcagtgcctgatcaccgccgaccacggcaacgttgaccagatgctcgacgcagacggcgttaccccgttcaccgcgcactccaccaaccccgtgccgctcgttatggtcggccacgagggcaagctggcggacggcggcgttctggcggatctggctcccaccatgctcgacatgatgggcctgccgcagccggccgagatgacgggccatagcctgctcgtaaagtgagcctccaagggggactctgtcccccttagataccgaaaaagtttccaaggaaactctttcggatagcccgcgctgcgtgcgcggcgcagcggaaatgctgctttcggtatttctgctgtttgaatgccaaccatttatttttatataaaaggagtaagaattatgaagggctacattgaaattgttgatgtaatcggccgcgagatcatggactcccgtggcaacccgaccgttgaggttgaggtttacgttgagggcgacaccggcgcatacatgggccgcgctgctgttccgtccggcgcttccaccggtatcttcgaggcttgcgagctgcgtgacggcgacaagtcccgctacaacggcaagggcgttctgaaggctgttgacgctgtcaacggcgagatcgctgaggtcgttatcggcatgaacgctctcgaccagcaggccatcgacaaggctatgatcgaggctgacggcaccccgaacaagaccaagttcggcgcaaacgcgatcctcggcgtatctctggcagttgcaaaggcagcagctgaggctctgtccctgccgctgtacaactacatcggcggctgcaatgccaagaccctgccgatgccgatgatgaacattctcaacggcggcgctcacgctaccaataacgttgagattcaggaattcatgatcatgccggtttccgctccgtctttccgcgaggctctgcgccgctgcgccgaggtattccatcagctcaagaccaccctcaaggagaacggcaccccggctgcaggtgttggcgacgagggcggctacgctccgaacctgaagaaggacgaggatgcgctgaaggttatcgttcaggcaatcgaagaggctggctacaagccgggtgaggacttcatgatcgcgatcgacgccgcttcctccgagtggtggaacgacgaggagaagtgctatatccagccgaagtccggcaagaagctgacccagaagcagctggtcaacatgtggaagaccttcgctgacaagtacccgatcatctccctcgaggacggcatggctgaggaagactgggaaggctgggctatgctgaccaaggctctgggcgacaagatccagctggtcggcgacgacctgttcgttaccaacaccgctcgtctggccaagggcatcgagctgggcgttgctaactccatcctgatcaaggttaaccagatcggctctctgaccgagaccctggacgcgatccagatggcgaaccgcgcaggctacaccgctgtcgtttctcaccgttccggcgagaccgaggatgctaccatcgctgacatcgctgttgctctgaacgcaggccagatcaagaccggcgctccgtcccgtaccgaccgcgttgcgaagtacaatcagctgctccgcatcgaggaagagctgggcgaggacgttgcacagttcctcggcaagaaggctttcttcaacctcaagaacaagtaattttttacagcttgtaaaaaatgataaaaagcaggacgtctcccttatcggaggcgttctgcatttttctgatactgggaaaaataacgagaatattcctgtgagaaaaaattatttttctcgcgggatgctcttgtgaaatggttgttgttgaaggtcggaaaaggtcaagattttttgcggtatgtacggttgatgcgcagaaaagaccaaggaaaatggtaaaagagcatgcagaaaatggagataaaaaattctcatcctgcctgccggagccgaattgccataaaatgcggttgacggctgatacggtttgtgataagatgcggacaataaaaattgcctgtccgagacaaagcaatttacaatttcatttctatttccaaaacagccctccgcacggtattgcactgtgcggagggctgttttcagccggaataaccggctttccatctctggagggcaagacttgcgtttttatagctgacgtctgcggtcggcgtcccggccgggacgccgagcacagctgcatccgccttctgcacatagccggtggtcttccagcgcgcgagcgcacgctcatatgcctctgcctcagcggcattgcgcagcttggtgagggcggcgctctgctcggcgcgggcgttttcggcgttcagctcataattccggtaggcgagcgtcggcgtgccgtcgagaaagccggtcagaccggccatggacaggctgtaatcgcgctcggcgttatactggctgagcagggtctgcgcctgcgacagggcggcgctttccgcggcgctctcatagccgctccgtgcgcttgcttcactggctgctgcggcggtctcggcggcggaacgggcggcaaggcggctctgagagagcgaattcagatcaccgcggtactggttgtcgaccgcgatgcggctgctttccgccatgccgcttgtcgcggcgccggtctttgcgcccatgttcagaccgagcagcgcgagcttttcctcgttgcgcagcgcggactgacgggcgctgatgccggcctgacgcactgcagaggcgtagtcgctgtcgatggaggagagatttgcatcgagctgctggcggatgcgggtccgcgcggcctcgaagcgctcgagacgtgccttttcggccgcatcatacagcgagctgacgcgctctgcgttctcctgcgccgctttggaggccgaggaggcggacgcgacatagtacgggcggtagcccttcgtccaggtcgagaccgcgctgttgtccgcgaccctgccggtcagaccctctgcgtcgatcttgttctgtcgctcggcgagcaggcggtcgcgttcggccttgctcgtcgagttggcgatggcttcggaatagtcgaagttatcgcggtaatttttggccatagtttgctcctttccttgaggcaatatcgcaaagcgccgcagccttcattgtgcggtgccgcctcagatgctcccgttttccgtccaccgcagcgtgagcgcgagcagtccgaacggctcgcccgcgcggtcgttgccgatgcgcagggtgaacagtggccggtgatggcgtcggcgtcggctgcgccagctgaccgcgcccggcatgcagcggaaggacagccgcgcgaaatcccagccgcgaaaggcgaaaaggtcgagattccgcgaaatgcggaaggtttcgccgtcctcatcggtaaagcagagcgctgcgctcgagcgcgtgtacggcatgagtgtcgggatgatgtcgcggattgtcttgtaccgcgtccagtcggagagcgagagcgtcggcgtgcaccagtaggcgtcgatcgcctcgccgtcatccgtgtaggcgtctgcatccccgggaagcgaaaagcggcacagcctgccgtcgttcgtcccgaaccacagacggccgccgagcaccgcgaggcactgtgccgggacattcgtccagaagaaccacgccggatagccgtcctcctcgttcagatggccgtccgcgatgtagacgtttccgcccagcgcgaggtagtagcgcccctcgaataccaccgcacaggcgttttccatcgccttttcctgtacaaggcgcgggcggacggattccgagatcgaacggatggtgttctgctccgcgaccgccgtgccgtaaacgcccatcacgccctgcgcggacaggaacagcggcacatcgttcagcatggcgaaggtgcgcggcgcgacagcgccctcgccttgtgcgccctgccgcagggtgaagtaggatgtgccgtcctcggtcatgacgaaggtgcgcgcaaagctcgtcacctcctgtgcaccgccggtcttgacgatgatctggctttcgtactgcttgaggtagcccgcgatggcgctcgcctcggtgcccatgcgcgcaaagccagtatcggggaaataggtgggatcgtatagtccgctctgccagtcgcagtgcggctcgtcgggattgcccgcaaggaaaacgcgcgtgtcgttcttgccgccgtaaagaccggcgatgcggcatctgttgatggtgttcgccgcgcccggaacggtcttgctgaaggcaatgctgacgttgtcgcgtccctgtccgtcagccggggcggaggcgagcgcgaccgtaccggcatcgtaatcgacagacgcgatagccacctcggtgccgtcgaccgcagcggtgagcggcacgcggtcaagctctcgcgcatccagatgaaattctgtactttttccgtctccgacaaaggtattgatgcgctttccggtcagcagattgaccgcctcgagactcgcgccgccgcccgcgggaggggcggaaacggtggtcgtcggcacataggcgatgctctgcacgcggacagcctcccatgcgccgccctcgccgcggcggactgcgcgaaaacgcgccccgtcgagcagataaagcacgccgttcatggtaaacgcctgcgagaacgcgccgttcatgtcgcggcagagcacggtctgcccgccgttctccgcccggaaatacaggtctgcaccggtgtggatgaacgcgcctgcaccgtcgggagcggagaaaataccgtagacgggcgcgtcatagcgctgctgcacctgccagccggtgcgcttgacgagaaagtcgttccggtcgcacaccagattctgcaggtcgggggagcgcgtcagcgagaccttggtcggatgggagcggaagtccgcgccgccgaagcggctgatgacagtctggtgctcggtctcggtcgagggaaatcggtatccgcgcatcagaccatctcctgtacggcggtgaactgggccgggcagtgcagcagcagacgctccgcgtattcatctgccgcccagttgaacttcgccttgtcgtcatctgcgcacagcagcgccgcaagaccgtaaggcaggcactcgcgtgcgagccattcgggcgccgggagctcgtcctcgagcgcctccatgcgcggcggcacggaaaatgcggcttcgccctgctgaacgcgctctgcgttgatctcgcgcaggctgtttgcgatcagctgatttaacgcgccgagggcgaactgcgcgtagtattcgctgctgtccgcgcccgcgcccataatcgtcatcgctgcacggcagcattcggttccggtcatagaaattacctccttcaaggattggggaaagggcggagagcggaaaagctccgctctccggtttcacagccggctcagccctccgcaacagcggacgggtacttgccgctctcagtcatgaccgcacggatcttgcagccggtctcggcggtcagcgaagtacccgcagcgtagtccttcgcggaatcggagtaacgcgggtccgaaccatcgagcgtgtagcggatgctgcccgaaccggtgatcttgccgccggaaatgaccggcttcgcggaaaccagaccggtcgcaacgagcgcgtacacgccgccgcacttcgcgccgagaacataggcatcatagtagtggcggccctcgatgagtgcgccggatacgccgaccgggtcctcatgcaccttcgcgtccgcgatcttgtacggcatgagcaccgcgtccttgtgcgcgacgaggaagtagacgccctccggcaggtagctcttcggcacgcgcacgacgttcatgccgaacacctcgccgcacacgcccttcgcgatggactgacgcgcgagcacatcgacgccggaaaactcgtccgaggtgcacacgagcttgtacatttcgctcgtcaggtacagatagcggttgtcgtccggtacgagcgcgtcatcgagcgcctgcgaagcgtccgcgatcttactgatgatgtccgcacgggtcggcttttcgctctccgcgatcgtgcctgccatggtcacgaagcgcttgaaggcgtacttgtcggcggagggggtggacttctcgctcagctggaggcgcagcatgtcggcggcgttcttgacgaggttctggtcgaggttgttgcccttgtcgatggtgagggtaaacgccttgtcctgcgtcatggtcagctcctgcacgacgtcctgcatctcggtgacggcgccgtagcggccgaggccgccgtcgcggtcataatcgacctcctcgacggtgatcggggtgtagaccttgagcgtcttgacgccggtcaggtcgaacgtctcggcggtcttgcccttgatgaaggacgagcgggtgaaaacctctgcgatctggtcggaatacttgcttgcaagattgattgccatagataaagtctccttttataaatcggtggtggatgttcagcggcctgttatctgccgagcagggcgagcgttaccgggtcgatgccggccggttcgccgtcggtctgggcggtgccgacagcggcgcggcggttgcggcggttcatctcgagcgccgccagctcgtcgcgcagctccgcgatttcccacttgcggtaggcggagacgagcgagccctcctgctgcgcccattcccagacctgctgcggaatgtcctcggggcggacgtccgggtattcctcgacgaaggccgcatagatctggccgttcggcagggcattcgccgcgcggttgcggcgaacataggcgttgtgcttggaaagaccctgcgccgctgcctcgatcagctcgtcgagcgtcagctcatggatctcgccgtccgcctcgaccggataggtggtctcggacgccatttcgggcgcttccgccgccgcaaacgggtcgagcgggcggttttcctcgggattacggttcatcgggttgtgcatttttcgcttcctccttctgtgtctgtcgctgcacacggagcgcgtgcagcaggtcgtgtttgccgcgtacctgataatcgggcacgttctcgagataaacgagcgggtcggagatgacgccgctttcgagcagatggtcgctggtcgtggtctgcatgatctcggaccagtagcttgccgcgccgacatccacctgaaggcgcatatcctgtccggcgagggtcgagaagtcaaagctctgtctgtccggctcgccgccgtcctcgtcgggcagcacgagcgtgcgcacgccgtagtgcacgcccatcatgtcgagaaaaatgcgcgcccagtcctcggtgaagcggtagaactccatttttgtcagctcgagcggcgcggcggtcgcactctgcaccgcgatgatcgcggaggtgttgtccgggcgcaccgtgccgagcgaggcctcgctcgcgcccatcagctccatcgtgtcggtcatcatctgccggagcagctgcaatacctgcgcggagatgtcgggcgcgcggaatgccgccgcgatggcctcattcgggttgccgcgcatggcgatggccttgccgacgtcgttcgaccagccgttcgggaaacgggtcatatcgtagacgatcttcgggaacgccacctgcttgatgcactgcacgtacatggaatacagcttgttgatggcgatctggttcggaatggcctcggtcagaggactttcgccgtggcacgagccgcgcacgcggttccagcacaggtgcgtcaccggatacagacgataggggagcaccttttcacgcatcacggtcgcgttccgcacggtcttgcagaacgcgatgccgccctcgacccggcgcatatgcagcagcacggtcacgcgctcctcgccgccgttcacgcgccagcgatggtattcgcccgcatcatcggcgcggatggcgctgatctcatcctcggagatgccgttttctctcgcctcgcgccgcacctcatccacatcgcgccgcatggcgatgatgatgtacggctggcgctgcacctcgtcgcaggccgggttgccgaagcagatgttggtcgagtcgatgagatcgacggcaatatcgcccttgacggcctgtccggtctcgagcgccgggtcaaaatgaacgtagaagcaggcgtctccgtctacgcaggcgttcttgagcagcggccgaccgagcgccttgacgcccgagcgctcgatggcggaggcgaaggcgcgctcgagcacatgggcgatgcggcggccctcgccgttcatctcgaacggcgtaacgcgcacggccacatcatccgacacaagcatcgccacgaacagattgacgcagcggcgcagcacattgaagatcagcggatcgagcgactgcacgcgcagcccctcccactgtctgccaaggtagaaggcctcgttgcggcgcacacggtcgtacagaccgatggagcgcttgtaatcgcgatcgcgctcatatctgcgccagacctccgcaggggaacggtcaaactgcattttcttcctcctcctcccggccgtaggccatcagcgccgcaatatcgcggctgagcgcgtcatcgggcgcggcttccgctgtgttttcgcgcggcaggcgccgcggcagcgaaagaccgcccgacaccaccgcgccggtcagcacgagaagggctgacgcgagcgcatagcataaaacttccatgaaaaacctccttgtcaaaagcgcaggaactctcctacctcgcagtcatacgctgtcgggacgctcggggcaggcggctcgaaaacggtcgccgcgtagccgcgcagtgcatcgggtgcatgcgtcagctcgtgcggcgtgttcgccgtgtcggacggattgcgcctgtcgtgctgcaaagccggcagcgtgcggatgagattgcggcaggtattgaagatcgtgagccggggccggggctcgccgtccatgtcgcgccgcggcgcgagcagctcatgcagcgcgagccagccggctacgcgctcgttgctcgacttctcgaagctgaggccgcagtctgcgaacagctcgaccgcgctcctgccggtctcctgccgccggttccacaggtcgggcggcgcaagccgaacatcgatctgttctccggacgcctcgcaggagagaatgcgcgcggcggcttcagagataatcaaacctggttcatataactctctgtataccacgctgtgcccgtccggactctgtgcgatccacagcgccgcaagcatatccagaccgtagtcgatcgtcagatagcgccgccattcgcgcggaatctcgtgcggcggcacgatatgcagggcgggggagaactcggagaaataccgtccctcatccagctcccacacgccgtcgagcagcgcgcgcctgtcgtgcacggagagcagacgcagccgcttttcgtacccggcatcggccttgcgcagaaacggattgtccgcgagccgcgccgggagaaaaagccgcgtttcgccgtcgaacgcatgcacctcgtcgggcggcatcggatcgatgtagcggctcttgacccactgatggccgatgccgccgggatttgtggtcgatttgacctgcttgggatacggatttgcgccgcggatgcgcgagatgagataggtgaactggctttcggtgaaatgcgtcagctcgtcgaaccggatcacatcgtactcggcgctctggtatttggtcacgtcgctctccgcgtcgcagtagccgaactcaagcgtcgagccgttgatgaaatcccagcgatgctcgctgaccttgtagctcgcgacgctctgcggatagagccgcaaggccgcaggaacgagcgaacgctcgagctcgggcatggtgcggcgcagcatgagctgccgcgagccgggataaacgaccgcgaaacgcagcgcatcgagcagctgaccatggctcttgccgccgcctgccgcgccgccgaacagcgtttcaaacgcctccgaccgcatgaatgcggcctgtctcggcgtcacgcggaattcgcagcctcgtctactacgcggaatacgatctcgatcggcgccttgtcctgctcctcgccgagcatcacgccctttccgaccgtccggtcgaggatttccttgatcgcgctcagacggctgttcgccggagcctccgagtcgtccgcgatctcgtacagcatccggatcagttcgtccggatcgctttttttctgcacaatatcaaccacctccagaagaaaatgaattcgggagaagccggtctgccgttccgtcgtcctcctgtgagtcatagaataggagcggagcgcggatttgtcaagaacaaatgttcgatttttgggtcaaggtcaaaagattgaccattttttacagagacgccggtttcttgcgccgcagctcttgcaatttattgaccgctgcggtattctgatatagtatggaaaaatatcgtcgggccgcacacacatgcccggctgaggcggccgtctgtccggcaggcagaacgcgccgcatacagaaaaaggggaaaggcatatgaataaaatcaaactgatcgcgctcgatctcgacggcacggcgctcacgccgcagaacaaggtcgcggagaccacgactgacgccgtgcgccgcgcgcgagaggctggggtatatgttgcggtttcgaccggccgcatctgcggcgaggcgcgtgattttgcggtcgatctggatgcagatgatctgatggtcacgtcgggcggcgcgacgctttcgagcatttcgggcgagggctgcacgatgcgcatgtccatgccgtgggaagcggcggtccgcgcggcggcggcggtcgagcgcatcggcatgatcgccatgatctacgtcggtgagacgctgctcatcacgccctacgacgacctcggcttcggcagctacaagaccaacgagggctatctgacctcgaaaaaggtggtcccgtcggtcgctgagtatatcgctgaccatcatctctcggtcgataagatcttcgtgcgcagtcaggactcggtaacgctgctgcgcacgcgcgccattctggagcagatcccgggcatccgcgtgatgagctcggcggcggacaatctggaggtcatcaccccggccgccgacaagggaacggcgctcggcatgctgtgccgcgacatcggcaccgatctcgaccacgccgccgccatcggagacagcgaaaacgatttcgaaatgctgcgcgcggttgcgctccccatcgccatgggcaacgcatcgggcgaggtcaaggcgctgtgccgctgggagaccgacacgaacgccgaggacggcgtcgcgcacgcgatcgaccgcatcctcgcgcacaataaagcgtgtgacgaacaggctgaaaacagtggaatttgacacgtatttatgatataattaacctgtctcaaatcgctttgaaataggagagtctatattttggctgcaagaaaaaccacaaaaccaaaatcggaaacaagcgcaccgcgcacgcggaaaaaggcggagccgacacccgaagtacaggagagcgccggactgagccgcgcggcatggggtgcgatctgggcgggactgggcgttctggcccttctcgcgctgctgcccatcgacggcgcgctgctgcgctggctgcaccgcttcatcggcggcttcatcggccgcggcggcctgcttctgccgtttgcgctgtttgcgctgagcgcgctgctgttcctgcggccgaagggaccggttcgcctacgcggcgcgtgcatcggcctgctgcccgtcctgttcggcggcatcgtccatgccatcacctgcgcgaacgagtacgatttttcgatgaaaaccatacggaatctgctggaaaccggcatggagagccattcgggcggcctgttttcgggcatgctgtacatcgtgctcgaatgggcgctgtcgagcgcgggcgcactgatcgtgctgctgctgctcacgttcgccgcgatcatggtcgcctgccgcattaccccgatgatgctcatcgacatgttccgtccgcccgagtacgaatacgaggacgaagaggagcgcgcacgctatgaagagccggtgcagctgccgaacgtgcacgaggttgcgcgagagatcaacgctgcgcatgcgcagaagcgcgaggagcgccgcgcacgccgtcaggcctctgactttgacatcccgatcgacagcaatccgcccggcgaggataagcccggcggcgcgataccgcccgtctatccgcctcatgaggagggcaagccgctcgcgccggatgaatacctgcggggcctgaaaaagccgtgcgaggagaagcgggaagaacagccggacagcatcatggagctcgtggccaaccgcgccgacgagccggaggatgaacccgaagtcgaggcggcgcctgcagagcctgcaaagccggccgcgaagccgaaaaaggccgagggcctctcggaggacgagcaggcggcgatgaacgacgcgatggacgagagccagaagactcccgcgccagtctacgcctatccgccgatcgacctgctgacgcagggaaagcacacctcggtcgccggtgcggaggccgagctgcgcgaaagctcggcatgcctgctcgatacgctcgagtccttcaatatcgacgcgcagatcatcggcatcgtgcgcggcccgtccgtcacccgttttgagctgaccattccgcgcggcatcaagatctcgcgcgtttcggcgctgtccgatgatatcgcgctcgcgctcggcgcggcgaatgtgcgcatcgcgcccatcccggataaatccgccgtcggcatcgaggtgccgaacaagacggtcaacacggtctttatccgcgaatgcatcggctcgaacgccttcgcgaacgcaaagagccgcctgtccttcgccgtaggcaaggacatcacgggcaggccggtcatcggcgacatcgccaagatgccgcatatgctgatcgccggtacgaccggttccggtaaatcggtctgcatcaactccatgctgatctcgctgctctataaatcgaccccggaggaggtccgcctcatcatggtagacccgaagatggtcgagctgggcaactataacggcattccgcatctgctcattccggtcgtaaccgacccgaagaaggcggccggtgcgctcaactgggcagtcggcgagatggaacgccgctacaagctgttcgcagatcatcaggtgcgcaatctggtcggctataacgacctcatgcgcgcggaaaaggcgaaggcggaggcggccgccgcagagggtgagaccgcggctgccgagcagtatcaggtgctgccgcagatcgtcatcgtcatcgacgagcttgccgatctgatgatggtcgcggcgaaggaggtcgagaactcgatctgccgcatcgcgcagaaggcgcgtgccgcaggcatgcacctggtcgttgcaacgcagcgtccgtcctcggacgtcatcaccggcatcatgaaggcgaacatcccctcgcgcatcgcgttcgcggtcgcgagccagatcgagtcgcgcatcattctggataccaccggcgcagaaaagctgatcggtaagggtgatatgctctacgcgccgctcggcgagggcaagccgctgcgcgtgcagggctgcttcatctcgaatgaggagatcgaaagcgtcatcgagaagatcaaggagaccagcaccgctgagtacagcgaggagatccttgagcatatcgagcgtcaggcggagcagaccgacagcaagagcggcggctcgtccggcgacccgggcgaggatgaggacgagatgatcgaagaggcgatcgacgtcatcatggaaagccgtcaggcgtccacgtccatgctccaacgccgcctcaagctcggctattcgcgcgccgcgcgcatcatcgaccagatcgaggaacgcggcatcatcggcccgttcgagggctccaagccgcgccagatcctcatttcgcgcgaggaatggcaggaaatgaagctgagaagaaatatgccgatcgaataaaacagacaaataaaacgcaacagtttatctatggagggttttatcatgaagaagatcaatatcgcagagcagtccttcaacccgttcgagctgatcggcaaggactggatgctgatttccgccggcacggcggaaaagtggaacacgatgactgcaagctggggcggcgtcggcgtgatgtggggcaagccgagcgcgacctgctatattcgccagtcccgctacacaaagacctttgtcgacgactccgagtttttcacgctgaccgtgctgaaggacggctgccgcgacgcgctcaaccttctcggctcgaagtccggccgcgacatggataagatgcacgagagcggcctgacgccggtcatggtcgagggtcagccgaccttcgaggaggcaaagctcgtcctcatctgccgcaaggcgtgcaaaacctttatcggcccggacgacatgaccgcagagaacgtcgatagatggtacggcgaccgcgattatcacaccatgtacatcggcgagatcgtcgcagcatacgaggcgtaacccctgtgcgccgaaaggcgaaaagcatttctatggaggcaatgttcctgtgaaaaaaagactgctcagcctgcttttgtcggcggcgctgctgtgcggcgcgctcccgaccgccttcgcgggctacgaaaatttcacacccaagaccacctataccgacgggcggttttccgacgtttcctcgtccgactggttttatgagaacgtccgcgcatcctatgagtatgacctcatcaacggctacaacgacggaaaatttcacccgaacgagaacctgaccatcgcgcaggcgatcaagctggcggcgtgcctcaacagcctgtacagcagcggcacggcggactttgcgtcctcgacgccgtggtatcagacctatgtggactacgcgcagcgcaacggcatcctgacccggacgtttgcagattatgacgcgcacgcgagccgccgtgaatttgcggccgtgctggccggggcgctcccgcgcggcgcgctccagcccatcaacagtatcgcggacggcgcgatcccggatgttcccgcctcggcagaggacgcggacgcgatctatttgctctaccgtgccggtgtgctgaccggctcgaacggcggccggttcaagccggacgataccatccgccgcagcgaagcggccgccatcctgacgcgcatggcggtgccgagcctgcgacagaaggtcgagatcagcacgggcgagcagccggaaaatgtgctttcggcgaacgagatcctcgagaaatgcggcccggcggtgttcaaactgacgagctatgatgcgcgcggcaacctgctcggcatgggcagcggcgtggtgctctccgcaaacggcgacgccgtcacctgcggccatctggtcaacggcgtggcgcgtctcgttgcggaaatggcggacggcagcaagcgcgaggtcagcatctacgcgctcgatgcagactccgacatcgcgcatatccgcgtcgtcggcgtcggtctgccgtatctggagaccgcggacagcccgtccacgggcgacatcgtgtacgcgctcggctatccgggcggcggcgcggaaaaggtgacggcgggcaaggtgctcgacgattcgaacggggactatctggtcccgatgatcgagacgaccgcctcggtcgtcagcggcaattcgggcggcgcgctcatcgacgggcagggccgcgctgttgccgtcacggtcagcagccgcaccggcggcagcagctcgttctcggtgccgctctccgtcctcgacaagcttcagggcagcacggcagttaccccggcggagtattcgcgtacacacaagccggacagcagcagatgctatgataacctgtatccggtgccggatttcggcgcggtcagcggtgcgtcgctgtttgcgaccttgcgcgaccgcggcacgacctgcttctactacgcgctgagcgagcttcccgacctcgatcgtcagctgctgcgctactatgcggcgctcggcgaaaacacattctatcagttcaatgaaagctcgttcacctcgtcggcaggctatctgctgtcggtcaagctgtacgaaaccacatgggagggcatcggcgtcctcggcgtgttcgtttcgggcatgcagacgagctaagctgtcgcgaaaccacggtttcgccgacaagctgtgttctgacagcgcgggacgccgcagaacacggacggagaaaagttcctatgcagaaacttttctctctctcagagtataaaaaccgaggtacacgcccccggtttttatgaatttgcttcgcaaattctattctatgcgcgctttcgcgcggaacggcgcggtataaactttcgctatcggagggcacaggaaactgggccctcttttcttgtctttacaatcggttctttcctgtgctataatgataaaaagctgaaaaaaagaagttcaggattgtgcatgatacacaaaggagtgaccgctatgacaaaccgcatgttcggcaattcgcagattcttgcctggctgcaatattattcggataatacgcagatcgacctcgaaaaggtgaagatcctcgatattacgcgcaaaaataaaaacctgatcccgacggtcgagtcgaacgacgcggttctcgtgttcaccgaggcaggtcacgcagacatcttttaccgcatgtggagcgccggtctgggcgagtgcgacgtctggtacaacaccggctccgagccgtccggtccgatcgagcacagcaagctcaagaacatgatcgaccgcggcatcaacgcctctgcggccatgctcgtgctcaatccgaatgcgcgctcgacctataagatcggcatgcacaacacgagcttctcgcgcggctccatccgctacgtcggcagcgagatccgcgcggtcatcctcaacaagatgcacatggcgtccgacgacacggtctgcatcatttcgggcgagtccatcgcggtcgaggccgcgctcatcgcgggcgagggaacggtcatcgcggtcgagtacagcggaaacgaccgccgcacgatggaggagaatatcgagcagttcggcctgaacaacatcacgatcatcgaccatgtggacgatgagagcatgaaggagctgccggttccctcgatctccatgctcgtcgcgagcgcgagcatggagcaggagatcgcctgcctgctgcgcctcaatccgcacatggagttcgtgatctacacgctcgacttccgctgcgccgcagcgctgcccgacctgttcgcgaagctcggcatcggcgagaccgaggtcattcagatcacggtttccagaatgaacgccaagcataattttacagccgagcctgcgccgtggctcattacggggcgtggcggagtttgatagtgtccgccgcacaaaaacatctgtttttgtgcgaaatgacgattgacagcggacagacatttccctataataagtgacagtaggacgcagaacggcgaaaaatgccgaaaaccgcgttctgcgcacaatttcatccatgaaagatgatgatggagacagtacgttccgatgaccgaacgcgaagcgagccggggtatggtgaaagcccggtgcaagtaggacgggaccgaatatcactccggagttgcagcccgaacccttcccgtcgggaaacagtaggtgctgacggcagctttgccgttataaaagccgcgtatgtcggtacgcagtaacgggtggtcaaacgaatggctgatgatcgagctttcgtccctttacggggatgaaggctcgtttttttgcccttccggcaaaaagcacaagaaggatacaggaggaaacagcatgaagaacatggtcgagatccgctggcacggccgcggcggtcagggcgcaaagaccgcctgcctgctgctcgcggacgcggcgttcgcgtcgggcaaatatgtgcagggctttccggagtacggtccggagcgcatgggcgcaccgatcaccgcctacaaccgcatttctgacgagagatgcaccattcattccaacatctacaacccggattacgtcgttgtcgttgacgagacgctgctccagtcggtagacgtcacgcatggtctgaacccggagggcgcgatcgtcatcaacacccataagtccccggatgaggttcgtccgctgctgcgcggctacgagggcagggtatacactctcgacgcccgtgcgatttccgagcgtaccctcggcaaatacttcccgaacaccccgatgctcgccgccatcgtcaaggtcagcggtgtgctcgacccgtggcgctttgtttccgacatggaaacctcgttcaagcataagtttgcgaccaagccgcaggttatcgcaggtaatatggaatgtctgacccagtcgctcaaggaggtgcgcggataatggccaagtgtgcaaaggatatcaatgaacagtccccgtggcaggagctgaccacgggcggcgaaatctacgagggcggcaccgcccgcatgaccatcaccggtgagtggcgcgcgaacatcccggtctgggacccgcagaagtgcaagcagtgcctgctgtgcgcaccgttctgcccggacgcttccattccggtaacggacggcaggcgcggcgaatttgacttcgaccactgcaagggctgcggcatctgctggaaggtgtgccccttcggcgcgatcgattttgtaaaggaggaaaagtgatgagcattcgtgagcgtatttcgggcaatgaagcagttgcctacgcaatgcgtcagatcaacccggacgtatttgcggctttcccgatcactccctctaccgaaattccgcagtattttgcgcagtatgtcgcaaacggtcaggtagacaccgagtacgtcacggtcgagtccgagcattcctccatgtccacctgcatcggtgcggaggcggcaggctgccgcgcggtaacggctacttcctcgtgcggcctcgcgttcatgtacgagctgctgtacgttgcgtcgtcctcccgtctgccgatcacgcttgcgtgcgtcaaccgtgcgctgaccggcccgatcaacatcaacaacgaccattccgactccatgggcgcgcgcgatgccggttggattcagctgtacgccgagaataatcaggaggcctatgacaactaccttcaggcgatgcgcatcgcggagacaccggacgtccgcctgccgatcatggtctgccaggacggcttcatcacctcgcacgcagtcgagaacatcgagctcgaggaggatgaggcggtcaagaaattcgtcggcgagtacaaccccgagcacgccctcatcggccgcgacacgccgctcgctgtcggcccgtacgacgtttctccgtactacatggagcacaaggtgcagcaggccgaggcgatgaagaacgccaagaaggccattctggacgttgcggcggatttcgaaaagaccttcggacgcaagtacggcttcttcgaggagtaccgcatggaggacgcggaggtcgctatcgtgctcatcggctcgaccgcaggcaccgccaaggcgtgcatcgaccagctccgcgccgcaggccgcaaggtcggtctcatcaagctgcgcgtgttccgtccgttcccgggcgaggagctcgccgcggcgctcagccatgtcaaggctgtcgccgtcatggacaagagcgagggcttctccgcgtgcggcggcccgatctacgccgagacctgcgcggcgtgctacgcgctcgaaaaccgcccgatcatggtcaatatcgtctacggtctgggcggccgcgacgttgcgaccggcgacatcgcaaaggtctttgaccatctgttcctgcttgtcaacaacggcggtcagggtccgaagtatatccacatgggtcagcgcagcagcgcaccggaggtgttctgaaatggcatataatcacaaggttgaactttccaagccggagcgtttcgtcggcggccaccgtctgtgtgccggctgcggcgcgggtctggtctgccgcggcatgatgcgcgcgctcgacgagggcgacaaagcggtcgtctgcaacgcgacctcctgcctcgaggtttcctcgttcctgtatccgttcaccgcgtgggaggactcctacatccactccgctttcgagaacgcagcggcgacctgcggcggtgttgaggcggcgtacaacgttatgaagcgccgcggcaagatcgacgatacctacaagttcctcgccatcggcggcgacggcggcacctacgacatcggcttccagtcgctctccggcgcgatggagcgcggtcacgacatggtgtacttctgctacgacaacgaggcgtacatgaacaccggcattcagcgctcgtcctcgacgccgcgcttcgccagcgcgaccaccacgccgtctggctcctgctcggtcggcaagaagcagaacaagaaggacctgaccgagatcatggcggcgcacaacatcccgtatgttgcccagaccacctttctcggcaacttcaaggacttccacgaaaaagcgcaccgcgcgatctacactgaaggtccggcgttcgtcaacgtcatgtctccgtgtccgcgcggctggcagtatccgaccgagatgctccccgagatctgcaaaatggcagtcgagacctgcgtctggccgctgtacgagatcatcgacggcgaatggcatctgaactacatgccgaagaaaaagctgccggtcgaggagttcatgaagctccagggtcgcttcaagcactgcttcaagccgggcaacgagtggaccatcgaggctgcacagcagtatgtagacgagaagtgggaaaagctcctcgcacgctgcggaaagtaagctgtcgggaaactgaatgcacgctgccgcgcgacagctgttttgcatgaaaataaattttatagacaatagaaagaccacagtcagcacatgactgtggtcttttgctgttctgaaattagagcatggcgctttccgttttcgcgccgggacagatggtgcggacgaagccggaaagcgtttcgagcgcgtcctcgatgagcgccggggcgatatccggcgtcccgaacaccgggtagaacacatgacggctgtccggatggacacaggtgcggctgtccgcgcccgcaatcatgctgaaaatgatgccggtatcgtcgcggccgcagatatcgttcggataggtatgcgtgctgtcgccccgcatgccgtcaaacggcagcttcgcgtccggcgtgaagatggtcagcgggccgtcgatgcggtcgatgtcgtgtgtgccggacaggacgaacgtcgtaagctcgagcaggaacggcaccgccgtcaccgggtcctcctccgggaagggacgacccttgaacatcacggtctcgaactgctgcatgaccggataggtctttttgaacttgcggaaaaagcggaaataggggttttcaccgaacacggccttgcggtcgtaatccgcgtatctctcgcggagcgccgcgagctcgcgctcgacgagcgcatggagcgcggctctgccgcagccctccaccggatactttacctcgagaatgccgagcgggatgccgcgcgaagcaaagctctggtccttgccgatgtcaaacatggaacgctttcctttctcacttcattggctcgtaaaactggtcgagcagctgaccgatggtctgatgatcggcgatcttgccggtaaccgcatcataataatagtacatattgccgtcctggtcggcaaagagataggtgccgagcggacatatatcacggttgccgtccgtccatccgatatactgatagccttccgcctcgccgacgacgcggatctggctgacgctcagcgggtgcatcacgaccgaaagaccgacgatcgcgatcaggtacgagcagtacagcaggatcacgacgtaagcggaatcacagcccttcggcggatggagcatggactcaagaccgaggattttcacaacacaaccaaatacaagcatgataatgatgacccagaaccagacctcgcagagcggattatatcccagcacgagcatgagatagatgaggccgccgcagccgaaggtgacgatcacctgactcagacggttcaattccgccccctcgcgtcttgccgcaaagcgcgacgcgaacaggatgacaggtgcatagagccacaggaaaatgcggctgtcgccaagcgcgccgccaaagtctatataaaagtaagtaccgatgaggctcaccacgagccacacgacaagcgctgcgatcgtaaacgttctttttgcatcttttttcttttccatttctatattctcccctgaaaaaaggcaaacgggcagagccatgcggctctacccgttccaccacacaccgcatggtgtgagctatgcgattgtaagattaagcctcagccttgatcttcttcagctttgcaaagcgcggcaggccggactgcttcgggccaacgttctcgccctcgatgagcggcagagcgtagtcaacaaatgcctgagtaacgccgttgccttcctcgttgatccagtcgcgcggaaccttcttctcggtgttcgcaacttcagaaagcgggagcagctcgatctcgcacttgtagccgttctcgtcgcgggtgcacttgaagcccggcatgtagtcggtcttgcctgcaactgcgttctcaacagcagccttgccggacatgtaggactcgtctacgtcggtcttggaagcgcagtgtgcagcgcagcgctggagcagactgagctcgatgccgcggaccttgcagcccagctcgttctttacggtgtctgccagcatggaagccagaccgccgagctgtgcatggccgaagccgtcggtagcagaggtcttagcctcggatacgaaggagccgtcagcgtagtggatgccctcggatacagcaacgaggcagttgcccttctcgtcgtagatcttcttgacgtcagccaggaacttcttcatgtcgaagtcggtctccggcaggtaaaccagatccggacctgcgcccatagcggtagccagaccagcagcgccagccagccagccagcgtgacggcccatgatctctacgacgcagaccatgccggtgtcgtatacacgagcgtcctgatagatctccatgcaggaagtagcgatgtacttggctgcggaagcgaagcccgggcagtggtcggtgccgaacaggtcgttgtcgatggtcttcggaatgcccatgacgcggcactcgtagccggacttcatcatatacttggagaccttgttgcaggtatccatggagtcgttgccgccgttgtagaagaagtagcggatgtcgtacttcttgaagatctcaagaatacgcttgtaatcggtatcgtctacgtccggatcagccagcttgtagcggcaggagcccagtgcagaggacggggtgtagcgcagaagagccagctcgtcgcggtcttccttgtcgatatcatacagatcgtcgttcagcagacccttgatgccgtgtgccatgccgaatacgcgggtgatggacgggttgtccagcgctgcctccagcgcacccagaacagaagagttgattacggaagtcgggccgcccgactgaccgatgacgcaagcgcctttcagttcgctcataatgataaacctcctaacaaattaaaacacagagatatctcgctgcattttcttacgtataaagagtaccatataacgtgaaaaaaatcaatcgttatccgaagttttcggcagttttcacgattttatgtagagctgcggaaaaaaagacaggatttttttgatatacacttgattttaccgggggtaactgataaaataaaagcagaatttttaagattcagcttttatcagaaaggaagttttcccatgcctttagttactactactgagatgttcaagaaggcttatgacggcggctacgctgtcggcgctttcaacgtgaacaacatggagatcgttcagggtatcaccgaggcttgccaggagcagcacgctcctgtcgttcttcaggtatccaagggcgcacgcgcttacgctaaccacacctacctcgtaaagatggtagaggcagctgttatcgagtgcccggatattccgatcgctctgcatctggaccacggcccggacttcgagacctgcaagtcctgcatcgacggcggcttcacctccgtcatgatcgactgctcctcccgtccgttcgacgagaacgtcgaggagaccaagaaggtcgtagagtacgctcacgctcacggcgttgtcgttgaggctgagctcggcaccctcgctggcgtagaggatgacgttaaggtatccgctgcggattcctcctacacccatccggaagaggttgaggagttcgtaacccgcaccggctgtgactccctggctatcgcaatcggcacctcccacggcgcttacaagttcaccccggagcagtgcacccgcaacgagcagggcatcctcgttccgcctccgctgcgtttcgacgtactcgaggaagtttccaagcgtctgccgggcttcccgatcgttctgcacggttcctcttccgtaccgcgcgagttcgttgacaagatcaacgctcacggcggcaagatgccggatgcaatcggcattccggaggaagagctccgtcatgctgcacagctgtccgtctgcaagatcaatatcgactccgatattcgtctggctatcaccgcttctatccgcgagcacttcgacgagcatccggatcacttcgatccgcgtcagtacctgaagccggctcgtcaggctgtcaaggacatggtcacccacaagctgatcaacgttctgggctgcaacggcaaggcttaatctgctgaactgaaagctgaaaagacctcccgatatgggaggtctttttttgctggcgcacagccgcgcgcatgaacagcgtttgctgtgcaaatgaaaaaaccagggacatacgccctggttttttcgttaagatggagaactgctgtctcaaagcttattcagccttggtctcagcgtccttggtcttgagcacgagcttgtcgttctcgacatcgagtacgacctcgctgcccttgctgatcctgccctcgagggactcctcagcgacaaggtcctcgacctcgctggtgacggcgcggcgcagcggacgcgcaccgtaaagcggatcgaagccggcctttgcgaggtgcttctttgcagcctcggtccaggtcatgctgatctccatgtccttcatgcgttcagcgaccttgcgcagcatgccgtccgcgatctgggcgatctcgtcctcgttcagacggttgaatacgatgatgtcgtcgatacggttgaggaactccggacgaaccgcgttcttcagctcgcccatgacatcctccttgatctgctcaaaggtgcgctcagcagcgtcctccggcttgccgtcggcgaagccgagcgacttgcggccggcgccggtgatcttctgtgcgccgatgttggaggtcatgatgatgatggtgttcttgaaatccacatggcggccctgaccgtcggtcaggatgccgtcctcaaggatttgcagcaggatgttgaacacatccgggtgcgccttctcgatctcatcgaacaggacgaccgagtacggatgacggcggaccttttcggaaagctggccgccctcatcgtagccgacatatcccggaggcgaaccgatcatacgggaaacggcgtgcttctccatgtattcggacatatcgatacggatcagcgcgttctcgtcgccgaacatcgcttctgccagcgccttgctcagctcggtcttgccgacgccggtaggaccgaggaacaggaacgaaccgatcgggcgcttcgggtcacgtaggccgacacgactgcggcggatggccttggaaaccgcggtgacggcttcgctctggccgatgacgcgcttgtgcagcgtatcctcgaggtgcagcaggcgctgaccctcgtcctcggtcagctgagcgaccggaacgccggtccagccggagataacggctgcaatgtcgtcctcggtgacagcaccgtgggacttggtctgctggtcagcccactccttcttgcgagcctccagagcctcgcgcttggatttctcttcgtcgcgcagcttggcagcgttctcgtagtcctgacccttgacagcctcttccttcttcgcagcaacggctgcgatctcgtcctcaagctgcttgaggtccgggggagcggtcagcgtggacaggcggacgcgggagcaggcctcgtcgatgacgtcgatcgccttatccggcagataacggccggtgacgtagcgaacggacagcttgacagcggcttcgatggcttcgtccggaatcttgatgcggtgatgcgcttcatacttgtcgcgcagacccttcagaatctcgacggcgtcctcagcggacggctcgccgacctgtaccggctggaaacgacgctcgagtgcagcgtccttctcgatgttcttgcggtactcatcgagcgtggtcgcgccgatgacctgcacctcgccgcggctcagagccggcttgaggatgttggcagcatctgccgcgccctctgccgcgcctgcgcccatcagcatgtgcatctcatcgatgaacaggatggtgtccttcttggcggtcagctcttcgatgaccttcttgatgcgctcctcgaactcgccgcggtacttggtgcctgcgatcatgccggtcagatcgagcgagatgatacgcttgcccttcagcgtctccgggacatcgccggaaacgatcttctgagcaagaccttcgacaacggcggtcttgccgacgcccggatcaccgatcagtgccgggttgttcttggtgcggcgggacaggatctggatgacgcgctggatttctttcgtgcggccgatgaccggatcgagcttgccttccttggctgcggcggtcaggtcgcggccgaactgggcgagcgcatccttgctgtcagcgccgcctgcggaggcgccggtctcggcggaaacgccgtcctgtgcgccgccgagcgcctcgttcagcttgcgaacaaggatctccggggtgattttcagatttgccagtgcggtcagcgcgacgttctggccttcgcgcaggatgccgagcagcagatgctcggtgccgacatagccggtgcccatctcgttcgcggactgtacggacagctcgatgatgcgcttggtgcgcggcgtcatgccctgcggggcggcagcgtcgggcgtgccgcggccggacagctcttcgatctgcttaacgagcgcctcgtcggtcacgccggcggcagacagcgccttggctgccgggccgccgccttcacgcagcaggccgagcagcagatgctccgagccgatgtagctgtggccgaacgatgcggccgcttcctgtgcaagagtcagtgcctgacgggcacgctcggtaaaacgattctgatagaacataaattaacactcctttcagagtagaaagatatcttgatttgggataaaacgtccctgtgaaagcagaaatcagttgaactgaatgctctttgccgcttcacgcagcatttccgcacgcttcctgtcgcggtcctgcggcgcgccggtcagcatggccgggcggatatgctcctcgagcgagtacagcttctgtgcgtccatgccggacaggaagcccatctgcaagccgatgagcacattcgagatgcactcgaccgcttcgctgctctcgatgaggtaggcgcttctgagtgtgccggccgcgcggtagatctggtcgcgcagcgccggttcattctggctgcgcacctgttcgcgtgccttcttttcggcgtcgatgatggtggtagccgtttctaccagcttgtcggtcagctctgcggcagacgcaccgagggtgatctgattggagacctgatagaagccgccgacagcctgcgagccttcgccgtaggtgccgcgcaccgcacagccgcggctgcctgcgtagccgatgatgcggtccatctggccggtcgcggtcagcatgggcagatgcagcatgatggacgcgcgcaggccggtgccgatgttggtcgggcaggcggtcagatagccgaggcgctcgtcatacgcgaacggcagcgccgattcgatgagcgacgcaacgcggtttgccgtctcgaggcattccttcgggcaaaggccggtgccgatgacctgcaaacggaggtgatcctcctcgccgatcatgatggacacgccgccgtccttagaaacgatcagccagccgccgttctgcgcgagctccggggaaatcaggtgctcctcgaccagacgggacgcttcggtcgagcgggggatgatctgcttcttctcaaattccggaccgatggtcggattttccttcagcgcggcgaaaaccttatcagcgatctcgctgtgctgctgttcggtcagacggaacggataaccttttatatttcgtgcaaggcgcacacggctggatgctgccagaccggtgaagccgccgtgaatctcaaacatactcatttctgttcgccctccattctgcggatctcatcgcgcaggcttgctgcgcgctcgtaatcttcgctttcgacagccgccttcagctgcgccttgaggtcagcgaccggatcggccttcggctgttcgggcgccgccggtgcggtgccgatatggcgcgtcgcgccgtggatcttctggacatacggattcagaatatccgcgaaggtggcatagcagtccgggcagccgacgcggccggtgcgccgcagctcgctctcggtcatgccgcaggtcgggcacttgcgctcggtgccgagcagggtagcggtcggagccgcttcgcccagcatatcgttccacaggctgccgaagccgccgccgaggaacgaatggaacggatcgctccagaagtggttcatcgactgaaacgcgctctcgaacgcgccgccgagattttccttcttcgcgcactccgggcacagatgcatttcgcgggtgacaccgtttacggtttccttataatacatggttgcttcattcttgccgcatttttcgcatttcataagtcaaaactcctctccgagagatcatatactatataataaagtttcattcaagtccggctctgccggatttgaatatcactgctcagccgtggcggtgtgtcctcgtccgctgtgcgaacgagaggggggatctaagggggactgcgtccctctcagatcgttgcgatacccatgatcgagcagcgatagatcgcggctcgcaggcggtcgcggtcggtcttttcgacctccgccagtgcgccgtccgagcacgcggacaggagaagctgtccctcacgctgggtgagcagatcggcggaaaccagtgcgcgtgtcagccgcgccgcatcattctggctcagccggccgccgatgccgcgcgcagcctcgagcagtgtgcgctgtctgtcgtcgagcaggcggatgatgcggatgaagccgccgccgcctcgctggctttctaccagatagccgttttccggtgtgaaccgcgtttcgatcacataattgatctgactcggtacgcaggaaaatcggtctgcgaggctttttcgctgtaactctgcgacgccgccgccgttcgacagcatctcgccgatgaaatctgctatcacatcggacattttcatttggctcacttccttctgtcggtttcggtctattactgaccttccctgacctttgaccatattgtataattttcagcgtctaaaagcaagagaaaaatctgaccttttctgactaaaataaaaatctatcacaggaaaacatggtattttctaatttgttctcacgaaatctctttatttcatgattttttgaaaatacacgcaaactatgcactatgataaaagttaccaaagactaaccacctgtttttgttgcttttttcagaacatgtggtacaatatatttgtaaaatacatttggaggtgcaataccaatggcatatgttatcggtggcggctgcattatgtgcggctcttgcgcgggcgagtgcccggttggcgctatcgctgagggcgacggcaagtacgagatcaacgcagacgcttgtgtagattgtggtacctgcgctggcgcatgcccggtaggcgcaatttctcagggctaattctgagatgtgaagaaaaccccgttccttttggaacgggattttttttaccctgtcgaaaagctttcgcttttccgacaagggtgttcggctctggccgaacacggacgtccgaaagttcccgttcggaaactttctccctctcgagggataaaaaccgaggcgcatgtcctaggttgctctcattgaatatttttgaggatagaggcctacgggcttatgcgtttgcatggcaaacattgttttatgcgcgctgccgcgcggagtcggaaaggggcggcgtatgctccttcttatataagtaagcggcttcgcgcacaatgctccgcggggcgcggacacgttaagataacgttaaatatttatctgtcagaatgtcaaagaaaacgcgaaaatacaccgaaattcatgcgttttgacgttgcaatcgcggcgcacaggggcgtataatagtagaccgaatgaaaaaaacggaatgcgtgccgtaaaaaggaaaagcgggcacgcaaaggaaaggggactactatttatgaattccatgcagatcatctctgtcgtggtgtttctcgtcgtcatgatcgcgctcgtcacggaaaaggtgcatcgcacggcggcggcggtttccggcgctgtgctgctgctgtgtctgcgcattctgagcgtcgacgaggcggtcagctacattgacttcggcacgatcggcgtactgatcggcatgatgctgttcgttgcggtcgtgcgaaattccggtctgttcgagtatatggcgatcaagtccgcgaagatcgcgaagggcagtccgtggaagatcatgctgctgttcatgatcctgaccgcggtgctcagtgcgttcctcgacaacgtaacgaccgttctgctcgtcggaccgatggcgatctcgatcgccggcattctcggcatcgacccggtgccgttcttgctcacgcagattttagcctcgaacatcggcggcacggcgacgctgatcggcgaccctccgaacatcatgatcggctccaaggccggtctgagcttcgcggatttcgtcgtcacgaccggcccggcggtcatccttatcatgatcgtcatctgtgcgctgttctatgtggtatacggccggcgcatggtggtcgcgcccgagcgcatggcagccgtcatggagctggacgaaaagcgcgctgtgcaggacggaatgctgatgagaaagagccttgtcatgatcgcgctcatcgttctcggctttgtctgccactcctcgctcggtgttgagtcctgcgtcgtcgcgctcgccgcagcgtccatcatgctgctgatcggccgtcaggatatcgaggagatcgttctgggcgtcgaatggtcgaccatcctgttcttcaccggcctgttcgtcatcgtcggcggcatggtcaagtgcggcgtgatcagcgcgctcggcaacgcgctcgtttctgtgaccggcggcaacgtcacgctgctgatgatcctcatcctctggggctctgcggtgttctcgtccgttctggacaacatcccgttcgttgcgaccatgatcccgctgatcctgtccatgcaggcggacggcatggatgtcacctcgctctggtgggcgctgtcgctcggcgcgtgcctcggcggcaacggcacgctgatcggcgcgtccgcgaacgtcgttctgtccggcatttcggccaagcacggtcatccgatcaccttcggccactatctcaaggtcggcttcccgaccatggttctgtcggtcgcgatttctaccgtttatcttcttgttcgttttcactgatcttagcaggaggggactaatatgtttacaaccacattttccggcgagctgatcaatgtcgcgctgcgccagctgggcgcgacgcgcatagtcgaaacgcgcaacggcattatgtacaaggtcgagttcaagctgtccgatgacctcaccgtgacctatgtgttcgacgtcaccaagcacgacaagtattatatccagcgcatcgcgccgtatccgatctcgcacggtgattttgcgagcgcggacgaggtgatcgagttcgtgcgccgagatatcaccaaattccgcaacgcgatgcagtcgcacaacttcccgaagtttctcgagaccgctcatgcgatggtgcgctttacgcatgccgtcgagctgatgttccttgagcggaatatcccggaagaggatatggaggcagtgcgccggagcattgatgacggtctggatcaggtgcgcgaaatctacggccgcacgccgaagatcgataagaaataaagagagcgtcatctccgcgcagcgtcagcatgcagctgcacagaacgacgaaaaaaccgaggtacacgcacactgtcagcggctcaggctgacagcgggcatgtgcctcggtttttgtgttaagaggaaagcgtcagcgaagatggaagcctcagcttacgccttcggcgaatgctccatgatcgccttgacggcagtcgcggtgtcggtctccgggaacagctcgtagccgacgcggccggtatagccgcatttctccagatgtgcgagcaccttcgtgtagttgatctcgcccgtgcccggctcatggcggcccggtgcgtcagccacatggatatgaccgaaggtgtcgccgtagttcgaaatcgtgtcgcagatgcagccctcgttgatctgcatatgatatacatcatacagcagcttgaggcgcgggcagccgatcaggcgaacgatctcggcgcccatctgggtggtcgcgaggaagttgccgacatggtcggtggtgatgttcagagcctcgagattgaggttgatctcctccttctctgcaagctctgcacaggcgagcagggtgtcatacatcgagcacagcttgaccgtgtgggacaggttatcgtagtggttgacaacgatgccgccgtcgcccagtgcgttggaatggatggtgacgctggcggcgccgacctttttcgctgctgcgatggactgcttgaggtagtccagatacttctgcttgtgggtcgggtcgacgagcgagtagtctgcatcgccgttgaagccggaaatcgcgatgcctgccttctcggcagcctcacgggtcgcatccagatcgcggatgcgccagtcccagaactctacggcctcaaagccatcgttttttgccgcctgaaagcggtcgagccagtccagctcggtgtaaagggtatcaatgcaagcgcattttctcagtgccataataatttacctccagacaaattttactcttgtaagttgatgatacatcaagcgtaccggatatgcaatacgctgattggtgaaaatgggtcacgcgccgattccgagcggcgagaatgccagataaaccagcacaacgcatacgataacgatcacgctgacgatattgcggtacttccacggcgtcaggtctaccgcgccgacgtcctcctgcacccagacctcagcacccttgcgcttattgtgacggtgcatgaggtacatgatcagcatttcaagcggccacagaacggatacggcgtacagatagtgcatggtgccctcgttgccgccgaacagcgaatagctgggagacaggagcatgaagccgccatagcagatgatgtggaataccatgatgaagcgtgcgctgtacttcggcaggcagttgaagaagaagccgccgaatacaccggacaggaccggcagaccgaccagcataacgaacgaatcgaggaaggtcttgagtccggcagggaagaagtagaccatcggaccgacgatcatcgagaagatcgcgaacacaatgccgatattcttgccgaccgagaccagctttttatcgctggcgttcttgttgatgaattccttgtagatgtccatcgtgaacatggtgtttaccgagttgagcaccgagttgaacgaggacaggatcgcgccgaacataacggctgcgaaaaagcccatgaccggctggggaacaacgcgggtgatcagtgccggatatgcgtcatccatcatggatacctgcgtgccctcgatgttgaagatcgcgtaagcgataacgcccggcagcgcaaggaacataaagccgaggatcttgaggaatgcacagtagagcgcacccttctgcgcctccttgaggttttcggcagccagcacgcgctggatgaacgactgatgcgtgcaccacgactggaagccgaggaataccagaccgaggaaaacggtcggccacggaacagccggtgcttcgctctgcgcgggggcgatggagttgagcatatcggcgtggttgtggatcaggtagcgcacgccgtccatgatggcaacgccgctgtcgctgccggaggcatgaccgagcacgcccagcgcgaggaacgggatcatcaggccgccgatcagcagaccgatgccgttgatggtatccgataccgcaaccgctttcagaccgccgaagatggcgtagatcgaaccgatgatggtgatcagaatgcagagaataacgatagactggaacttggtaatgccgagcgtgccggacaggttgaaaatgttttcaaacaccagcgaaccggagtacagaatgaccgggatctgcacgaacaggtacagaataatgtacgcgatggagaaccacagcttggtgggtcggtcgtagcgctcgccgagcagctgcggaatggtggtaatgccgcttttgagatagcgcggcgcggcaaacagcgccagcacgatcagcgcggtggctgccatgacctcgaatgccatcgggctcatgccgatcgctcaggtctgtccgttcgtgccgacaagctgctctgcggaaaggttggtcagcagcagcgagcctgcaatgacaatgcccggcagaccgcgtcctgctagaaaatagccgtcggcggtggtctggtcatcacccttggtcttgacataggagatgaccgcaactaaaatggtaaaaaatacaaaggttacgcaagtgaatatcattttctctgttttaactccctcaatttgtataaaaaaaccgttggtgcatagcgcaccaacggttttagcacattgcctagactgtgtgcgtggtgtgaaaattaggctgtgattaagcctcgatctcggagatcttgaccgggcggccctcatgcagggacttggttgcagccgcggccatcagtaccggatacagaccgtcctcgccggtaaccggagtctccttgtcgttgataacggcatctgcgaatgcctgcatctcggaaacgaacgcgccggtgtagcggtcccacatgaccttgtaggcgacgccgtgaactgcgccgtctgcggtggacagaacagcggtgttcggggtgtcattctggtcctcggcacagccctcggagccgaatacctcaacgcgctggtcgtaaccgtaaactgccttgcggctgttgtcaattacgccgattgcgccgtttgcgaacttgagggtaacgagcgcagtgtcaacgtcgccggcttcgccgatgcccggatcgaccagtacggaaccaactgcgtttacctcggtaacttcgctgcctgcgaggaagcgggccatatcaaagtcatggatcatcatatcatagaagataccgccggaaaccttgacgtaggataccggaggcggctccgggtcgcgggaagagatcttgatgatgttgaccttgccgaccttgccgccgcggaccatgtcgtaaacggcgcggtggttgtggtcgaagcggcggcagaaaccgatctgcagctttacgccagcctccttggctgcgttgatggcagcgtgcaccttctccagatcataatcgatcggcttttcgcagaagatatgcttgcctgcgtgagcagcctcgatgatgtacttggaatgggtgtcggtagaggagcagatgagcactgcctcgatctcgggatcgttcaggatgtcatttgcgtccttggtggtgttcggaatgccgcaggacttggcgaaagcctcggtctgctcattcatgaacgggtcggcgatggtcttgatctccatctccggaacgaacatggagatgttctttgcgtgtaccttgccgatgcggcctgcaccgatgatacctactttcatgggaagatgcctccttagcattgggtgtgatggttttttgagaggtttttattattctgtcagagcgttggagcgcggttcttgcagaataaatcaatataatatagggaaagtgggtgctttccccggaaacgcggagaccggctccgcgttttcaacaggttggggaaaatttacgagcttacttcatccactcgttgaacttggtcagacgctcttctgcgttgtccttggtgatgatttcggtgccggtgtctacgaccttgtcgtactgctcgcccttgaggatcttgaccatggtctcaacagccttgtagccgatgtcgaagttgttctgtgctgcagtcatggtcagctcgcctgctgcgactgcttcgcaagcggacttctggccgtcgaagccgaggaagatggtctttgcgtagttcgggttgctctttgcggtgcgggctgctgccagcgccatatcgtcgttgttcgagcagatgatcgcgacgccgtccggatacttgctcatgatgccttccatcgcggttactgcgaggtcggccgttgcgtttgcgtactgggtctcgttgtcgaggaactcgccgccggcctcagtgatgccttcgcggtagccgtccatgcgggcggtgttggtggagtcgccctgaacgcctgcgatctcgatgcacttgatctcgtcccagccgtttgccttggcggcctcgactgcggcctttgcgccttccttagcggcttccttgttgccggtgccgacgaaagcgaggcacttgtcggagtcaatgttggtgtcatatgctacgaccggcttgtcagtgcttgcgatagcggttgcaactgcttcggactgaagcggagcgatcaggtagccgtcataatccgcgaccagatcggtctggatggagttgagctgctcctcgtagtaggtctctcccggagggccgtagatggacagcttgacttcttccgggtgttccttctcgtaggcttccgcaccggcctgaatgatgttccagaactcagcggcgttggtcttgagcgtcatgcggatcttgtaaggctcgttcgaagcgttgtccgaaccgcctgccggggcgtcgccgccgccgcacgctgcgaggctcattgccatcgttgctgccatcagagccgccataagtcttttcttcatcatagtgaactctccttttctctttacactcttttgtgatgcacggttctctctgtgcttttatgtgcttccgtgctctttatgtgctcattatagcgcgacctttgccggctgtcaacatcattttcagaaaggcacagattggcgttttgaacctttttgctgatttatattgctttatacggcaatatatcataataattgaacaaacaatgaatgtaatttcggattttgtctgatgtgccaaactcatggacctgtatttgttgacacacaacaaacctgtgcatctgtgtttttctgtgtttttgatttttggttggatttacaacggttattcgtacattcattcagaaaacagacgtgtgaaagtaataatttctgtgtgtgcgattacacatattttctgtgtgtatgatacttttctttacaacgcacacatttatgctataatgattacagaaaacctctcatcttgaaggatgctgatcaatatgaataaacgacccaccatacagaccgtggcggaacgcgccggtgtttcgcgcggcacggttgaccgcgtgctgaataatcgttcttatgtacgcgcggatgtgcgcgagcgcgtgctcgacgcgatccgcgaaaccggatacctttctccgcgcgaggcgcaccgtcaaaccgcagaccggccgcagaattactcgcccgtgaagctgggcgtgcttctgcccaactgggcaggcccgttccgcgaggaggtcacgcgcggcatcgaaagcgcccgcgtcaagttgtccggccgccacgcggaaatccgtgtgtgcacctgtgaaaccgatattcccggcgaggccatcaaatttctcgacgagctggtcgactggggcgcacagggcatcgcgctctgcgccctcaacgacattaccatagaagcgaaggtgggggagcttgccgacaacggcattccctgcatcacgttcaactccgacctgccgaacagccgccgcctgtgctttgtcggtcaggattacgcgaagagcggccgcatcgccgccgagctgctgaccaagtgcatcgcgccggatgcgcacgtgcttgccctcgccggcaacctcgaataccacggccaccgcacccgtctggacggcttctgctcgcatatgcgcgaaaaaggcttctcctcgtcccagatcgacatcggtgaaacctacaacgattaccgcgttacctataatagagtggccgccgccctcaagagcgccacgccgcccgacgctatttatatggcaaaccgttcggtcacggcctgcatagacgcggttcgcgccgcgggctgcaccggccgtgtccgcgtgatcgcgcacgatatgtctcccggccgcgcccagatgctgcgcgagggcacgctcgacctgaccattacacaggatctgttccgtcagggcagccagccgctcatactgctgtgcgatctgcttcagctcggcacgcagcccggcagggatcagctctccaccagcatctcgatcatctgcgcgcagaatatcgactgagttagcaacatcttaccgcagaaaacgcttccgcaaacgttttcgcccttcatattgacacttctccccgaatatgctataatcagatgcaataagggagtagtcggcgtgcatttgttccgatgcacgcggcagagccaacatactgagaaggatgcttctctggttttgcatgaaatgacgagacttatctgtttttttcggcagatgggtctctttttttatgctccgctgccgctcatacgacaaggaggacaagaaaaatgggattactggagttgtttgtcattgcagtggggctttcaatggatgccttcgccgtttcgatctgcaaggggctgagtgtgcgggagctgaagccgaagcacgcgctcacggtcggcgtttatttcggcggttttcagatgctcatgccgctcatcggcttcgcgctcggcgtgcgctttcagtcgtttatcacaagcatcgaccactggatcgcgttcgttctgctcggcctcatcggcgcgaacatgatccgcgagtcgcgcgagcacgatgaggagaacctcagcgactcgttttcgttcggcacgatgctgccgctggccgtcgcgaccagcatcgatgcgctcgccgtcggcgtcaccttcgcctttcttcaggtcagcatccttccggcggtctgctttatcggcgcgacgaccttcgtgctgtcctgcatcggcatccggatcggccatgtgttcggcctcaagtacaaatcccgcgcggagctgttcggcggcgctgtgctcatccttatgggcattaagatcctgctcgagcacctcggcgtgctcggataaaaccggaaaggactggctgccggcagaaccggcgttttccgacagtctccagccgcctcctgcgaggcggctttttttctgtccgtgtatatacgaaattgcaaacgtttgcgttgtgcaggattgacagctatgaatagagaatgagaggaaatcggggaaaatagttcgaaacggcagaaaacagcagacaactgacatggtaatttacgtattatttaatggttatgataatatcagatgacctcattttgaaatttcaagcagatttcatgaaaaaattttgcagaatagacgagaaaatccgcaaaggattgcaagaatttgtgcagctgagccgtaaaaatgaatgcaaaaaatctctgtgagtatttgcacaaaaacatctgaataacagggaaaatgccgttttatgagaagaaaaagtaaaagaaagaaaaagaaataatgcaaaatgaaaaaatgaaatcagtgaaaaaacgaataaaaacagggtggttgtgcataatgcacaagaacgatttggcaattcggtgtaataccacaatagcggatttgcggaaaggcgtgctataatacggttgtgtgattgaagtgtgagtaaaaagagcgcatcaaccgaatggaggaaagatccacaatgaagaaatatgtttacatgttcccggaaggcaatggcaaaatgcgtgagctgctcggcggcaagggcgcgaacctggcagaaatgaccggtctcggcatgcctgttccgcagggctttaccatcaccaccgaagcctgcacccggtactacgaagatggcaagaccatctacccggatatccaggaacagatcctcgaatatctcgataagctcgaaaaggtcaccggcaagaccctcggcgatgctgagaagccgctgctcgtatcggttcgttccggtgcgcgcgcttccatgcctggcatgatggataccatcctgaacctcggcatgaacgacgagatctgcgaggctgttgccaagctgacgaacaatccgcgtttcgcacgcgattcctaccgccgcttcatccagatgttctccgacgtcgtaatggagctgccgaagtccaccttcgagcagttcatcgaccaggtaaaggacaagaagggcgtcaagatggacaatgagctggacgcagacgatatgtccgagctgatcgtcctgttcaaggatcattataagaagtccctcggcgaggacttcccgcaggaccccaagaagcagctgatggaagctgtccgcgcagtattccgctcctgggacaacccgcgtgccaacacctaccgccgcatgaatgatattccgcactcctggggcaccgcagtcaacgttcagtcgatggtattcggcaacatgggcgagacttcgggcaccggcgttgcatttacccgtaacccggcaaccggcgagaagaagctgtacggcgagttcctgatgaacgcacagggcgaggacgtcgtagcaggcatccgcaccccgcagccgatttccgcactggccaacaccatgccggaggtttacaaccagttcgttgacatttccagccgcctcgagaagcactacggcgatatgcaggatatggagttcaccatcgaaaacggcaagctctatatgctccagacccgtaacggcaagcgtaccgctcaggcagcgctcaaggttgcagttgacctcgtagacgagggcgtctgcaccaaggagcaggctgttatgaaggtagagccgaagcagctcgatgcactgctgcatccgaccttcaatccggaagcactgaaggccgctaccccgatcaccaccggcctgccggcatctcccggcgctgcctgcggcgcggtctacttcaccgctgacgctgctgcaaaggcacacaagaccggcctcaaggtcgttctggtccgtcaggagacctctccggaggacatcgacggcatggcagtttccgagggcatcatgaccgctcgcggcggcatgacctctcacgcagccgttgttgcacgcggcatgggcacctgctgtgttgccggcgtaaacggcatcaaggtttccgaagaggacaagaccatcacgttcgctgacggcacgattgccaaggaaggcgacgttatttcgctcgacggctcgaccggcaacgtttacctcggcgctatcgcgacgcaggaagctgagctgaccggcgacttcggccgcttcatgggctgggctgacgagattcgtaccctgcacgtccgcaccaacggcgatacgccgcgcgacgctacgcaggcacgcaagttcggcgcggaaggcatcggcctgtgccgtaccgagcatatgttcttcgagccgacccgtatcaaggcggttcgcgagatgatcatcgctgacacgcttgagcagcgcaaggccgctctggctaagatcctgccgatgcagcgcggcgacttcgaggcaatctaccgcgcaatgggcggtctgccggtaaccatccgcctgcttgacccgccgctccacgagttcctcccgcacgaggacgacgagattcaggagctggccggcgagatgggcgttccgttcgagaagctgaagtccaaggtcgagagcctgcacgagttcaacccgatgctcggcacccgcggctgccgtctggacgttctctatccggagatcgcagagatgcagaccgaggcgattatctccgctgccatcaacgtctggaaggaagacgacctgcgcatcacgccggagatcatggttccgctggtttccgagatcaacgagctgcgcttcgttaagaaggtaatcaaggcgaaggctgacgagctgatcgaggcttccggcctgaagatgaagtatatggtaggtaccatgatcgagaccccgcgtgcagctgtcacctcggacgagatcgcagaagaggctgagttcttctccttcggtaccaacgacctgacccagatgacctacggcttctcccgtgacgacgtcggccgcatcctcgagacctacttcgagaagaagatcctcgagtccgatccgtttgcacgcctcgatcagaagggcgtcggcagactggtcaagctggctgttgacaacggcaagcgcgtccgcccggacatcaagctcggcatctgcggcgagcacggcggcgacctttcgtccgttgagttctgccacaatgtcggcctgaactacgtttcctgctcgccgttccgcgttccgatcgcgcgtctggcagcagcacaggctcgcgttaaggagcttggcaaggcataacaaccgaataaatgcataatgaaaggacgagccgaaaggctcgtccttttttgctgtccccaaactctgttttgacgctgttccataaaaacgccccttctgcatcagcagaaggggcgtttcctgtgcatattgatcctgcggattacttatagaactcgttgatgtaggcaacaacgtcctcgcggcagccgcggaagggacccggggtctccatcttgagggagaccagagcggtcgcccagagcagcgcttcctcgaccgaggcgtgctgacgctcgttgatgtagcctgcgaaggcggtgtcgccgcggccggtgcggccggacagattgcgcgccttgatcgggcaggtgtaaatcttctcgccgtcataaacgagcagctcggtgttgtgggagatcatgacctcctttgcgccccactcgtgcagcatatgtgccgccttgacgcggtcgtttgtgccggtcaggatttcagcctcggcggcatcggtcttgaggtagtcgatgagcggcaggatttccttcttgtccgcccagtcgtggaacgccatggtcttgtccggctcaacgtggcgcagcatgcactgaacgtcaacggcgaccttgccatgtttggcgctctcgcgaataagctcgccgtcgaagtcgccgtataccagaccggcgaagtgatacatcttggtcttgatgtccgccatctcgtcgaagcggaacgggtcgcacttgccgagcgaggtgcaggcgcgcttttccttgtcagcggtgaaatactggttgcggatggagcaggtgtgctcggacggcttccagtacaggtcagccttgatgccctcgaagcgctcgtttacgtcggcctcctcgggattcagcttgcagaagatggcagcctttgcgccgctgcctgcggccgcccagccggatgcgacgaccgcgccgcctacctcgctgcgttcgttgccgagataatcaatgttgtggtcgagcgaaaccgggccgaccaccagtacgtcatattctttctccatttttctttccgcgcacatcgctgtgcgcactcctttctcaaagatgttgcagggcgcagagtaccccacaggtcctcaaataggtctttgcaactttacacagtcattttaccataaatcgccgcaaaacacaataaaatatttgtgaaatctgcaacgaaaacgtgtgcatttcaactttttcaaaaaaatttacatggagagcacccgcagcaccgtggcacccgcttgcacagcggcgcgaaatatgatatgcttagatacattctaagaggcagaagttcaggagagtgcccgaaaacggcgcaaagccgcgcggcacaggagggagagttacaaatggttcaatatatggaatggctcaaggcgttcctgttcggtatcgtggagggcatcacggaatggctgccgatcagcagcacgggccatatgatactgctcaacgaatttgtcaagctggacgtttcggacgcattctataaaatgttcgaggtcgtgattcagctcggcgcgatccttgcggtcgtcgtgctgttctggaaccagatctggccgctcaagcgcaatcacggccgtcacggcggcgcgtccgtcacgatcgaccgcgatattatccgtctgtggtgcaagatcgttgtcgcctgcattccggcggcggtcgtcggcctcaagtggaacgatctgtttgaggagctgttttacaactatcagtcggtcgctgtcgcgctgatcgtgttcggcgttgcattcattgccgtcgagaccgcgcataaagacaagccggcgaagatcaattcgctgaacgagctgacctacccgaccgttctcatgatcggtatgttccagctgatcgccgcgatcttcccgggcacctcgcgctccggctcgaccatcgtcggcgcgctgctgctcggcgtgtcgcgcacggtggcggcggaattcacgttcttcctcgccattccggtcatgttcggcgcgagcctgctcaagctggtcaagttcggcctggtattcacgcagaccgagctgatcatcctcgcgatcggcatggtaacggcatttgtatcgtccatgctcatcatccggatgctgatggcgttcgtcaagaagcacgatttcaaggtgttcggctggtatcgtatcattctcggcattgccgtgctcgcgtacttcatgctcgcgcgataaacgaaaacagtcagtttcgcgacagtttcaaaattcctgcaccgcctgttatggtgcaggaattttttatgccgttttacaggtttttgatgtcggaaacgatgagctccggggtcagatggttttcccttgccacttcttccgggtcgtagcggtcaaggaaggcctttttgacgccgtagttcagcaccctgacgtcagatgcgccgtagaaacgcgcgatcttttcgccgaagccgccttcaagctgaccgtcctcgagcgtgatgacgacatcatggtcggcggcgagctcgcgcagcagcttttcgtccagaccggtgatgaagcgcggattgataacggtcgcgtcgatggcggcttcttttttgagcagcgccgccgtctgttccgcgagggcgaagaacgagccgaggccgaggacagcaacccttgtgccgcggtgggtgacatgataggtgttcagacggctgaaatccttctcgaccggctgtgcggacggcgtgagcggtccaaccggcatacggatcgcgaccggatactcgttctgctcgatgctccagtcaagcatggcaagatattcgtccctgttcgtcggtgcgaggtaaacgagattcggaatgttggacatcatcgggatgtcgtagataccgaggtgggtcacgtcgttcatgccgtagatcgacgcccacgcaacgatgatggtcgccgggctgctgttgatgcatagatcctgcgaaagctggtcgtaggtgcgctggataaaggtggagtatacgccgtagaccggcctgccgccggctgccgcgatgccggacgcgagcgcgactgcgttttcctccgcgatgccgacgtcgatgaattgacggccggcgagcctgcgcttgtcctcggtgaagccgagaacggtcggcgtgcccgaggtgatcatgcacacagaggagtcagcctgcatctttttcatcataaagtcggccgtaaggctctcccagctttcgccctctgtgctcatgagcggctggaaggtctccctgtcgaacggagcgcagtagtgccactcctccttgtgcgcctcggcgggcgcgaagcccttgcctttttcggtgacgaggtgcacaacgaccggatggtcgatgtccctgaccgcctgcaaagcctcgatgaccgacggcaggtcattgccgtccgcgacgaagcggtagtccagacccatcgcgcggaacaggttgcagtccgcccggccgccggtctcgcgcagcagacgcaggttgccgtaaatgccgccatggttctccgcgatggacatatcgttgtcgtttacgaggataatgaagctgccgccgagctcagctgcgtaatcgagcgcctcgagcgcttcgccgccggagagcgagccgtcaccgatgacagcgatgacattgccgccttcgcccttgaggtcgcggcccttcgccagaccgcaggcaaggctgaccgaggtcgaggtgtggccgacggtgaaatggtcgtgctcgctctcgtgcggattgctgtagccggagacgtcgtcgtagtgtgtggggtcgagaaaagcctcggctctgccggtcagcatcttgtgcggataggtctgatgcgatacgtcgaatacgattttatccttcggagactcgaaaacatagtgcagagcaacggtcgcctcgacgaagccgaagttcgggccgcagtggccgccgtggcggctgagcttttcgacgagtgcgccgcgaatttcgccgcacagcgccttcaactcatcgagcgagagctttttaacgtctgaggggctgctgatgtgttccaggtacatagagaaattcctcctgcaaattttttttaccatgacaatggtatcacctggagtgaacttcaagtcaagaggaaattcaaaaattttatccacagagcaaaaccgcatcaaggaacaggcgcgatttgcgggtaaatttttcttgcaatttcggtacagggtggtataatccatataaatatactaacacgatatgaatagtgggaaaataattgcgcggcggctgacgcagaaggagagcaccccttatgaaggaaaaaatacgatgcggtgagacacattacggagacagcccgtaccggtcggatgtgcacggtatcctgctgcacggcagacgcggacggctgctgtccgtgctgtatacggcaggcggcgaaggactgcatcccgccgtgctgcgctgcacggcattcccggctgcgaaaagaatatcgaccttgcgcaggatctgcgccgggccttgcggcaaagccggtgctgtgtctcggcggctcgctcgacatctacacgccgcccgagcagcactgtgagccgcttcgccgggccgtcgagcgggcgggcggtacgcagtttcggagcgtgcgctggccgaccgaccattttctgtcggattaccggctgaaaacctcggaaaccgtgctcgaatttctgaaaagctgaacgatctcaggcattccgctgctctcggcatggcggaatgccttttttgcgtcttgcaacgaaaattgaaaaagaatataattatactggaaataaatcacgatcagaaagaaggactatcacaaatgccaatcggagtattgaccaactgcgcatcggtgctggcggggggcgtaatcggctcagcgcttgggcacatcctgcccgcaagcctcaaggagcatctgccgaccatgttcggcctgtgctcgatcgccatcggcatcaattccatcatcaaggcctcagcgatgacgccggtggtgctggcgctgctcgtcggcttcaccatcggtcatctgctgcatcttgaacagtggacgagccggttttttcataagctggtgaaggcgatgcacctcggcggagacggcatcgacatggagttctacatcacggcggtcgcgctgttctgctgctcgggcttcggctggtacagcacgctgaccgaggggatcgcaggcgacccgtcgctgctgttctccaaggcagtcctcgacggcttcacggcgctcatctttgcttcgacgctcggaaaatccatctgcgccattccgttgccgcagtgcgtcatcctgctgtgcgtgttcggcgcagggcggctgctggccggcgtgctgacgccgaccatgttcgcggatctttccgcctgcggcggcgtgctgaccatggcggcgggctttcgcgtctccaaaatcaaatccgtgccgctcgtcgatctgatgccggcgctccttctcgtcatgccgttcagtctgctctggacgatggtgatgggataagaaaacgatgggcagcaccacaggctctaccgcgcggtgctgcccatatggtttgaaaggaagaaactgaaaaatgaagctcattcatctttctgatctgcatctcggcaagcgagtcaacgaatgctcgatgctggaggatcagcagtatattttaggcgaaatcctgcgtattatcgatagcgaagcgccggatgcagtgctcatcgcaggcgacgtttacgataaatccgtcccgtcggcggaggcagtgacgctgctcgatgattttctggtgcagcttgcctcgcgccgcgtgcagacctgtctcatcagcggaaaccatgactcggcagagcgcctgtcgttcggcggacggctgatggacgcggccggcatccatatcgcgccggtctacgacggctctctggcgccgctgacgctgtcagacgagcacggcccggtggatatttatctgctgccgttcctcaagccggtgcaggtgcggcgttttttcccggacgaggacatcgaaagctatacggacgcgatggcggcggtgctccgcgcggcgaacgtggacacggcgcgccgcaatgtgctggtcgcgcaccagttcgtcacgggcgcggtgccctgcgagtccgaggagctttcggtcggcggcacggacaatgtggcggtctgcgtgttcgacgatttcgattacgtcgcactcggtcacatccacggcccgcagaaggtcggccgcgagaccgtgcgctactgcggcacgccgctcaagtattccttctcggaggtcggccacaaaaaatccgtcaccgtggtggagatgggagagaagggcagcgtcggcatccgcacggtgccgctcgtgccgcggcgcgatatgtctgagctgcgcggcacgtataacacgctcatgctgcgcgagaattacgagggaaagccgctccggaacgattatctgcacatcacgctcaccgatgaagaggatattccgaacgccgtcagcaatctgcgcgtggtctacccgaatctgatgcggctcgactacgacaatgcgcgcacccgtgcaggcggcgtcatcgagggcgcggacagggcagagcagaagccaccgctcaccctgttcggtgaattctacgagagccagaacggaacgccgatgagcgaggagcagcaggcgttcgcagacaagctgatcgcgagcatctgggaggaagaaaaatgagaccgctgaaacttacgctgtccgcattcggcccgtatgccggacacaccgagatcgatctggaaaagctgggtgagaagggtctgtacctgatcaccggcgatacgggcgcaggcaagaccacgatcttcgacgcgatcacctatgcgctgtacgacgcgccgagcggcacgaaccgcgatacgtccatgttccgctccaagtatgcgtctcccgaaacgccgaccttcgtcgaaatgacattttcctgcggcggaaaggtctacaccgtcaagcgaaacccggaatatgagcgtccggccagacgcggcagcaaaatgacaaggcagagagccgaggcggagctgcatctgccggacggcagcggcgtgctcgacaagccgaaagaggtcaacgcagccctcgtgcggatcatcggcctcgaccgcagccagttttcgcagatcgccatgatcgcgcagggcgaatttctcaagctgctgacagcggaaacaaaggaccggcaggagatattccgcaagatcttcaagacgaactgctacgaggtgttgcaaaaccgcctgaaggacagcacgaacacgctttaccgaaaatgtgaggcggcgcgcgcgagcgtacagcagtatatcggcggcatcgtctgcgcggaaggtgatatgctccgcgaaaaggcccagcaggcgaaggaggggaagctcccgtttgcggagaccgtggagctgctcgaaacgctcattgaccgcgacgaagcggaggatgcggcctgcgcacggcagtttgaggtgctggaggagaagatcggtgcggtcaatgcgcggcttatcaaggcggacgagcggggaaagatgcgcgaagcactcgaggcaaatcggaaacagcaggaggtgcagcgcgggaaggccgaacaggcgaaagcggcgcttgccgccgagcaggcgaagcagccgcagcaggaggcgcgtcagcgcgcgcttgccgacctcgaaaacgagctgccgcactatgctgagcttgaaaacgcggaaaagaaacgcctcagcctcgcttctgacattgagacgaaacgccgcgcgctcgtacagcaggagcgcacgcatcaggcgcagagcgcggagcttgcagcatggaagcaggagcatgagagccttgcgagtgctgcggctgaccgagagcgtctgcttggcgaaaggggccgcaggctcgaccgccaaaccgtgctcaaggcgctggcggaggatgtcgaggcgcagcggcgcggcgagagggagattgcggacgcggaaaaacagcttgcagtccgaaagcagcggcaggaagcgcttgcctcggagcttgccgcgcagaccgaaacgctgaaggcagaccgcgaagcgtgggagcagggcgcgggactggacgcagagcgcgaaaaactgcgcgcacagcaggccaaaacgcaggagcgtgaagctgaactgcgcacactgaacgcgctgctgcgcgagtgccggacggcggagcaggcggtgcttgcctcgcagcaggcttatctgcgtgcgcaggacgcggcggagcagacggacgcagcatacggcgagagccgccgcgctttctttgacgcgcaggccggtattctcgcgcgcgagcttgcggagggcgtgccgtgcccggtgtgcggttcggtgcaccatccggcaccggcgcaggcgcccggccacgccccgagcgaggggcagcttcgcgaagcggagcaggcacgcgatgcggcacagcagagggcgcacgcgaaaagcctggacgcaggcgcgaaaaacgccgccttcacggagaaaaagcagcagctgatcgcgcagatgcagccgtttgcggagcagccggcctatgaaaatgcagaggcgcagctgggtgtatgcgaggagaaggcgcggcaggagggtgcagatgccgcacggcagctttccgctctggacgcgcagcttgccgcacgcgaagcactggggcacagcatggagacacagcagaaggcactggagcggcttgccgccgagcaggagaagcagcgctctgcggcttcggcggcagaaaacctgctgagccgtctgcgcggtcagcaggagcagcttgcagaacggctcagccgtcagcttgcggaggccctgccgggctgccgcatggaaaacgctgccgcatacatcgccgccgagcgggcggagacagagcaggcgctcgcggcgctggaggcgcagctggcatcactcgatgcaggcattgtacgcaggaaaacgctcgcccggctcatcccgcagcgcgaaagcgaactgcgcggacaggagcagacgatgaatgctggacgggaggagctggcgcggacggaaagccgcgaaggcgcactcggagagcagaacgcaagactgcgcgatgggctgtcgttctcgtcggcggccgcggcggaaaagcagcggcagacgctggcagcggagatgaatgcggcggctgctgcgcggaaggcggcggaggagcggttcgaggcctgctgcaaggagcagatcgcgctggaagccggcgcaaaacagctggaggcgcagcttgcgggcggtgaggagatcgacgaagaggcgcagcggcagcagggcaatgcactggcagtcgagcggctttccctgctcgagcggcagcgcacgctccacagccgggcgaacaccaataagactgcacttgcgagcgtgcggaacaagtcggacgagctggaacggctggaacgggagtatagctggctgagcatgctgtcgcagacggcgaacggcacactttccggaaaagacaagatcacgctcgaaacctatatccagatgaccttctttgatcgtatccttcagcgtgcaaacggacgtctgctcgtcatgtcgggcggtcagtacgagctcaagcgccgcagcatatcggacaacaggcagtccaagaccggtctggagcttgatgtcatcgaccactacaacggctcggagcgcagcgtcaagtcgctctcgggcggcgagtcgttcaaggcctcgctgtcgctcgcgctcggcctttcggatgaggtgcagtccgcggcggcggccggaatccgtctggatacgatgttcgtcgacgagggcttcggctcgctcgatgaggagtcgctcgcgcaggccatccatgcactcagcagccttgccgagggaaaacggctggtcggcatcatctcgcacgtgggagagctccgcgagaagatcgaccgtcagatagtcatcaccaaggataaaaacggcagcggcagcagcgtgagaattatagtataaaaatcaggtttacatgattactgcaatcgcgcgatagcgcgtgtgaaatagcgtttgctgtgcaaatgcaaaaaaaccgaggacatgtgcctcggtttttttacactgagagggagaaagtttccgtatgggaactttcggacgactcgtgttctgcgttcgtcagaacacagcttgtcagcgaaacgtcagtttcgcgacatctcgtccggtatgtcaaaccagaacgcgatgccgccggggacgttctccgcgccgcagtcgccgtgcagcgtatctgcgatggcgcggacgagcgacagaccgatgccggtgccgccggcctcgcgggtacgagcgcggtcggtgcggtagaatttctcccagatcttcggcagctcatcctcgggcagaccctcgcctgcattgaaaacggtcaggcgcgtgcgcccgccgtttcggacggcggagatgacgatgcttccgccctcggcggtgtagcggatggcgttggacaggtagttcatgagcacctgctcgagcaggccgctgtccgtgcgcacggtgatgtgcgtgtccgcgcagtccacgctgaggtttttgctctcgcacagcacggcggtcttctgcaccgcgtcgcggcacatttcgtgcaggtcgatctcttcatagaatgtctgttccgcgccgagttcgagcttggacaggctgagcagctgcatgacaaggcggttcatatgaccggcctcgtccgcgatggtgtcgcagtagaacttgcggtcctcagggtcgtccgcgacacccgccgtcagaccctcggcgtagccctgaatgagggcgatcggcgttttcagctcgtgggaaacgttgacgatgaattcgcggcgcatattgtcgatgcgctccttttcgcgtacctcctgcgcaagctgatcgttggactccttgagctcaccgatggcctgctcgagataggcgctgagacggttgagcgactggccgagctgttcgacctcgtcggattcccgtctgcccttgccggtgtactgggtggaaaaatcgagctcgctcatgcggtcggcgagcgccgccatggagacgagcgggcgcgtgaactcgcgcgagaagaagaacgcgatgccgagacagatgagcagcgcacagccgccggcgatgagcaggaacaccaggttgagcgaggaattctgctcgatgaacgcgaacggcatataggcgataaggtagcggccctcgtccttgtcgagcgagccgatgagacagagatactggtcgttgtcgcgcaggctgatattggcaaagcggtactgatgctcggcgagcgaggaccagtcctcgttctgcatgaccgaggcgaggaccgcgatgctgcggaactgctgctcgttcatgccgaatgcaaagtccggcacggcatggtcgcctcggtcgtgcaggaaggaggaggtgagcaccgtgccgtcgtccatcgcgaccgccagacggatggccgagcggctctcatagctgtccagtacggtcacgatgtcgtccatatcgccgtcatagatgccgcagaccgtgtcaaaggcgtcgcacaggctgctttttcgcgtcatcatgaaatagtcctgataaaagaacagattgagcagcagcaggatgccgatgaacatgagcgcgacgaggctgatggctgagaagaacttgaatcgaatggaatgcggtttcagtttcatccttcaaagcggtatccgtagccgcgcacggtctcgatcatcgagccgcagcagccgagcttggcgcgcagctttttgacatgggtatcgaccgtccgcaggtcgccgaagtagtcgtagccccagacagcgttgaggatgctctcgcgggaaagcgcgatcgagcggttgttcttgaaatagatgagcagctcgtattccttcggcgtgaggtcgaccggctgctcctcgacgagcacctcgcggcgcagctcgttgaccgacaggagaccgatggtctcgaggggagaggctgcgcggccctcgcgcttgagcagggtgcgcacgcgcgcggcgagcacgatgggggagaagggcttggtgacgtaatcgtccgcgccgctctccagaccgcgcacctggtcggcgtcctcggcgcgtgcggtcagcagcatgacaggcaggtgcttttcgccgttttcctgctcgcgtatctcgcgcagcacctcgaagccgtccatgcccggcatcatgacgtcgagaatggcgaggtcgagcgtggggcggcggttttcgatcagctcgagcgctgctttgccgtcggccgcctcgaggatggtgtgtccgtcgcgcttgagaaagtcgctgacgagccggcggatgcgcgcctcgtcgtctgcgatgagtatagtagacataaaaattccgcctttgctatcgtttgttgcattgattatacgatttcaatttgttcgttgtgtgaacattgacataaaagggaggacgcagagagaaaaaactgcgtcccgtccatattattcctcgttttccagcacgtagcggtacagcgcgtttttctttacgcccacctcggcggataccgcctttacggcgtccttctgggtctgtccctgctcgatgcggcggcgcacagcctccgcggcggcggcaaggcgctcctcctcgctctgctcggtctccggctcgtcgggcgcgccctccacgatgaggacgaattcgccgcgcggcggattttcgtcaaagtagcgcattgcctcgccgagcgtcatgcggagcgtctgctcgtgcagcttggtcagctcgcgcgagagcgacagacggcgatcctcgccgaaggcggcggcaaggtcgcgcagcgtcgcgcacagcttgtgcggcgcttcatagaagatcatggtacgcttctcgccctcgagcgcgtccagatgctcgcgccgcgcctttttattcacggaaagaaagccctcgaagcaccagcggccggtcggcagaccgcttgcggcgagcgcgcagaccgcagcgcagcagccggggaccgggatgaccggaatatcgtgctcggcgcacagcgcgaccagatcctcgccggggtcggagacggccggcgtgccggcgtcggtcacgagcgcacaggtctcgccgccgagcatccgctcgagcacgacttcaccgcgtgcgcggcggttgtgttcataataggagatcatcggcttgcggggaagctcacaggcggtcagcagcttctgcgtaacgcgcgtgtcctcggcggcgatgaaatcgaccgtgctgaggatttcgcgtgcacggggagaaagatcgcccagattgccgatcggggttgcgactaagtagagtgtagacatggtggaatccctccgggatcgtcagaaatgaaatgattacagcggacaggcgtttttcagtccgagctgccggttttgccgtagattttcaggtattcctcgctctcgaccagcagcggcggctctacgctgaggccctctgcgctgccgcccttgcggcattcgacgagcacggcgctcggaacggcgagcgcgttctgatggacgaagcgcaggcgcttggggacgagacggacgcggctgagcgcctcgagcagcacccacagccgttcgggacggaacacaaaggccgctttgccgccggtgtgcaggacaaaggacgccgcgaccgcgacctcctcgaccgtgcagcagatgtcctgccgggcggtgcgcttttcggccgaaggggcggccgcgccggtgttccggccgaagtaaggcggattgcagatgacgtaatccatgctgccgtggggcaggagcgtgcgcatatggcgcaggtcgccgcacagcgctgtgacgttttcgagccggttgtgctcgatcgagcggcggaacaggtcgagcgcgtcctgctgtatctccagaccggtcacggtgaggtcctcgcgccagcagagcagcgcgagcgcgccggtgccgcagccgaggtcaaggaccttggcgcgcctgcgtatcttcgcgaaggcggagagcaggacgctgtcctgaccgagcttgaaaaatcggtcgtcctgtaaaagcgataagccgttcggcagaatttcggtcgtctgcggcatgaagagcctcctcataaagataaaggaccggccttgcggccggccgtgggtttgcggtgttactgcttgttttcgatgtactccctggcgtgtgccttgagcttttcgaaggtctccggactgagaacgtgctcgatgcggcaggcatcctccgcagcgatctcgtgatcgacgccgagggcggtcagaaatgccgtcagtacggtgtgacgctcgtaaatggtctctgcgatcttgagacccgcctcggtcaaaccgagcagaccgttctggtcgatggaaacataaccgttatcgcgcagcaggccgactgctcggctgatgctgggcttggagaagccggtataatgcgctacgtcgatcgagcgcacctgaccgttcttctgcatgagaacaagaatagcttccagatagttttccgcgctttcctggatcttcaaagtgcacggccccctttgttgtagattttccgccgtgtgtgcggcggttcacattcatatttttaaacagtataacatgaaaacgatttttttgcaacacagccggagcagaacgctcggaatcgaaattggcggctgttccggacggtcttgcggaggaaggagcagtatgataagataaagacagaacgcagggaaggggagagaagtatggcatcgagcagggaatatctggagttcattctgggacagctttccggcctcgaggagatcacgcaccgcgcgatgatgggcgaatacatcctttactatcgcggaagggtcattggcggcatttacgacgaccggctgctcgtcaaaccggtcccggcggcagtcagccgcatgccggaggctccgcgtgagctgccgtatgagggcgcaaggccgatgctgttcgtcggggacgtggatgacagagagtttctggcggagctgatcggcgcgatgtatgaggagctgcctgcgccgaagccgaaaaagcgcaggcaggcgttgcaggaacgggagaaatgatgtaatctaagagtagcgaaaaaacacaggcagcaccgctgtgcggtattgtcaatgagcggatcggagtataacaaacatgaagatattgcataccacaccgtcacaggacgggttttacatgccggcggagttcgcgccgcacgagggctgtctgatgatctggccggagcgcggcgacagctggcagtacggcgcctatgcggcgcgcaaagccttcctgcgcgtcatcgagaccatttccgagagcgagagcatgaccgtgctgtgctcggagggacagtacgacaacgcccgcgcacagcttcccgaccgtgtgcggctcgtcgtgatggcgacggatgacgcatgggcgcgcgacgtcgggccgaccttcgtcgtaaacagccgcggcgagcgccgcggcatcgactggggcttcaatgcatggggcggcgacgcagacggcctgtatccctcgtgggagaacgacaaccgcgtggcgcgcaagttctgcgacctgcttggggacgacgtttacgataaacgcgattttatctgcgagggcggctccatccatacggacggcgagggaacggcgctcgttaccgaggcgtgtctgctgagcaccggccgcaatcccgacctgacgaaggcggagatcgagcgggtgctgtgcgattatctcggcgtcagcaaggtgatctggctgccgcgcggcatttacaacgacgagaccaacgagcacgtggacaatgtctgcgcgtttaccgcgccgggcgaggtcgtgctcgcgtggacggacgacgaggacgacccacagtacgcgctgtcggcggcaagccttgccgtgctcgagaccgagctcgacgcgaagggccgccgcatcaaggtgcacaaactgccgctgccgaagccggtcacgatcaccgcagaggaatgcgaaggacttgacctgtgcgagggcgagccgacgcgcacgccgggtgagcgccttgccgcaagctacgtcaacttctacatcgcgaaccacgcggtcgtgatgccggcgttcggcgatccggccgacgagcgggcacaggagattcttcggaagctgttcccgacgcgcgagatcgtcgccatcccggcgcgcgatattctcatcggcggcggcaatattcactgcatcacgcagcagatcccgaaaaaataaggagcagataacatgagtaaagtaaccgttgcagcggtgcagatgacctacggtctggaaaacgcgatggaaaaggtgcgcgaggcggcgtcgcagggcgcacagatcatccttctgcccgagctgtttgaaaactggtatttctgtcaggaaagaagctatgaaaactatcatctcgcgacaacgctggaggaaaatccggcggtgcgcgagcttagaaaggtcgcgcatgattttcgcgtagtcctgccggtcagctattatgagcgcgtcggcaataccacgttcaacacggtcgcggtgatcgacgcggacggctctattctcggccagtaccgcaagacccatatcccggacgaccatttctatcaggaaaagttctatttcaccccgggcgacaccggcttcaaggtctgggacacagcctacgcgaagatcggcgtcggcatctgctgggatcagtggttcccggagtcggcgcgctgcatggcattgatgggcgcggagattctgttctacccgaccgccatcggctcggagcccatcctcgactgcgactccatgccgcactggcgccgctgcatgcagggtcatgccgctgcgaatatcatgccgctcatcgcggccaaccgcatcggcaccgagaccgttcagccgagcgaggataatcagcagcagtcctcttcgctgaccttctacggctcgtcgttcatcgcggacgagaccggcgcactcgtcgagcaggccgaccgcgaaaacgagggcgtgctcacgcactccttcgacctcgacgccattcgcgagatgcgccactcatggggtgtattccgtgaccgccgtccggaaatgtacggcgcgatgcgctcgttcggccggtaaaaacatacgcgcagctgcccctgtccgttttttggacaggggcagctttatattgccataataagaataatatattccttcgaagtgcgttttttcttccggcccgagggtgtagtttcacgctcttaacggcctgttcagatgaaaaacagtaaaataatgtgcatgacaataaaaacgcacagtttgcacgagattagttttgcttttttcgtacaaaaccacgggcatttttcgcgttttttaacgtgctgttttgaaaaaaagatgtataatagtatacgtgattgaggagagcgtcagcggcacaggagactgccggtgcaccgctctcagggtaaatgcacggccgagagaaacaaacaggctgtgcgcgagtcggcaggccgcagaggaacagagatggccccgccgatagaatggatagagaggcagacggttcaccgccgccgcttctcaggcagaaaggtggaaaaacaatgtcatacgattatcttttgacgatagcaattattttgctgtgcacgaaaattttcggtctgacgagcgaacgagttcacatgccgcaggtcgtcggcgcactgattgccggtgttctggtcggtccgagtgtgctcaactgggtgggcgagactgacttcctggtcaaggcagccgagctcggcgttatcatcctgatgttcaacgccggcatggataccgatctggaggagctgaaaaagaccggcttcgcctcgttcatcatcgccatgatcggtgttgtcgtgccgcttctcggcggcatgggctgctatcttgtgttcgacaacaacccgagcgataagatgaacatgctcaaggcggcgttcatcggcgtcgttctgaccgcaacctcggtttcgatcacggtcgagacgctgcgcgagatgggcaagctgaaaagccgggtcggcacagcaatactgggcgcggccgttatcgacgatattctgggtatcatcgttctgaccattctaagcgcgctgaccgatccctcggttcgtccgatgttcgtgctggcgcgtatcgtggcgttcttcgtattcgttgcggtcgtcggccttatcatgtacaaggcgttcctcaagatggagcagaaatggcataagcaccgccgcatcgcgatttatgcggttgcattcgccctgctgatgagttacgttgcagagcgcttcttcggcattgccgacatcaccggcgcatatttcgccggcatcgtcctctgctcgctggctgatgttcgcgactatgtcgcgagcaagaccaacgtgctcggctatatgctgttctctccgctgttcttcgcgtccatcggcatcaagaccaatctggagggcctgaccgtccagatgttcggcttcgcggtcgtgctgaccattatcgcgatcctgaccaagatcattggctgcggcttcggcgcaaagatcatgggcttccagatgtacgacgccttctccatcggcctcggcatggtatcgcgcggtgaggttgcgctgatcgttgcgcagaagggcgagcaggccggcctgatcgacccgcatatgttcccgccgatcgtcgtcgtcgttattgttaccacgctcgtcacgccgatcctgctcaagttcggcatgaagaagcagaccccggcgaacactgagttctccgcgcaggaagccgcgaacatgcccaagaacagccgtttctaaagactttcgcgaaatgttatctgaggaccgcacactgtgcggtccttttgcttgccgacggccggagaatgtgctatactgaacacggtattgcctgctgcacgcggcggcaggaaaacgagctttttactggaggaaaaaccaaatgaataaaacgaagcttctgccgctggcagcagcggcgctcgcaatccccggtatcggtctgcgcgcgctgcatctgctgaacggctttgatgttgacagcggtctgccgacggcaggcagtccgtgggtatgggtctgcaccgtattcttcgtgctgtgcgccgtgctgtacggcgtacttgccgcgccgctgcgcgagaaggaaagcgtgccgtttgaaaagctgctcggtacggatcacgcgctgtttcgcatgacagccgtcatcgccggactgctgctcatcgccggcagcgcaggctatctctgcttcacctttaccgcgcaggaggaaggcgcggcgctgtggtcgcatgtactcgagatcgtctactcgatcacgggaatcggcagcggcgtgtgcatgatcgccttcaccaaggcgcagggtgcgtcctacatgacgtcggatgcggcgaaatgcgtgctgctgccgctgttctggagcgcgctgcacctgctcgtcaactaccgtatgacctgcaccgatccgcgcctgccgctgtttgcgttcggcctgctcgcggacgtcatgctcgtgttcgcgttctatcacatcgcgcgtctgctctacggccgtccgcagccgatgctgctcgcgctgtccggtgcgctcgcggcagtcatgtcgttctccgacctcggcggttacggtctcgctcgtctgatgggtgtgacctcggtcgcgtggccagccaagatgctgctgcgcagcggcctgtcggcggcggcctgcatctatgtgctcgcgcagctttttgtgctgtgctcgaaaaacacagatcacgcggaatgaggaggagaccatatgctttttgtatgctaccccaaatgctcgacctgtgcaaaggccagaaaatggctggaagagcaggaaatctcctttgaggagcgcgacatcaagacggacaacccgaccgaggcggagctgcgcgactggcaccgccgcagcggtctgccgctcaagcgttttttcaatacgagcggccttcagtacaaggcgctcggcctcaaggatcgtctgcccgaaatgagcgaggacgagcagtacgcgctgctcgcgaccgacggcatgctcgtcaagcgtccgctgctcatcggggaggacttcgcgcttcctggcttcagggaaaaggaatggctggagaagctgaacggataagcaccgttttgcccggagcacaagctccgggcagtttcttttcagatattcgcaaaaaagagttgacataagacgcctgatactgtataataaatcttgcttatcgggcaagacacggaacggtatcgaagcggtcataacgaggcggtcttgaaaaccgtttgtccgaaagggcgcgtgggttcgaatcccacccgttccgccaaatttttctgcggaaacaacgggcaggagattgaacgacaactgcataacttgacatggagacgtacccaagctggtgaaggggctcccctgctaagggagtaggtcgagaaatcggcgcgagagttcaaatctctccgtctccgccatataaatcctcgtgatcgtaagatcacggggatttgttgcgtttgcggaaaaatcctgcgcaaaaaatcgtcagttagacgaaaaaatcatttgaattcgtgcaaactgcgaaaaaatcccggcgcggaagcgccgctttttgccgcattcccgaggcaaaatgtcggaaatgtacggaaagccctgtccgaacgggagaaagcagcaatccggtttgtcactttttacaggttgaattttacataaacttgacatttctctgattttcgtgtataatttcgcacttgtggaagatagaatttacgacttgacatactgtgaaaaatcggggagaaatgtatgaaaaaactcattttatccttagcacgcctggtgaaaaatcttgcggcgcaggggaggactgcatggaagcaggcgagccgctgccgcagggagcggatcctggtgctgctgatctcgccgctcaccgcgttctggctgatgcagttctttttcggtgcgatgccgtgggagatcaatcccggcgcggcgctcgcgaactggatctgtctcggcgcggtctactggctcgcgtgcggcctgttcggccatgtggcgcggttcagcgtgctgctgcatctgctggcaggcgcgtggggcacggcaaattattttgtctcgaacttccgcggcacgcccatcctgccgtgggacttctccgcactgggcaccgccgcagctgtcgcggacagctatcagtttacggtgacctgggagatggtcgtgggcgtcatcctgctcgtggtgctcgcgtggagtctgcgccatcagtacggtgaggaccgcttccgcgtcgcacccggcggcttccgccgccgcatgatgatggtgctcgccggtgcgatctgtctcattccggtgctgcatccgcagctgctcggcctgttcggcgtcaagaccgacgtctgggaccagacgagcgtataccgctcgagcggcgcggttgcggagtttctgcgcaataccgagtttatggaggtcgagcagccggaggacacgacaccggagaccgtttcggctatcgtgagcggagcggaagccgatccgctgcccgcggtttcgacgcagcacccgaacatcctcgccattatgaacgagtcctgggcggatttcgaggatttcggcaacataacactgagcgagagcacgatggattacatcaaaagtctggataacgcggtcgtcggccatgcctatacctctgtgttcggcgcaggcacgagcacgagtgagtttgagtttctgacgggcgattcgatggccttcctgccgtcgggcagcatcccgtatcagcagtacatcctcggcgcgtccgactcgctcgcgacgcttttgaagggatacggctacgaaacgcgcgccttccatccgggcgaaaagacctcgtggcagcgcaatatggcatatccgcgccttggctttgactcgttcaagtgcggcgacgatatggatgttccgcagaccgacgagcacggctacgtcagcgatgactcggatttcaggcaggtcatctgggagttcgagcacaagcaggagggcacgccgcttttcctgttcaacgtcaccatccagaaccacggcgcgtatacggtcgaggattatccggccgaagtgaccgtcgaggatgcaccgggcgcgtatcccaaggcggagcagtatctgactcttgcgaacaagaccgacgaggcgttccgtcagctcgtcgagtatttcgagcagcagaccgagccgaccatcatcgtcatgttcggcgaccatcagccgtcggtcgaacaggaatttctcgacatggcctacggcgtctcggaggacggcatgaccatggagcagtacatggataagttcaaggtgccgttcgtcatctgggcgaactatccgctgaccggcgaaaagccgggcatcacgagcctgaacttcctcgcgcagtacgttctgcgcgacgcaggcatccagacgagcgcgttcggctcctatctctggaatttgacgaagaccattccggcgatgacgtttgccggctatttcgacagcgagggcaacgcatacagccacctcgagacgacagaaatgaccgacctcatcagacagtatcagaccgtacagtataacgagctgttcggcggcacagacaggcagagcagcctgtttgcggcgccggtctcataaagaagaaccccgctgcggtgcataaaaccgcagcggggtctttgccttttccggcccggactgagaccggaaaacgaaaaagggaggtattaggttagggtcaggcttcaagattgagaccggtctcgcggtcgaacaggtgagcggtggcgccgctgaaggtgaacgaaacctccgagccgatggcgtaggcgttcgcgttttcaagatctgcggtcggcacgatgatgatggtatccgtgccgcaggcggagatgtggagatggaccgcgctgcccatcatttcgctgacgttcactgtgccgcagaccatcgcgttcgggtcgccggtgagcagcaggtgctcggggcgcacgccgagggtgacagggccgggctttacgccgttcttcttgagctttgtctgcttctcatccgagaggaaaacctttgccctgtcgaggacgacggcataccttccgtcctcctgtacgagctcggcgttatagaagttcatctgcggcattccgatgaagccggcaacgaacaggttcgccgggtggttaaagacctcctgcggcgtgccgatctgctggatgagaccgtccttcatgatgacgatgcggtcgccgagggtcatcgcctcggtctggtcgtgggtgacgtagataaaggtggtgtcgatgcgctggcgcagctgaatgagctcggcacgcatctggttgcggagcttggcgtccagattggacagcggctcgtccatgagcaggaccttgggttcgcgcacgatcgcgcggccgatggcgacgcgctgccgctggccgccggagagcgccttcggcttgcggtcgaggtactcggtgatgccgaggatgtttgcggcctgtgcgacgcgctgcgcgatctcctccttgggaaccttgcgcagcttgagcggaaacgccatgttctccgcgaccgtcatatgcggatagagcgcgtagttctggaataccatcgcgatgtcgcggtccttcggcgcaacgtcgttgacgagcgtgccgtcgatgtacagctcgccgcccgagatctcctcgagacctgcgaccatgcgcagggtggtggacttgccgcagccggacgggccgacgagaacgataaactccttgtccttgatggaaagattgaagtcatgcacggcgagtacgccttcgtcggtcacggtgaggttgctcttgcgctcctccgcgccctttttcttcttctttttgccatcctgatgcggatagacctttttgatgtttttaaggattacttcagccatgtcttgctccttctcttgtacatcggcggacgctcagggaagataacggacgcttgccgcgccgtccgcacagatggtgaattcgagtgcctggtgggatgaaatggactgaccgtccacggggggacagtcggaaaagtaaagttcggcgccgctgtccttcagcaggcgcatggtgtcagggtgagcgctgttgtagcggcggtcgctcgatgcacagcagacggaaaaccgcggtcggactgcgtttacaagcgccgcgtccgcaccgtcgagctgaccgtgatggccgaccttgaagaggtcggcggcgagcttttcgggcggtatgccgccgtagccggcgcggttggtgtcgccgggcagcagaatgcgggttttgccgaacgtcagccgcaggatcaagctgaaattgttcatcgaggcgtcgagcgcgtccagcttttcgcggaattccggcacgccctgcggcgtgcggtaaagctcctgcatggaggcagtgagcgcggcggcgcgcgtctccgacggggcgagtacctcggcggtgagaccgggcgcgagcgtcagcgtatcgcccgcaaggctctgctcgatgcagccgccatgctgctcgacaagggcgcacagcttccggtagtcatcgagcgccgcgagaaaattgcgctcggacagattgcgcgcggaggcgtcgccgagcgggtgaagcgagcggtaaaaaccgggcggcagggtctgccgcagcacagcgggaggatgatcgcggcacacgcggagcagaccgcagagatgatcctcgtggatatgcgtactgaccgcgaggtcgagccgcggaagcggggcgagatactcctctgcgcggatgcggccgctcgtgcggtcggcgaactcgctgtccgcagcgctgccgccgtcgatgagcgcatagaagcgtccgtccggccgggccgcgtccggggcgttgatgagtatcgcttccccgtagcccacgttgatgaaggtgagccgtaattcggtagtatcctgtttcataggcagtcaggagatcgcgcgtttgatgtaaacgctggaaaggatgagaaccagtatggtcatgacgatggcgccggcgctgccgaagccaaagtcgagcgatttgatgccgtagttgtagaggtactgcgtgatggtggaggtgctgttggcggggccgccgccggtcagcaggtttaccttgtcgaacagacggaagctgtcgatggtgcgcagcagagcgcagagcgcaaggctgtttttgatgttcggaatagtgacatagaacaggattttgaacgagttcgcgccgtcgatgcgcgcggcctcgtactgaccctggggaacgctctggagcgctgcgtacagcagcaggaacacgaacggtgcgctctgccatacgtcgatgaggacgagcatgccgaacgccgtgcgaatatcggaaaaccagttgaagaccggcaggtggagcgcctgcaggacctgattgacgatgccgtagttgggggagagcatcatgcgccagctcagcgctaccgtaacggtcggcagcagataaggcagcagcagcagggtacgcatggttttctgacccttgtgcaggctgttgacgaacagtgccattgcaaagccgatgagcatctcaaaaataactgcaaagatggtgaacttgacggtgttccagatggactgctggaaatagggatccttgagcagcttgacatagttctggaaaacagtgattttggccggcgagcgcagattgcgcagcaggttgtagttggtgaagctgtagaagaaggtaaagatgagcggataggccgtcatgatcagcaggatgacgacggtcggggaaagcatgccgacaccgaagcgtttggtctggccttcggcggtattgagtttggtgtgggttcgtttcataattctggcctcgcaattccgggaggttgaggaaaaagtcagccgggtgcagcggtctgtgagccgcacccggctgctcttcatccgttagtcgaggcgatacgcctcatagaaagggaggggagatggggcatcagcctgccatcagcgtctccagctgagactgtgcgtcagcaagtccctggtcaacggtcttgacgccgttgatgatattgtccatttcggtgccgaggatggtgtagaactgggtccattctgcgatgaccggacggtaaacgccgccttcaagcgccttgcatacgacttcgtactgcggataggtcttgaggatctcggggtcctgcaggctggagtaacggcacggaacgccgcccttgtctacggtagacttctgaacgtccttgtccatcaggtaggtcagcagctcggctgcgagctcctgattctggctgttggccgggatgccgatggtccagatgccgtaaacgttcgcgttgtgggtctcgccgcccttggatactgcgccggagagggcgatgtagtccgcgggggaatcagcagtcggggtgtaccagcccggccagccgacgcccatggtgccggcgccggtgtcgaccgatgcgatgaggtcatccttgacctgtgcttcgccggtagcgatgagcttgaggtagaaattcatggcgtccttgaattcctgggtgttgacggtcggcttgttgctgtcgtcgatgacccagccgccatagctcagcaggatcggcaggaagtcgactaccgtgttgttctggctgtcgccgcggtagatgaagcccttcttgccgtcggcctttgccttttcgcagacggcgagcacgtcgtcgagcgactcgatggagtctgcggtgtagcctgcggctttcacgttctccttgttgagcatgaggacggtaacgttgccgtagtagggagcgaggtaaacgtcgtcgccgacatagcagatcgaggtggtcgccgggatgatgtcgtcgtcgagctcgtagccaaggtcggacaggttggcgagcacgccgttttcggtgaactcggccatccacgagccgtctaccatgcacaggtcgtaggaacccttctggttgatggcgtcgagggcgatgccggaatacaggtcggactcggaaagctcctgtacctcgcattttacgttgtgctcctcttcgaacttagggaggcactccttgatgacgtctgcatatgcgcctgcgcgcaggatgaggttgagcgtggtgggcgagccgtcggacgagccgctgccctgcgtgtcggacgagccgccgccggagccgcatgcggtcatactcagtgccattgtagctgcgagtgcgcctgcgagtaatctgcgtttcataaattttttcctccaatcttgtaactctcaaaactctctctgtggatcggtgcggcgaagccgcggtattgttattctttgacagcgccgcttgacagtccggagatcaagtagttctgcgcaaagatgacaaacagggtgatcgggatgaccgagatgacgccgcctgccgcgacgagaccaaagttcgtgaggttatcctcggtgttgagcagggcgagcgcgaggggaacggtgttgttggccgggatgcgggtaaagataacggtgtaggtgtattcgttccaggcatacatgaagctgagcatggagaccgccgcgatgccgggcgccacgagcgggagcacgatcttgcggaacagctgccactcggtcgcgccgtcgaccttcgcgctctcctcgatctcctcgggcaggtcctggaagaagctgatgaggaaccagatgatgagcggtacgttgatgagcacgcaggcgagcatgacgggcagcttggtgttcaggatacccagacggttgaacatgatgtagagcggaatggtgaaggctaccgggggaagcacgcggacgagcaggacccagtaggtcatcggctttttcaggccgaagcggaagcggcggcgcgcgatgacgtaggccgcgcagatgccggcgagaagcgagatgatgagcgagccgaacgtggtctgaaggctgttcatgatcgcctgaccgaagttttccgaggtgaacagctgcgcgaagtgcattccggtgagcgactgcgggataagagcgatatggcctctcatctcgtcggtcggacggatcgccatggcgagcagccagtagatcgggaacagcgagatcatcagcagaactgcacatccgactgccttcgcagccgttccgatcctctttttacgtttcacatgatctcctcctttatcgagcaggaaagcgtctcctgcatcattacaatcttatggacgaagcgcgcgtgcgcagcgagacgggaacgaccgtcagccggggcacttcggtgtcgccgctcagcagggcggtgagctgttcgagacagatctcgcccatcctccggcagtccacgtgcaccgaggaaagctcgggcgtgagcagcgtgcaggaggaggaatcgtcgaagccgacgacagcgacatcatcggggacgcggagtccgagccgggtcgcggccttgatgacgccggcggcgagtacatcattgaacgcgaataccgcggtcgggcgttcggggcggcggagcagctcgacagatgcctgcgtcgcgctctcaacgtcgcggccgcacatcacgatgcccgagtcatctaccgagatgccgtgctcctgcatggcggtgaggaaggcgttgtagcggacgcttgtgatgtaagaggaaaaccgtccggcaaggagcgcgatgcgccgatggccgtaggcggtgaggtggtcgatgacctgccgtgcgccgttctgctcgtccgcgaccacgctcggcagctcgaagccgctcgcgcggtgattgacgagcacgactgcgacgccctgccgctgaaagctcgaaatgagggacggctcggcatcgcctgcgaggatgacgccctcgatctgcttgctctgtccggttcgctgccagtcggcggcggtcgagatgagcagctggtaggaggtgctgttcgcacgccgcatcacgccttcgcagatgctcgcatagaactcgtcgaggatggtcgcgtcctttttgcagatgaggaacgcgatcttgtcggtctgctgccgcgccatggcccgcgcgatcgcgctgggctgatagccgagcgcctcggcggcggcgaggaccttgcggcgtgtttcctcgcggacacggtcgggcgcggtgaacgtacgggaaacggtcgcggtggaaacgccggagagacgggaaacatcgtatatcgttggggtatccataattcgcctcccttgcaattctatgcaaacgcttacattgttttcacaaattccagccggaaaagattcggattttcatttcctccagcttgacttcagcatagcaccttgccgcacggtttgcaagaggaaaacgacattttttacatacaacgtcattttatcaccagtgttttgtgcagtattaacaaataattaacgtaaatcaagttcgcgtaaagcgggcgggcgtacatggattccgcaacgtattgcggaaaatgcaatgtaagcgctttcgtaaataaaggaaaaaacagaaaaaatgaaggtaaaaaatgcgttcccgcgcacgcatcacggtgcagcagtccgccgccggcacgctccgaggagaatgcctttactcagcaggctgagcgtgatacaataaaaaagaacaaaaagcaaatgctgcggcgaactgccgcagcagaaaaaaggggaggagaaagctatgctttccaacaagagcaaggccatcggctatatcatgctctcggcgttcggcttcgcgctcatgacggcgttcgtgcgcctcgcgggcgatctgccgttcacacagaaatcgctgttccgcaatctggtcgcggtcacggtcgcggcgatcgtgctcagacgcgaaaaatgcggctttaagtgggagaagggcaaccttcctctgctcatcctgcgctcgacctgcggcacgctcggtatcttctgcaactattacgccatcgaccatctggtcctcgcggacgcgaacatcctcaacaaaatgtcgccgtttttcgcgatcctgttctcgcttttcctgctcaaggaacgcgcgaatatctggcagtatctctccgtgctcgcggcgttcggcggcgcgatgctcatcatcaagcccggcttctcggcggacgcctttccggcggtcatcggtctgctcggcggcatgggcgccggtgcggcgtatacctttgtccgcgcgctgagcaagcggaaggagaaaagcgcgcgcatcgtgttctttttctctgcgttttccacgctcacggcgctgccgttcgttattgcggacttccacccgatgacgttcgcccagttcatgtgtctgatgggcgcgggcgcggcggcaacgctcggccagttcggcgtgacgctcgcctatctgcacgccccggccaaggagatttcggtatttgattatacgcaggtgctgttctccgcaatcctcggctttttcatgttcggccagataccggacgggctgagcgtgctgggttatatcgtgatctgcggcgtatcggtcgcgatgttctgctataaccgccatctcgatgcaggggagaaggcatgacggagtatgaactcgtccgctcgcggcggaaaacgctgagcgtgcaggtgacgcgcgaatgccgcgtcatcgtccgtgcgccgctgcgccttgcaaagcgcgagatcgaccgctttgtgttcgagcacgcggactggatcgcgcgtgctctcgcgcatcagcgcacgcttgccgaggcgcatcccgagccggatgaagcgcgggcgcgtgcactggcggaacgtgcggtgcgcgaaataccgccgaaggtgcggcactactccgcaatcatggggctgcgtccgaccggcatccgcatcacctctgcgcggacgcggttcggctcgtgcagcgggaaaaacagtctgtgcttttcctggcggctgatggagtaccccgaggaggcggtcgattacgtcgtcgtgcatgagctggcgcacatcgttcataaaaaccacggaccggatttctgggcgctcgtcgggcagtatatgccggattacaagcgccggcgcgcactcctgagaaaataggctgcgccgaaaaacgccgcagtttttgacagcagaaaaagaccttccgcagcggttcaaaaccgtgacggaaggtctttttttatgctttttctgcttgtgggagcacaagtccgagcaacagaccggcggtggcaggcaacagccatccgaagccgagagaggagaacgggagcgcgttcgcgagcgcggaaagcgggccgagcggcagggcggcgcacacgctctggaccgcggtgcaggcgatcgtgagcggccagacagcggactttttcgcggcgaagggggcgaacgagagcgcgatgagcacgatggcgatcggataaacggcgttcaggaccggcgtggacaggcggatgatgccggcaaggccgagattggagatgagcatgctcgtcacggcgaaaaaggccgcaacggcaggataggggagatgcatcagctcgtgaaaatactggccgacggacgagatcaggccgacgcaggtgttgaagcaggcaatcacgaagatcgccgcgagcagcatctgaccgccccggccgaacagaccgagcgcgaggctggtcagcgtgtccgcgccggtcgcgccgccgggaaaggccgcgccggacagcgcgcccgcatgggtgagcatggaataaacggcgagcagcagcgccccggcgatcagaccggcggagatcgtgccgcgtcggacctcaccttcctcatcaatgccgcgcgtgcggatattgagggcgatgaccgcgccgaagttgagtgcggcgagtgtgtccatcgtctgatagccgttcagaatgccgctcagcgcgggcagggactggtattcggccgccggggaggcataatgcggcgcgaccggatgcacgagacagctgccgaacagcacgaggatgagaacgatgagcgttgggcagagcacgcgcccgagacggtcggtcagcttttcgggatggagcgcgactgcgaacgctgcggcgaagaaaaccgccgaatagagcagctgatgactgccctcgctgccgatgaacggcgcaagcatctgaaacgaggtgctcgccgtgcgcgggatcgcgaggcagggtccgatggacaggtagatcagcatcgtaaacacgagcgcgaagcgcggatgcacccgcgaggcgagtacgcccagacttccggcgcgcgcgaccgcgatgacgccggcaatcggcaggccgatcgcgctgaccgcgaagccggcgagggccgcccaggcattctgtccggcctcagcgcctaaaaacggcgggaatatcaggtttccggccccgaaaaacatggaaaacagggtaaagcccacgagaagcaggcttttgccgcgaagtttatttgacatggcgatcctttcctgcggcagcgaaacaggtgatgctgccggtaaaatgttcatacagtatacccgatacgggagaaaaagtaaaggaaaaacacaaaaatgtataaaattacatcccgttcagcaaaaatacagaacgggatgcggcgttcagccgggacaggccgcgcagaggtccgcctgcgtcggcatgacagcgcccctgtgctgaacggtgagcgaggcgcagcgtgcggaaaagcgcaggtattctgcgagcgtctgctcggaaagcgaggcaagctcgtctgcggaaacgccgtcgcgcgtcagctgatagaggaacgagccgatgaacgagtcgccggcgccggtcgtgtccgtgacgggcacagagatcgctgcggcctccgcatggcaggacggcgtatacgccgccgagccgttcgcgccgcgcgtcacgaccaccatgcggacgccgagggcgaacagcttttccgctgccgcccgttcgtcggcgcagccggtgacgaattcgatctcgtcatcgctcagcttgaccagatccgcacagggcaggaactgccgtatcgccgcctgacagtccgccggactgctccagagcggcaggcggacgttcgggtcgaaggaaacgaaggctccggcctgctttgcaagctcgatggcgcgccggtgtgcgccgcgcaccggataatcgaccagatcgaccgagcagaagtgcaggaccgcgcagttttcgaacatttcgggcgtgatctgtttttcgtcaaggaacaggtcggccgagggattgcggtagaaggagaactcacggttgcccgccgcgtcgagcgagacgaaggcaagcgccgtattggcgcgatccgtgcggaaaaccgaggaaatatccacatttgccgcgcgtagaaccttgaggatgtgtgtgccgaaggcatcctcaccgacctgcgagatcattttcgcctcgctgccgagccgcgcgactgccgttgcaacattggcgggcgcgccgcctgccacacgctcgaactgctgcacctcgtcgagcgcgcagcccttctgctgcggcacgaagtcgatgagcagttcaccgatcgcaactgcttttttcatagcttttcctccagaatatagcgctcgatcgcctgtgcgacgccgttttccgtgttgcttccggtcacgacatctgccgtcagacgaacgttttttctgctgtttgccatcgcgatgcccagtccagccgcgcgcagcatggtcagatcgttgtcgctgtcgccgatcgcagccagattttccatcgtgcatccgagctcctttgcgagccagcgcagtccctgccccttgttcacgccgcggcggttgatctcgatattgtgcagctcgccgccaaacatcacggacggcgcgatctcaaagctgcccatatgtttcaggcggctgatcagcagatcggaaatatcgtgcgagggatagaggacggcctttgtgaacggaagcgcctcgttttcgagcgccttcagccatttttcatggctgtccagataaaaatagccctcgtccgcctcgttcatgacgatctgtccgccctgctccagatggcgcagaagcgcacggaatgcgccgccgtagtacagcgactgcgtggtatacaggcaggggtcggtctcaaattcctcgcagagcgcaagaatatcctcgcagtgcgtcaggctcagaccgctgaaaaactgcggctctgcatcccgcggccgctgtacggccgcaccgctcgaggtgacgagccagtcgggcggcgcgagcagctggtcgctgaacgcacgcacctcgcgcacatttctgcctgtgcagagtacgattcgaacgccgcgctcctgagcgcggcgcactgcctgtgcatctcggggtgagacctggtttttctcgttcagcagcgtgccgtcgaggtcgagagccaggagcttgtactgattaccgggaaatgccatccgtgatctccattctgtttatactccagagctgtgccgtaccgccgtccagaacgacgccgcgcgcggccgggtcgggataatagcgcgtcgtgagcacagtctcgccgtgattgataaagatttcgagcgacgaggcatccgcgaggatgcgcatggtctgcgcctgcgtccgggcatagcgtaccgtgcggcctgcaccgctcacgccgccgagcgacaggatgacctcgtcatcgctccattctaccacagcggctccgcgtatgacaagccttccgggataaaaaattcgcagttccatgtcgaaaatatgcgcgttttcgggagaaaccggcttttcgcacagctgctccagctcctttacgggatagcggcgcagtctgccgccgcgctgtgtcagctcgcacggtacagtcaggcagtgctgccagccgcacgcgacggtcgcgggattgccgtagggcgcgtccggcatgcccatccagccgaccggcggcgcaaggtgaaaatacggccggtacgggtcggcggcggcaagcggcgcgtcctcgcgctcgatgcgtgcaacgagacgggaaagatcgctctgcaggtcgttcggcacgggaagaacctcctttgaaatgaaaaaaagcggctctgtgtgcgcgaaaacagacagagccgccgaagaatttacttgatgagcatcgggccgaccgtgttgatgttgccggcgcccatggtgaggacgaggtcgttcgggcctgcgtttttgcgcaggtaatccgcgatctcatcgaaggtatcgaacgagacagcgcccgggacctcctttgcgatgtcggaggagtagatgccgatggtgttctgctcgcgcgcagcatagatgggcgcgagaatggcctgatcgcactgcttgagcgcgtcgacgaactcggggaacagcgccttggtgcgcgtataggtgtgcggctggaacgcgcacaggatgcggtcgaagtgcatctccttcgcggtggagagggtcgccttcatctcgctcggatggtgcgcgtagtcgtcaacgaccgtcgcgccgttcggcatcttgccgacgagctggaagcggcgggaggagccggtgaacttgttcaggcccttttccgcggcctcgcccggaacgccgagaaattccgctgccgcgcagcaggcgagggcgttgagcatattgtggcggccgggcaccgagagcgcgacctttgcatattcctttccgtcgatgttaacggtaaagcggtagtagccgttttcgtcgcggacctcggtcggataaacgtctgcatcggacgttgtgccgaaggtgcggatgcggcggtcgatgtgcgcgacggcgcgcatcgcgttcgggtcgtcgtggttgacaacgaccagaccgttcatcggagtcagctctgcaaactcgtggaacgagtggatgatgtcgttgatgtccttgaagaagtcgaggtgatcctcctcgacgttcaggatgaccgaaacggtcggcgcgaagcgcaggaaggaattggtgtactcgcagctctccgcaacaaagcagcccttgccgccgatgcggagcgtgccgccgatggcgggcaggttgctgccgaccatgaccgtcgggtccatctgcgcctcgatggtcatcatggtcatcatcgaggtcgaggtagtcttgccgtgggtgccggagaggcagacgacattgtcgtagtcgcgcatgatgtggccccaggcctctgcgcgctccatgaccgggatgccgagctcgtgtgcgcggacgatctcggggttttcgtcgtgaacggcggcggtgcgcacgatcagggacgcgccctcgacgttctccggcctgtgctcataggtgatcgcggcgccgagcgcctcgagacgcgcggtgacgtcggtgcgcaggcggtcggagccggagaccggcacacccttgctcagcagaagctctgcgagcgagttcatggatacgccgccgatgccgatgaggtgaattctttccttattttcaatatagggcttgatagacagggccattttccctaagcctcctgtttgttctgtttttttcagcgaaagctgtgcttccttttattatagtacagtttccgataaaataaaatagggaaacgaacaaaaaatgaacgaatgcacgaaaaaagaaaaacggcaggaaatgacggcttgatgaagtgtgtaaagtccggcgaaaatgttcggtatttccatattgttaccgggataaactgcgtttgcggttgcaatgcgggacggtttcgtgtacaatggacatagctgctgcgaaggatgcagcgttccccatgcaggaaaggaagtaagcatgaaagttttgattttgtccgttaccgccggctatggtcatcatgccacggcgcaggcgatcggagatatgctaaagaacaagggggcggaggtggacacgctcgatgtgtacgcctatatcagcaacctcattaaaaccacgatcgacaagggatatctgttctcctccaagcatatgcagacgctgtatcgtctggtctatcagctggcagagaacaacggcgcgagctatttctcctctgcgccgagcatcatcaatatcatcaatgccctcggcgcgaccaaattcgcgcgcgtcatttccgaccgcgagccggacgtcatcatctgcacgcatgttttcgccgcgcagatggtggatgaactgaaaaagcgcaaaaagctcgcggacatcatgaccatcggcatcgtcacggactacacgctccatccgtactgggaggatgtgccgcgcgtgcagtatatcgtcacggcgagcgagctgctgacctaccgctgcgtgcagcgcggcgtgccgcgtgagcgcatcctgccgttcggcattccggtgcatccgaagttcaacctgcgcctcgaccgccgtgcagcagcggaggagctcggtatcgatccggatatgcataccatcctgctgatgggcggcagcatgggacatgcagagcacgtaaagactatcgaaaagatcgtgcagatcggtatgccgttccagatgctcgtcgtctgcggcaacaacaagaaaatgcagatgcacgttgaaaaattcgccgcgcgctacaacggaaactgcatcatccgcccctatggctttgtgcacaacgttgaggtgatgatgagcgcgtccgactgcatcatctccaagccgggcggcctgacggtctcggaggcgctcgcgaagaacctgcccatgctgctcgccgaccccatcccgggtcacgaggagaggaacgtcgattttctcgtcaataacggcatggcggcgctcatcaccaagcattttccggtggatgaggcggtttacgagctgttcaccaatccggtgcgtctggagaccgtgcgccacacgatgaaggcggtcgcgcaccccgacgccaccgaacgtctcgcggatttcgttctcgcgctgcaataaacataaaaataacgcacagagggaattttaccgtcctctgtgcgttttttttgttgcaaaaaataccgaaagcaccggcacctgcgcaatcctctccgcctcatcggggaagtcgcgcgagagccgtgcggcgcagcggcggcagaagtcctcgtaaagtgccggatcttcacgcatctgctgcttgaacccccagatatgtgtgaaatatccgccctgaccgccgccgaacagcgagggcaggtcggaaagcgcccggatgcggatacctttcttttcggcgcacatggtgagcagccgctgctcggcgaacaccatgtaggtcagcgtgtcgtccgcctgcggcgcggagcgcatgaagcggatggcggtatccgtgtaatagcggcggaactcgtcgctcccgaagtagcacagcgcggtgttgagcggctgtaccgtccagtcgagttcatcgaaatcaaagccgcgcgagcgggaaaacgcgcttttgtcgggataaatggacggaatgatgtcctcgcggtggatggcggcggcgtccacgccatcgagcagtgtgtcgatattcttccagcagatgaggtcggtgtcgagcatgacgcacggcgccttcatcgcggcgactgcgtacagctttccggcggcccagaacgccgtggcgttgatgtcgtccggcatcgcgtcgagcagggggtgcattccgtcgtcccagagaaaatccagtccgagcgaagcgtagtattccaccgcgcggctgtcgcagaccatgcagatgctgccgttttcgcgccgccagcagagcgcggagagcgcggtcgtgagcagctcgaacggctcgaccgcatacggcatgccgggcgcgcggaccgaaaaggggcgtgtccagttcacgtgaaagccgcgcatcagatcagctccagtccgtagccgccgaccgtgtaaacgcacgagccgaacacataggagccgcccgaacccgaaccggacgagcggaagctcgtggtatacgaggtcgtgtaggagccggagccggaacccgagcctgcggcgaaatacaccgtctgaacgacggtttttacgccgttttcctcacggatgacgtcgctttcgctctcgcacggcggcagcgcgccgcccatgaccggcaccggcggacggccgtcctcggccgggtaccagccgtcgggataggggtcgaccgcgaacacgggcgcaggcgcagcagacggtgcttcggcagggttttcgtctgctttcggcgtatcttcgcactttttctcttgctcgggcggcttgcagtgccgcgcatagctgtccagatcaaacacaactccgtcgatctcacgatatttttccggattcattgccagaatgccgtttggctttgacatggcggcacctccctgatttttcatcacaataaaattataccgaaccgcataggttttcgcaactgtttttcaagggttttctttgacagcagaatggaaacaccttataataatatgaacagaaaaacgaaaaaagacgttctccggcgtgggattttcctctgtccggacgcggaaataaacgaaacggagcatatcatggactttttatcactggagcagtcggtctggagccgactgaaggaagagacgcgccccatcgtgctgtacggcatgggggacggggcggataagatacttgcgcagttcgaccgcctcggcatccgcgcgagcggtgtgttcgcgagcgacgaatttgcgcgcggcaacctgtttcacggcttttcggtgcgcaagctgtcggacacggtggcggagctgggcgaggacatcgtgatcatcatttcgttcgccagtcagcgtcccgaggtgctcgcgaagatgtacgagctggacgcagactatgacgttgtcgcgcccgatgttccggtcgtgccggggccgctttttgacgaggcgttcgtgcgtgagcacagcgcggacatgcagagggcgtatgagctgctcgcggacgagcgttcgcgcgaggtatttctcgacaccgtgcgcttcaagctgtcgggcaggctgaaatacctgcgaaacagcgaaagcggcaaggatgaggtgttcgagaacatcctccggccgggcgcagacgagcatttttccgatctcggtgcgtacaacggcgacacgatccgcgagctgctgcactacacggacggccgctttgcctccgttaccgcgctcgagcccgaccgccgcagcttccgcaagctgaacgaatgggcctcggcgaatatcgagggcgatgtgacgctcgtgcaggcgggcgcgtgggacagggacgagatccgctgcttctccgatcaggcaggccgtcagtcgcacgtcgcgaacaagggccgcgagacgcagatgcgtgcgctcgacagcgtgctgaacggcaggccgtgcacttatctcaagatggatgtcgagggcgcggagcgcgaggcgatcgccggtgcgcggcagaccatcgagcgcgagaggccgaagctgaatatcgcggcatatcaccgcagcgaggatttcttcgaactgccgctgcttatccacagcctgtgcaaagattacgcgctttatctgcgccatcacccctatgtcccggcgtgggacaccaatctgtacgcgagataaaaaagagtggaaatctcggtgcgcaggttgtataataaagacaaatacaggacgggcgagacctgtccgcagtaaaggagataattacaatgggatgtttctactgtgacgagcatcatgagggccgcgaggcgatcatgttcaaggtcggcgacatgaaggccggcacgctgtatctgttcaaggatcaggcgcacaagggccgctgcgcactggcgctgaagagccacaagaaggagctgtgcgagtgcgacgagcaggagcgcaacgactactgtgctgatctggcagcggcttccggtgcgatcaagaagctgtggggctgcaccaagatcaacctcggctccttcggcgacagcaatccgcatctgcatttccacatcgtaccgaagtacgagggcggctttgagttcggcggcagcttcgcgatcaccaatccggagccggtattcctgaaggacgaggagtacaaggaaatgatctctcagctccagaaggagcttggcctctaagggggacgctgtcccccttagatacgcccccggttccttgcgaaaccgggggcgataaccccctctc

SEQ ID NO: 12996 - DNA, 211 bp, Unknown
  gut microbiota DNA sequence
ttgcggacgtccggcgcctgctcgggcatcgggcactttttcggattcatattcggcatgattacttgacctccatcttgaacaggttgcagtgctcctcgcggcgtgcgacagcagccttttcctgtgccttgtacatggcgccgcggcgcattgcactgtcgaaatcaacgaggtggccgtcgaaatccgggccgtcaacgcaggcgaa

SEQ ID NO: 12997 - DNA, 1217 bp, Unknown
  gut microbiota DNA sequence
taggtagagtcgtaaccaaggggtcagtgcgcccattcgcacccgcgaaatggaatagaccccattatttcgagttagagtcgctgatataatctgcggctcatttttcgttttcggcgggtttcttgatatacttgccgttcttgattctcgcgtccgccggtttctctgcgtcctctggaatcccccagaccgtgccaatgcggatagcaccggggacgcgcccctcgccgcacaaaatctgaatacggcgggtggagataccccagcgttcggcggtctgcgcgatagataaatacttcatgggcagtactcctgttgcagttccattctgcgtctgcttataaaatcacagtataattataatcgtcaaagcgaatataagcaatggcttcctgaaaagttcaggaagtattttcaattcagacatgaaaggggcttggggcttccccaacaacaaaatgagcagttcgggcgcagagctgaaccgctcatttttccggtgtgtacggacaccggatgtgcttgctactctctcaaatctcatatccgcagatacaacgcgctcccgcttttgcaaaagcaggggcgcatattttttgaaaatttctcatttcgatacctgcgttttgactaaaaattgtccgttgtaaagtgaaaggaaaaattttttaccgccatactcaacaaacggcaaaaaagtgtccgttgtaaagtgaaaggagttctttgatatgccggaccgcacgcgccccatccgcaaggaaatctgcctgaatgagcaggaactgaatctcatccagcacaaaatgcgccagttggggacgcacaacttcggggcgtatgcccgcaagatgttgatcgatggctacatcatcaaggtcgattacaccgagcagaaaaagttagctgccgctgtcagcaggattgccaccaacatcaaccatgtctgccgccgcattaacagcaccaggcatttctacgatgccgacgttgccgaactgaaagcgcggcaggccgaaatttgggagctgttgaaaacgcggcagagggaagaactttgaccacaacgggattttccatgtgtgggttttccgtcaccggttttccggacggtggacaagctgacgctccggagcgtaccacaaccggatttttggagcatggatttccaaactgtcacaggggatgaaattcatacccaaatcaataagaaa

SEQ ID NO: 12998 - DNA, 7965 bp, Unknown
  gut microbiota DNA sequence
aggtcaccagttcgaatctggttatcagctccatcaaagcatcatcttcggatgatgcttttttgtttgccgaaaacggggaaggggcagccggaaggctgcccctgagcgcttattctgggttttgcttatccgagcgcaacgtccagtatcatcatcacgagaaagccgaccatgacgccgagcgtacccgagtgagaatgctcgcctaaatgcgcttccgggatcagctcctcgacgacgacatacagcattgcaccggcggcggcggagagcagccacggcatgaacggcgtcagctgcgcggagacgaggacgaccgcaacaccgaaaagcggctctacgatgccgctcagtgcgccatagacaaaggatttcatccggctcaggccttcctgatgcagcggcagtgcaacggcggccccttcggggaagttctgtatgccgatgccgagcgcgagcgcaccggccgccgcgaccagtcccctgctgccgccatgctgtgcggcgcgtgcaaacgacaggccgacggccattccttcgggaatattgtgcagggttaccgcgagtacaagcagcgtcgtgcgtcggaacgaggacggcagtccttctgcgcgcgccgcaccgttgtgcagatgcggcagcaggccgtccagcagcagcataagcaggatgccgagaacaaagccgcctgacgccggaagccacccgacgcccccggcctgttcggtctcctcgatcgccgggatgagcaggctccagaccgatgccgcgatcattactccggcggcaaagccgagaaaaatgcgctgcatcagcgcggtcgactgttttttcatgaaaaataccatcgccgcaccgagggctgtcatagaaaacgtgaagcccgtaccggctgcggcccataaaagcgcctgctgcatcgtgtgtttcctcctgcggttagtttaggctaaccaaaggataacacgaagaaaccatacttgtcaagcgttcttgacaaaactatataataatagtatactatatgcgagaagagagatggaaattccatctctatgaaaatcgaggtgaactgcatggcaaaatcgcgtgaaaccgcgctgtattacgatccggagggcggagagcgtgcgcagcaggtgaagaccgttctggtctgcatgggtgcgcgcatcagaaacatagcggcggcggactttgcgcagacggtcggcttcgcgctcggccgcgcaggtttcgcgcagtgcgcggacattgtggaggcgccggagcagccgatgctcgtgctcgacggttttacctccaaacgtctggatgttctgctgcgtgagctgcggcagcaaggcgtgtccgtgccgtacaaggcgatcgtgacggagcacaatctcccgtggacgctgcgtgcgctgtatgacgagctggtgcgcgagcatgaggcgatgcacggatgatcgaatatgtcattccggatttcaatatcgaccagatcgcgcgttccggccagtgctttcgctttcggcgcgagggagaagggcgttattcgctgatcgccggcggaaaatggctggatatcgagcagaacggcgaaaccgttcggttttcctgcgcagagaacgaatttgagggattctggcgcgattactttgatctgaatgccgattacgggcgctataaatccaaggtcgcaaagcgggatgcctatctgcgtgcggcggtcgaaacggggagcggcctgcgtatcctgcggcaggagctgtgggaaacgatcatctgcttcatcatttcgcagcagaacaacattccccgcatcacgaagtgcgtggatggactgtgtacgctgttcggagaggcaaggcagcgcgcaaacggcgaggtctatcatgcctttccgacggcggagcgcctcgcgcagtgcacgcccgaggagcttgcgccgatccggctcggctaccgcgcgaaatacatctgtgcgacggcgcggcaggtcgcatcgggcgcggtcgatctggaaaaggtcgctcgcatgaagtacgcagacgcgaaaaatgagctgctgcggctgaccggcgtggggatcaaggtcgcggagtgcatttgtctgtttggcctgcaccatatcgacgcctttcccatcgacacgcatatccggcagatgctcgacgcacactatccgaaaggctttccgctgacgcggtacagaggctttgcgggcgtcatgcagcagtatgcgttcttttacgagctggaaatgcaaaataatagataaaaaatcaaaggagttgtttcttatggcagtcattacgatcacaaaggataatttcaagagcgaagttctcgagtctgacaagccggtcctgctcgatttctgggcaacctggtgcggtccgtgccgcatggtctctccgatcgtggacgagatctcggaggagcgcagcgacatcaaggtcggcaagattaacgtggacgagcagatggagctggcgcagcagttccgcatcgtctccatcccgacgcttgtcgtgatgaaggacggtcagatcgcgaacaaggcggtcggcgcgatgccgaaggaagacattctggcgcttctgtaaaaaattcgaagctctcgggcagggataccaacgggttccctgccccttttgtcttttcggcagagactttcgccggaccggtcgatttttcacgatttatatgctataatagatttatctgaccgaaagagagggatgaccttgtcctccaaaaataccatgacacgggatgcgatgatgttcctgccggcgaaggtcgtcgagggtctgctcgtcatagcctgctcgtcgctctatacgcatatcttcgtcgagggtgctgtcaccggcttcaacctgaccaacacgaccgtgcagctgatctacctcatccttgccggctggatggcgaattccgcgacgcgctatgtcggcgaggaatatcgcgcggacagcgggcgcggcctgttttcgaccgtttcgaccatttatctcggtctgtgcgtgctcgtcgcggcaggctgcggcatcacggcagctgtaacgggcaatacgctttactggggcggcgcgctgatgttctgctcgtataccgcgtttcaggtgctgaacgccgcgctcattcagctcggccgcgtcaaggcgtcgattttctggtcgctgacctcggcctcgctcaagctcgcagtcgcgttcgcgctcgtcggcggcaagtcgaattatccttctgcgttcccggcgatcttcgcgaacacgatcgcggacggcgtagcgtccgtcggcgcagtattcgcgctcggccttccggccattgtccgcctgcgctttttctccagaccgctgctcagccgcttcctcaagtatggcgttccgctgatgggtgtttcgatctcggtcgcgctgctcaaccagatcgacaaatatctcgtggtcggcttttacggcgacgtgctgtacgcctactattcgaccaacaactcgatcgcgagcggcctgttcaccatgatctcggtcggcatcatgcgcggcgtttatccggcggtgctccgcgcgtggcgcgacggcggaaaggcggccgccaagccgctgctcgatcagggcgttcgcctgtacctgctcatcgccgtcccggcggtcgccggtctgaccgcagtctcgctcccgatgtcgcgtttcctgtttgcaaagggctatgaggccggcgcgcctgtcatcgcctacacggcgctcgccatgctgttcatgggcctgaccgagtacgcgaacaaggcctacgagctcgagcaggcgaccgtgcacgtattgcagaacagcgccatcgcggcctgcatcaaggtcgtcagcagcgtcgtgctgctcaaggcgctcggctttacgggcggcgcgctcggctcgatcgtggccttcgcgtcctatttcttcatcacctgtgtgcgcgttcgttcgcgcttcctgttccgcgtgccgacgctctcggtcgtgcgcatcatcgtctccgcagcgctctgcggcgcggcggcctatggatgcacgctgctgccgctcggcaatcttctgcggctcgcgctcgcctgcgtggtcggcgcggcggtctacgccatgtgcatcatcgcctccggcgagggcagggaagaggtgcaggctgtcctgcgccgcatcagaaaataaaagcagcaccgcacaatgaaagccgcggcgctttatcgctcttgttcgattatgcggcattgcctaaagaaaaaacaccttccgaaacggctgagaccgtcgcggaaggtgtttgttttacttgtttctctgccaggtgccaggcgtgaacagcaggagcatggggaacagctccagacggccggcgagcatatcgaaaatgagcacgcacttgctcagcggcgggaaaaagtcgaagttgcaggtcgggccgcacagcgaaagacccgggccgacgttgttgagcgtggtcgcgaccgaggtgaagcaggtcacgagatcctcacagttcagcgatataatgagcagcgagaggatgaagatgaacgcataggcaacgacgaacacgttgatcgagcgcatgacctcatgcgggacgcgctggccgtccatcttgttgacgcgcacgagacgcggatggatgaggcacatcatctctttcttgacgctctttccgagcagcaggatgcgcgagcattttatgccgccgccggtcgaaccggcgcacgcgccgatgaacatcagcagcacgagcagggcgcggctgaacgtcggccaccggtcgaaatccacggtcgaaaaaccggtcgttgtgatgatggacgcgacctggaacagggcgtgatggaagctctcgcgcagcgagccgaacatcggccgcacgttaaaggcgatgagcccggcgaatacgaaaatgacgccgagatagacgcggatctcctcgatgcggaacgcctgacggaatttgcgcgtgaggatgagaaaataggcgctgaaattgatgccgaacaggatcataaagaccgtgatgacgttctggaggtacgcgctgttgtagtgcgcgatggaatcgttccagttgccgaagccgcccgtaccggccgtgccgagcgagacgcagatcgcgtcgaagagcggcatgccgccgatgagcagcaggatcatctggagcacggtcagaccgaagtagatcgcgtacaggatggtcgcggtgtcgcgcatatgcggcgacatcttggagaccgcggggccggggctttccgcacgcatgaggaagatggtctgtccgcccgcgagcgggagcacgatcagcatgaacacgagcacgcccatgccgccgacccagtgcgtcaggcagcgccagagcatggaggcgtggctgagcgcctcgacgtcgccgaggatggttgcgccggtcgtggtgaagccggaaaccgtctcgaagagcgcgtcgatgaaaaacgggatctcgcggctcaggacaaacggcagcgcaccgatgaccgcgaggatgagccagcacagcgcgaccgtcacatagccctcacgggcgtagaagcgggtgttcttcggctttctgtggcacaggagcgccgcgccggcaagactgatggcggccgcgatcagataagccggaagctctggttcgccgtagatgacggcggtcagcgccgggaggaggagaaaaatcgactcgataccgagcatccagccgatcaggtagcgaacgatggcaaaattcatttaccgtgcctcctgcggcaggaaaatatcctgcagatcgttcatgccctgacgggtagagacgacaatgacggtgtcgccctcctgaagctcgtcgcggccgcgcgggatgatgcggcggcccttgcggttgatgcagcacagcagcacatccgggcggatgggcatatcctgaagcggaacgccggtcagatggtgcgccgcgacacggaattcgagcgcctccgcgccgccgagctgatggagcgtctcgacgttcgagcccatggagttctgcatggcgcgggtgtactggccgatgagctcggcggtggtctgcttggggcggacgatggtgccgatgggcaggtgcgaaatgacctcctcgaagttcacgcggttgaccttggtgaacagacgagccttagagtgacgtccggcgtgcagggagagcaggatgttctcctcgtccatgccggtgagggacgcgaacgcgccgcaggaggacagaccctcctcgtcgagcagctcgcggtcggtgccgtcgccgtggataacggttgccgcaggcagcttttccgacagaaactcacagcgctccagacgtttttcgatgatcttgaccgaaatgccggaatcgagcaggatcttcgcgaggaaaaaggcgatcttgccgccgccgacgagcatggcggtcttgatcggcgtactcggcacgccgacctggtcgaaaaagagcttctgctctttcggcgggatgatgaccgtgatgtcgtcgccggtccgcaggataaagtcgcccttggggatataggtcttgtcgccgcggcggaccatgcacagcagcacattggtgcgcagaaggggattgacctcgcataccgccatgccctccagacgggactcagccggaatgcggacgtcgagcagctcgatgcggccgcgtgcgaacgtgctgacgccgatcgcagacggaaaacgtatcagacgggaaacgacgcgggcggtcgaaagctcgggattgatcgccatggaaataccgagctcgtcgcggataaagccgagatcggccacatactgcggatcacgcacgcgcgcgatcgcatggcagtcggaagcctttcgggcgatcagacaggagagaaggttgatctcgtcgtgtgtcgtgaccgcgatgacgaggtcggtgtcctgcacgcccgcctcgagcagaacctgatagcttgtgccgctgccggcaacagccgtgaggtcgagacggttggtcagctcctccagacgccgttcggacaggtcgatgagcgtcagatcatgcccctctgcggagagctgctccgccagtgcggagcctaccttgccgcagcctacaattatgatgcgcatactgcgcctccgatcttttatactgagtggcggagagctccgatgaagcgtccgccgcctgccgggcgaatacctcgcccatgttactattggattatagcctttcggcgcagaaaaagcaatatgcagagcacagttctgaaaacattttaacgaaatacagatatttttcccgatttatccgaataaatacagaaaaagaaagaaaaggctcaccgaagtgagcctttgagactggcgaaaccgtgcagatttcgggtggaattttattcgcagccgccgcagctgtcgcagccgccggtgcagccctgcgcctcggcggcctcgcgctcggccttgacgcgcgcttcataggcatggagcgagccctcggtgatgtggctgagagcggcgatgcgctcgtttaccatgtcccacaggcacatgggcaggtggtcgcggtggccgcggtggatggtcacgcattcgaagcagttgccgtgatggcggcaggcctccttgcaggggcagtggtcgccggactcacgcacctgacgcaggaattccagcttgatcttaagcgcctcgtccttaaagccctgctggtcgagctcattttgcaggatggcaagttcatttccgtcgattttcatagtgatacgcctcattttctttctggcgccgccagaaagcggaacggcggcgcggtactctgtatttcaagaatagcagaaaaggctgtaccagtcaagaggaggctgcactcacggtgggggagaattgccgccgtccggcggcggggaaggccgtgcccacggcgggggcaaaagggggcaagggcaccgtatggttcccttgccccctcttgactccccca

SEQ ID NO: 12999 - DNA, 680 bp, Unknown
  gut microbiota DNA sequence
agctcgccggggaggatgcgctgaccgttccgacctttatcgagaccgagcgccgcggccgcgaccgcgcggacaagccggagtataaggtgaagatctcggcggcgttctgcttttccaaccgcgtcaatgacattgaatactaccacaactcgtcctggctggagtacggcggcgcgccggaaaaggcggccaagagcgcctttacctccgccatcgacgcctacatcaagcagcagggcaagtaccagaagagcgagagcaagatcagctttcaggacgtgcaggactgcctgattctcgttacgaattgcttttcgaccatcacgtcctacgaaaaccagacgaaaaaggccatcacgaacaagttcatccaggaggccatgacggagtttttccgcgcccagctcgagatctatttcatcgagcacaagaccgaggccgaccgcgtcatggagcaggtgctcatcaacaagcgcagccgcgagacggcggaaaaagcgcgtctgaacatcaagaaaaagctcaccggcaatgttgacctcgccaaccgcgtgcagaaattcgttgactgccgctcgaaggacgtctcgcgccgcgagatctacattgtggagggcgactccgccctcggcgcctgcaagctctcgcgcgacgcggagttccagggcatcatgcct

SEQ ID NO: 13000 - DNA, 794 bp, Unknown
  gut microbiota DNA sequence
ccactgctcgctttgccatagccgcccctacgtcctcttcgctgtcgggcattttgatatcggccgcggttagcgtcacatcctccgccagcgccttcccgttcaccgtccggctcgtcggcacgagccccgcgagcgcggttttcacgctctgcgcccacgcctcgatcttatcccagttgtcgttgagcgccgacttgatgttgaacgtctgcgcgccgtccttgtccggctcgtatttgaaaagctcgagcagctttgttttcaaactcattatctcgcctcctaaaacgcaaaatcatgcatcgtgtgcctctgcagctcgtcgagcgtcatcccgtccacctcgcgcacgagcagatagcgatagagatagctcaccgccagatggcacgggatcgtgtgctccaccgcgtcctgcagtgccgcgagctcggccgcctccggcacgccatacgcgccgacgaacgtcagcacgatcacgccctcggcaaagccgacggagatctcgccgttcttccacgagtcgcacacgcgctggatgagctccacgtcgcacttgcccgcggcgcgccaccgcgcctgcagagcgatccgccgctcctcgagcgtcagcgccgcattgccctccagcccggcgatgcgctcctcggtctcgaggatccacgtcatcgcgtcggggaagagctgcgccgccgtctcgagcgcactctcgcgctgcttctcgtcgagcacggcgatgcagccgagcaggtcgcgcacccacctgtccgtgcggtacgccaccggcagac

SEQ ID NO: 13001 - DNA, 2132 bp, Unknown
  gut microbiota DNA sequence
tggccgtgtcgccgccgaccgtcaggccctcaaagtccacaacgccgtcggccgacaggatagccgccgcgatctgcgcataagagacgtagtcctgcacgaacaccgtcccggcgagatacgccgcgaccgccgctttgactgccgccgtcacactgtccgcctccgcggtgttcgatttgaacaccttgcaggcaatggcgatcttcttctccgccgccgccgacacaaagcactgcgcgccgatcggcgcctgcccccttccggctccctcgctctcggggtcaatgtacgcctgcacggccgcgacaagctcctcgcccgccggctgtccggtgctgtccgcgatcacgacgtccaccgtgttcacgccctgcacgcgcggaaaaaccttgacgtgcccgacgcccgcgcactcgagcgcccactgctcatagtggtacacgttgccgctcgtcgcgggcgtgcgcatcttgagcagaaaccgcgcgtaatactccgcgtccgtctcctcggcgtagccgccgctcatctcggcctcgttatcgcaccccgcaatgccctgcaccgtcaccggcatctgcgtcacgctgtgcgcgggcagatttccggccgtcccgtccgcgcggcaggtcaccggcacctcgcccgtgccgtcgatggcgacggtttccgccgccgcgaactgcacgccgcccgcgctctcgaacagcgtgccctgctcgatcgtgcccgtgcccttaaccgtcagcacgccgcccgcgaaggtcgcagccttgcgcgcgatgccgctgcgcgggtagatgtaccggtcaagctcgccgcccgtcaggttttccgggtcgagcgccgccctcgcgtcctcgatcaccgcgtccgtctccgccagccgcaggctcgccgccgccagcaggtcgtaagtggggaagccgatggttttctggtagctgtccggcatcgcatccagcagcgcggttaaaacctcattcgccgacattcgttatcacctccagagtttcgtccgtgtggagatgcgccgtaaaccgcacctccacgccgtgccgcagccgcgtaaagcggaagccgtccactgtgcggattgccgggcagaacgccgccgtgtcgcggatgtcctgctcgatctcggcaaacgcccacccttccggcgcgcgccggtcgaggcttgccgcctccacgcccggctgcgtctctccgtccgtgcggtagatgggcacagcgcccggcttctgcctgagcatcagatcgagccaccggcggaccgcggccgcgcccgaaacctcctgcaccgccccgtccacgagctgaaaagcgcctgagcgcccggtctcgtcgaaacaaaaatccggtgcccgcccgatgtccgccgcagtctgcgccgggatgccggacgggatcacgggaaaaacctctgccatgaaatcacctccatttacatcgcgtcgaggacgagcagctgcgcgccgtccagcagcgcacaggccgtcgccccgaccgtccacgaccgcgaggcggccgtcctcgtcataaggagaccggtctcgctgtcaaatttcgcctcgccgtcaaaaatcgcaaacacgagcttcggcgtcgtctgcacgacctccgcccggtgccacacctgcggcagcttctgcctgccctgctgcatgatcttgcgcgcaagctccacatcccacatctcgcgcccacctcacttaacaaaacggtactcggtgatgctcaccgagtagttgaggtctccgctgcggcgcacggtgaccgagaaatcgtccaccgtcaccgggatgttgagccgggcaacgccgccgctgtcgaggatgataaggcggaagggcaccttccggtcgcgccagcggtcgaagaagtccttgtacgcccagccgtcctcgcttgcttccgccggcataaaggcgtagcgcctgccgaccggcagcagccctttccagctcatcgagatgagctccatcgtgccgatgcgccggtagttgcggctgaggccggtgtaggtctcgttgctctgcgccgggctcgggatctcgaggtctgccggcacgtgcggcagcacccaaacttcctcgttgttatttaccgagaaaattactttgtac

SEQ ID NO: 13002 - DNA, 294 bp, Unknown
  gut microbiota DNA sequence
gtagctcagctggatagagtgtttggctacgaaccaaaaggtcgggggttcgaatcccttctggcgtaccaggaacaccggttatttcgtaagagatagccggtttttctttttgctgatggacacagcgcgaaaaaactgcgaattttatgaaaaaaactgttgacttttcgcggcggcaatgatattatatataggcagtcggaactgcggtatgcgccagtagctcagctggatagagtgtttggctacgaaccaaaaggtcgggggttcgaatcccttctggcgtaccag

SEQ ID NO: 13003 - DNA, 2428 bp, Unknown
  gut microbiota DNA sequence
cataatcagccgccagaatacctgcgaggtttaccgcggtgacggtcttgccgacgccgccctttaaattcactatgcttatgctcttcatgattttatcctttctttttcggtccgggcgaccgcatttttacgccgctggcatgcaggatggccgagaccacagcgtaggcgcgcccctgtccgcgcgcgatggcgaggatggagttcccggcctcgtaaagctccacgatcttctgcctttcctccggcgtcgcggatgcgttgcgctttgcctcgcaccgcgccttggcgtcctccttcgggtttaccatgcgccgctcgtcgcgcttcggcgtgcggacggtttcggtgtagcggtacggctcgccgaaggcctcgcccgtcacctcgacggtttcgtaaatcccgcgcgggtggcggaagatgacgcggcgggtctcagttgccattttccgctcccgctatctgcatcatctgctcatagtctttcttgattacgccagacccgatcagagccatgatgtactgcatcgccttgtcggcagtctcgtcattcgccgcctcgcaaactacgcgatacagcgcgatcaacacacggcggatgtcatcactcaaaatctctccgtccgcgcaatcaaatctgccttcggcctgtattccgtcaattttaatctcaatcatgctgtttccccttccgatttctcttgatgtatccaagcgccgcgccgatggcctcggctctctctcggtactctcgcgcaagccgcggttcgacgagcttgctctgtgcgtacagcttgcggcgttcaaaccgaagctttggaattgcctttcttagtttcacgcttctcctccatctttttcgtctgcacgatcacctcgcgctgaccgtccatgtattccgcgaactgctgcaagctgccgtcgaaatcgagataaaccttgccgaggcggccctccttgtttttgagcacctgcagcacgcgctcgtctgccggtgcgctgtccgcctcgttcttgtagagcgcaagcaccgcatcggcgtcctgctcgatctggccggactcgcgcaggtcggtgagcgacggctcgccgtcgcgcgcttcagacgctcgcgaaaactgcgacagcgccacgaccagtattttttgatcctgagccatagtgtgcagccccatgctgatgttggtaacgaccgtaacacggtcacgccccggcgcccggagtaattgcaggtagtcgataaaaactatcctatgtcggcggcttcgcgcgcaatccagaatgttttgcacgctccaccccggcgcatgcaccagctcgacgtcgctctcggtgatctcgcgctgcaggcggttgagccgcgtccactcctccggcgtcatctcccggcggttgatgtggccgaagtcgatgatcgcgcggttcgagacgatacggtttatcagcttggagggcgtagtctcgaggctgtaaaagccgactttcgcacgccgccccatgtgcgtcgccatctggagcgcgagcgccgtcttgccggcggacgggcggcctgcaaggactacgaaatcgccgtagtcgctgtacaggcggctatcgagtcggctgaagccgtactcgatgaattttctctttgtcgtctgctcgagggcgaaggtttcaagtccctgcgacagcgagacgatttccgcgccttgcttttccgccgtggcctccatcgccgcggcgatgagctcgcggccttcctcgctcgtgcgcacctgcgtgagcttgtcagccagctctcgcaggcggctgactttcgtctgctcctgcatggcctcggcgtatgctttccaggcgctcgccgtgctgcatacgtccatgcactccatcagcagcggctcgtattccttgccgatggcggcgcggatcgtcaccgggtcgagcggccggccgcggttgaatatctcgcgtgccgccgtgtacaccgtccgcagctcagcgcggagaaaatcgctctcgcgcgtcgcggcaaaaagctcgcctgcgatcttcgggtcgagcagcagcgcgccgatgacgctgtactcggcggcgagcgttgctcgtttctctaccacacctcgacctcctctcgccgcctgggcggcttgtccggcttcgcttccgccggattgtcatacttgccctcgagcaccttgaccagattgttttcgttcagcagccactcaaaatcggctttccagtggcggtcgttctggccggtgcaaaagctgctcgcctgtgccctgcggaacgcctcatcgagctgctccggcgtgtagcccttgctgtaaatccgccgcactgtgagacagcgtttgtccgtcagacggacgaccttcggcagactggtgcagatggcgttgtagcggtccgcaagctgctgcggcttattgcttat

SEQ ID NO: 13004 - DNA, 916 bp, Unknown
  gut microbiota DNA sequence
accgtttggtgacaggtcaccaacaaacggtgaaatgggaagtttgctctcatcgagcgcgtaaaacaaggtgcggtcatgggtgtctttggcatagttcgcggtcagcagaacgccggtctccttgagttttttcaccacgcgttcaatctgcctgcgcgaccagaacgggaacagtttttcgagcgcacgcaggctgttgtacgtccagtagcgaccggcgtgaaagtgccggtcgttggcggcattcttctcaatccagaactgcaggcgcgcgatgaaaaccgcgccgtctacgccgaatttctccgcgactgcgctgtcgaaatgataggtcatgtgccttacttcccttctttgccggacgcagaaccgtcctggccgcacgcctttctgatgactgcgcacgcggccgagaaccgcgccataagcgcggccatctcctcgttcacgtcctccgtctccttgctcttgcgccgcccgcgccctacctgcggcagtcggccggctttgcgcaggcggtacagcttcgcggaaacactgttctccgcgataccggtctcaaccgcaatctcgcgcgccgtcatgccctctcgcgcgaaccggatgatctcgccgagatcctcctgcgcccacgaacgccgataaggcgcccggtctcgttcattcaatttccccattatctgtccccttttcagcgcgatgccgctccatgctccaccggtacatctcgatattgcgcttgacgtgatggtacagtcccaccatcgtcagaaactccgcgagagactccggcgaacttccctgctgggcggcgatgtcttcaatttctgcccaaaggtcatcttccatcgggattttcattgtgatttcacgcagcatggttgcgccttcctcccgtccacattgccagcag

SEQ ID NO: 13005 - DNA, 519 bp, Unknown
  gut microbiota DNA sequence
gccgctttttcggtggctgcacttcggcttttttcttgtcaaagacaagaaaaaagccggcagctttcgctgccggccagcccgccaatgccgtgtgagcccagttacaacctgcacaagaaggcaggtgggtcgcctctctgctgtttctctgcttccaacgtccaaccggcatctttcagccggccgggaggcctgcaatccgcagcggaagttctggcatcccttatcagagatgtgggtttaaatgggctccgagcacccgatcgtgctccacgcacacagcaggacttattcccatgctatgcgccgcgcgggaacttattcctccgcgccgtcgtcagaatcctcgtcctcgtcggcgaagatctcttccatataataattgtacaccttgtccagctcgtcgtcatcgtcgatggagccgaagagctcctcgccgttttcctccatgatcttgagcaggatgatgccgaaatcggggtcgtcctcgtccatgtcggcggggagcgccgcgag

SEQ ID NO: 13006 - DNA, 6129 bp, Unknown
  gut microbiota DNA sequence
gcttttaagcagaagttgttcctgcgcagtcgtaccagaacaaaaggcgcgttcgacctacgacaacctgcttcgtctaatcgacgacccggatgtgcgcgaaccgctcaagttcctgcgcgaacgcgaggtcgtgcattttcagcgcttcggcgacgcgctttccgtcgttcagtccaaccttgacgcgaaaaactactacgcctggaatccggcgttcgatgtgcggccgcgcgaacgaagcgctcccgctccctcccgtccgtaccccatgcagaaccgcagcgacgtaactgcgccgcacgaataagccgcttctccccgatccggtgcagccttgcctgctgccggcccggggagtttttttgccggtttccgggaggattttccgtctgataccgtttatattccgtaaattttatatacttctctgtctctcctgcttgtttttgcacattttttgcacaatttgacgagcaatgtctcttttcttttcaagcgttttctggtataattagttcatatgagcatgggcatatttcccgtgtgcacatattccgccgccgaaaaatacggtgcgcggccacagtatatattccgccgtgcgtggagaagcttagagaatacggcggcgcattacgataataaatggggaacagtcatgaaagagaacaatttggtcatcaccggcatgggcgccgtgacaccggtcggcatcggcgtcagcgaatactggaacgcgctcaaggaaggaacgtgcggtgtgggcaaaatcacgcgctttgacgcagcggaaatgcccgtgcagatcgcggcggaactcaaggattttgatccgaccgcctatatgcctaagacgctcgcgcgcacgatggacccgttcatgcagttcgccttcatcgccgccgagcaggcaatcgcggacagcggtctgtgcatcgagagcgagtccgaccgcgtcggcatcgtcatgggtaccgcgatggacggcgttaccaccgttgcgcagacgcaggctgccttcgatgagggaaagcgcgtcggtccgcgcttcgtcccgatgaccatcggcaacatcgctgccgcccagatcgctatcgcgcacggcattcacggtcccagtctgacgctcaacacggcctgctcggcaggcggtgacgcgatcatgaccgcgaccatgctgctgcattccggcgaggcggatgctgtgctcgccgttggcggcgagagcatcctctgccctatcgttgtgtccggtctcgcgcaggccaaggcgctttcgcgccgcaacgacgatcccgagcacgcctgccgtccgttcgatgcggaccgcgacggctttgtcatcggtgagggcggcggcgcactcctgattgaaaccgaggagcacgcggtaaagcgcggcgcgaccatctacgcccgccttgcaggctgggcgaacacctcggacgcacaccacgtcaccgctccctgcccggacggcgagggcgctgcgcgctgcatgaagctcgcgcttgcgcgcgccggaatgcagccctctgacatcggctacatcaatgcgcacggcacttcgacgccgctcggcgacaaagcggaaacgtttgccgtcaagtctgtgttcggcggccgcgaatgtgcgcctccgatgtcctcgaccaagtccgcaaccggtcatcttatgggcgcgggcggtctgactgaggtcatcgcgtgcatcatggcagtccgcgagggcgttcttccgccgacgcttcatcttgacacccccgacccggactgtgatcttgactatgtgccgaatgccgctcgaaaggcagatatttccgcggcaatgagtaattctctcggctttggcggccagaattccagtattatcgtagcaaaatacgaatgataaccgaacgggcggccgaatttttttcgcgccgcctgttgcattttgccgaaaatgtgttattatattcacatgatatagtttcgtactctatatcacgcatttaaatttacgagttatctttatgaaatgaggcgaccccatttgagctatacctatgacgttaccatgttccgcgaaacattcgaaagccgttttacctatctgaacggttttctgcgtaatgtttcgcgtttcggagaccgtcccgccgtatttgatccgcattctgaccgccgctggacctaccgcgagctgaactgcgaggtcaaccgtcttgctcacgcgctccgcgcggacggcgttggcaaaaacgacgtagtcatgtttgctctgctcaactctcccgagtttgtctttttttaccttgccgcacacaaaatcggcgcgatcgcctgtccggtgaattaccgtcagggctcgggtgaaattgcgctcgtcatcgacgacagcacgccgaaggtgtttgtatacgacgcagaattcggcgagctttcgagccgggcactcgagatgtgtgagaacaggcctgccgttgagctggttgtcggcgcagaggaggatgccgtcctccccgccggttacaggcgctacgaggactatgttttcgagcagccggagaccgatcctccgatcgatttcgcgccgcatatctacgatgaaacgacccgtctgtatacctccggcacgaccaaccgtcccaagggcgtgccgatcaacaacatcaacgaggtgctgtccgcacacgatgtcatgatgcacttcccgctcagcccggtcgaccgcacgatgaacatgaccccgtggttccatcgcggcggcattcactccggcggcccctgcccgacgctgtatgccggcggcgaggtcgtcatcctgcgtgattttgcgccgcgcacctgtctggaatatgcagaaaaatacgcgatctccttcctgatcggtgtgccgaccattattgcgatgcttgcgcgcacgcaggagcgctccccggccgatctgtctgctctgcacggcatcgtcaccatgggtgcgccgttcgagaaaagcgcgtgcgagaaatatatgaagctgctgacgcccaacattttcaacggctacggcacgaccgagacgttctggaacaccttcctgcgtccctttgacctgcccgacaacgcaggctccgccggacgctcgtgcacggatgatgaggttcgtctggttgccctgcggccgaacggggagcgctccgagccggacgagacggtgccgcgcgacagcgaaaccccgggcgagatcatcatctcctcccctgccaagagcgctttctgctatttcaacaacgaggaaatgaccgaaaagaagttctacaagggctggctctataccggcgacgtcggcacatgggacgagaacgagttcgtgactgtctccggccgccgcgacgacatgatcgtttcggcaggcgaaaacatttatccggcgcagatcgaggccgtgctcaacgagcatcccaaggttgcggaaagcgccgtcatcggcataccggacaagctgcgcggcgaggtcgtcgcggcatatgtcgtggcaaaggagccgtcgctcacggtcgaggagctcaaggattactgcacgcacagcccgatgctctcctcgtacaagtggccgcgcgcctatcatatcgtggacgagctgccgcatacggcaaccggcaagctgatgcactataagctgagaagctacgcgaaaaattaaaagcgcccctctcgaaggcgcgtcagccctgaaatacgggcaaaaagaggcagggtcaccgaagtgaccctgcctctgagactgtcgaaaaacttcgtttttccgacaatctgtgttttgacttcgcaaaacacggacgtccaaaagttcccatgcggaaactttttccctctcaaagtatcaaaaccgaggtacacgcccccggttttgatatatttgctttgcaaatattatttcatgcgcgctgccgcgcgtctgccgttcctgcatgaaaataaactttatcaacagactgagaggcagggccaccgaagtggccctgcctctttcgttttgccttaggctgcattttacgcgccgaacaccttgagcataaagcctgcggctaccgcagagccgatgacgcctgcgacattcgggcccatggcgtgcatgagcaggaagtttaccggattggccttctgaccctcgacctgcgaaacgcgcgccgccatcgggacagcggagacgcctgccgagccgatcagcggattgaccttgccgccggtgagcttgcacatgatctttccgaaaaccagaccgcctaccgtcgagaaaatgaacgcgagaagaccgagaatgatgatcttaatggtatcccaggtcaggaaggtcgaagcgatcgccttgcagccgaccgacaggccgaggaaaatggtaacgatgttgcacagcgcgttctgtgcggtatcggacaggcggtcggtcagaccgcattcgcgcagcagattgccgagcatgagcatgccgatcagcggcgcagtatccgggataagcaggatgacgacagtcgcgaccgcgatcgggaagatgatcttctcggtcttggagaccggacgaagctgctccatcttgatctcgcgctccttccgggtcgtcagcagacgcatgatcggcggctggatgagcggaataagcgccatataggaatacgccgcaatggcgatcgccggaagataatccgccgcaagacgggatgcgacaaggatagaggtcgggccgtctgcgccgccgatgatggcgatggctgcggctactgcggccggaaaaccgagcgccagcgcgagcaggaacgccgagaaaatgccgagctgcgccgctgcaccgagcagcagcgaggacggacgggcgatcagcggaccgaaatcagtcattgcgccgatgccgagaaagatgatggacggatagatcgcgtgctgtacaccctgatagaagacccagagcatgccggggctcgagccgtcgaccggcgcgttcagcagaccggtgagcggaaagttggcgagcagcatgccgaatgcgatcggaatgagcagcagcggctcaaatcttttgccgatgcccatgtagagcagcacgaacgaaatcaggatcatgatcaggctgcgcggatcttcgagaaacgacgcgaagccggaatctgccagaatgctgccgagcgcactgaaaaacgaaaattgcatatcgagcgcctcccgttacatcgtgcagagcggtgcgccggtagcgacgcttgcgcccttctgcacgcagatcgagccgatcgtgccggcacggggcgcgcagatctcgttctccattttcatcgcctcgaggatgaacaggacgtcgcctgcgtttacctgctggccgacggagcagcggatgtcgaggatagtacccggcatcggagccgcgaccgtctcaccgcctgccggagctgcggccggggccggtgccggtgccggtgcggcggccggagccggggctgccttaggcgcgggagcaggcgctgcgccgaccggcgtgcccgtgaccgtgccgcgttctacgatgacttcatattgcttgccgttgagcgataccatatatttcattgtcgttttcccccttaaactgccttgatagacttaaatacaagctcgtcgagcggaatgccggtctcgtggctgacgatagccatgacgcaggcggcctgtgtctcgtcgataccctcgaggacaacggcggccggtgcggccggaacaggcgccggtgccggtgcagccgccggagccgaggccgcttcactgcccttccccgcgatcgcgccgaccgcacgggaaacaatgacgatgatgccccagagcaccgcgagcatgagaaaaacgataaagaagccagaaaccgcgatcatgagcgcgtctaaaattccgagaggatcgtgtaccatggatcagtttacctccttaaaggaatagcttgccgtaaaggtctgctcgcggcgcgcgaagaactgctcgctctgctgcgggaaagcgatataggagagaacgtcctcctcgtttctcgcgcgctcgccaaggtgctcgcgcgccgccgggaactccggctcgagcgaatcggcgtagcgtccggtaatcggcttgtcgtcaccgagcaccttcgccgcaagctcttcg

SEQ ID NO: 13007 - DNA, 1275 bp, Unknown
  gut microbiota DNA sequence
acgttcacggtcgcctgtacgccgaccatctgcgacagcggcgtaacgagcggcgggtagccaaggtctgcacgcacgcgcggcgtttcctcgagcacctgatcgagcttgtcgatggcgttctgtgccttgagctgcgcgacaaggttggagagcatgccgcccgggatctgataaacgagcgcatcggtcttggtcgagagcacgtaggggtcgaacagaccgttttcggtgaatttattcttgatcggaacgaaataatcgttgatcttcttgagctccttcgtatccacgccgcagtcgtagcccatctgcgtgagcgcatacacgagcgactcggtcgcaggctgactcgtaccgcccgagaaggtcgaggtcgcgcagtcaatgcctgcggcgccggcctccgccgccttgaggtaggtcatatagccaagtccggtcgtcgcgtgtgtgtgaacgtagatcggaatgctgatattctccttgagagcggtgacgaggtcgaagcactccttcggactcataataccggccatatccttgatgcagagcgagtgacagcccatctgctcgatctgtttgccaagggagacaaacatctcgaggttatggatcggactgagcgtatagcagatacagccctgcgcatgaccgccggacttgatgcactcgtccaccgcagtctcgatgttgcgcaggtcgttgagcgcgtcgaagatacggatgatatccatgccgttctcgatgctcttgcgcacgaagcggcgcacggtatcatccgaataatgatggtagccgagcagattctgaccgcgcagcagcatttgcagcttggtatttttcatgtgcgatttgatgttgcgaagccgctcccacgggtcctcgttcaaatatcgcagacaactgtcaaatgtcgcaccgccccaacattcaacggagtggtagcctgccttatccatgtcatcaagaataccctgaaagtcggaaaacggcatacgggtcgcgatcagcgactgctgcgcatcgcgcaacacggtctcggtgatgtgtatttgtttcacattttgcccctcctttggcagcagagcaggccgggctcaataaatgcgctccctgttcccacttttctgcataaatgtatcatatcacgttcggagagcgcgtgcaatgctttttcacgctgaagtgcgttctgtttttcaaaatcatgcgaaatcttcaaaattacatttctttgtgtaaaactgtggttttttgattgactttctgttt

SEQ ID NO: 13008 - DNA, 466 bp, Unknown
  gut microbiota DNA sequence
gggaggcagcagtggggaatattgcgcaatgggggaaaccctgacgcagcaacgccgcgtgattgaagaaggtcttcggattgtaaaaatcttttatcaaggacgaagaagtgacggtacttgatgaataagctccggctaactacgtgccagcagccgcggtaatacgtagggagcaagcgttatccggatttactgggtgtaaagggcgagtaggcggattggcaagttgggagtgaaatgtcggggcttaaccccggaactgcttccaaaactgttgatcttgagtgatggagaggcaggcggaattcccagtgtagcggtgaaatgcgtagatattgggaggaacaccagtggcgaaggcggcctgctggacattaactgacgctgaggagcgaaagcgtggggagcaaacaggattagataccctggtagtccacgccgtaaacgatggatactaggtgtg

SEQ ID NO: 13009 - DNA, 670 bp, Unknown
  gut microbiota DNA sequence
gctgcacaccgagcacaccacgcccgacgcctacgagctgcaaaagctcttgcgccggatggtcgacgccggctgcacgcacgcggtcatggaggtgtcgtcccattcgctggtgctgcaccgcgtggagggcatccgatttcaggtgggcatcttcacgaacctgtcgcaggaccatctggacttccacaagaccatggaggcctacgccgaggccaaggcgctgctgtttgcgcagagcgatgtcggcatcgtcaatgccgacgacgattgggcgcacgtcatgctcgagcgcgccaagtgcccgatgcacacgtactccgccaagcgcaacgatgccgacctcgtggccaaggacatccgcctgagcgcgtcgggcgtgcgctttgtcgccatgcgcggcgacgcgatcgcgcgcatgcgcctcggcatccccggcatgttctcggtctacaatgcgctgagcgtcattgcctgcgcctgcgcgctcggcatatcgctcgacgactgctcggccgcgctcgacacggcaaagcccgtcaagggccgcgccgaggtgctcgagaccgacggggattacaccattctcatcgactatgccgtcacgcccgacgccatcgacaacatcctcacgacggtgcgcgagttcgcgcccgcgcggctcgtattc

SEQ ID NO: 13010 - DNA, 356 bp, Unknown
  gut microbiota DNA sequence
tcactttatgcagacaaaaacgagggaactttattcccctgtcctgtcgttgttggcttcctctatgccttttgcagtagcagacatgatttttaagtccgtttcgctcatagtgtcaagcatggtatcgagctgacggcggcgtgtggacttctcctgttcccgttccgggaaaaagaactggtctactgatacgtcaagcagggttacaagctcatacaaaatctgtaaacttgggtgctgcccgctgttctcaatggacgcgatatatcggggcgcaatattcagcgtgtcggctaactgattgcgtgatattccctttgcttttcttgctgctttaatggcttgtccgaaag

SEQ ID NO: 13011 - DNA, 242 bp, Unknown
  gut microbiota DNA sequence
ctactcccgcctccaccattgtagcgccagtgtgccgtataggttcggttgccagtgctgcccgttgggatggtgacggtcatattattctcgccgtcaagcactgtgccgctccagccggtgaaggtatagccggatttggtaggattcttgagggtgaaagcccccgccttgatggtgtaagtgtcgggattgccctccacagtgccgccggccaaatcatagatgatcgtgtactgatt

SEQ ID NO: 13012 - DNA, 1847 bp, Unknown
  gut microbiota DNA sequence
ctcgcagatgcgggcctaccgcaaagcgcgaggtctgccggatctcaagtacatctacgtcctcgagggcaggcacggagaccaccggcctcacgcgcatattattatcaatgcaatcggcggcgatcttgagcttttcaagtcgctctggctctggggcgatgatgtgcagctcaattacatccgtgagcgtggctacgacggttgggccggttatcttaccaaagaacgccgggaagcgagcctgaacggcaaaaaacagtttgtacccagtcgcaaccttgaccgaccggtcacgacttacgagtgggtggacgacggcacgagtgttgacgcaccaccgggcgcacaggtgctcgatgagggcggcggccggaatgagatcgcatcctgtaagtttgtaaaatacctgctgccctggtcggcggcagttcataataataacgcaacgcgcacgcatacgcgcgttgtttctggcttggaatgctctataacatatcaacagggattggagaaaaagccaagcaggggtagacaaaggagtaaatcgcgtgtataatcaaaatcgaaaaaagatccggtgcccgcgatgcggcaagccgaccaaggtttgggtcgtgccgggaacaaccacgctgcagcagtttccgctgtggtgcgaaagatgcaaatgtgagtccaccgtcgactacgacggtgtaagccaacgtctaagcagacaggagctgacttcgtaacactcgagcgcaatgttcgtcgagtgttgcaagccagctcctgttttttttatttccaccggaaggaggcgaggccgtgcagacggttgccgagatgatcccggattacaagaaaaatcttgatgcgctgcgagcacggcgccgcgagctgatcgccgagcgtgagctcgagccgcgcttcgagcgccggcatgcgctgactgtgcgcattatccggctcgatggcatcatcgccagcacgacggcggcgctgcatgacatgatcgcctatgccgactaagccgctgcggccgtgccgccatccgggctgccgggagctcgtgcggtgtggatactgcgataagcacaagccgcgagacgcggatcggcgctcagcggagtccaggcagtggcgcgcatggtacggcaccaagctctggacggatgatctccggccgacgcagctgctgcgtgagcaatggtgccgggagtgtgcacggcatggcattcgcaccagggcgacggacgtggatcacatcgagccgcataacggcgactgggagaagttcacggaccgcagcaatctgcaaagcctgtgccacagctgccacagcgcaaagaccatggcagaaagccgagctaaatctcgcggccagagcggccggaagggctgacgcttggacgagcgcagtgcaggcgcgacgtgcgcggctttggcgggaaatcgcaagatttcccggactaccccccaccccgaaaaagttttcggcggcggggcgtctgaccgcagccgggcttccgtgcgagattttttcccaatggagcgggaattttggaggttttggaaatggcaaacaggaaaagcgccggtccggcaggtccgggcgaggtaaaagcggcgtggtttatgccggagcagctggcgcgggtgccgatcgacgagctggtgccgtatgcgcggaacgcgaggacgcacagcgagagccagatcgcccagatcagagcgagcctgcgagagtttggttttgtcaatccggtgctgattgacagcgaccggaatatcattgcaggccatgggcgcgtactggcggcgcaggccgagggcatgaccgaggtgccgtgcgtactcgt

SEQ ID NO: 13013 - DNA, 297 bp, Unknown
  gut microbiota DNA sequence
cagagcgtttacaaggtaattgttctgtgcctcctgcgaagccgcgaacttcaaggcctgattctcgttctgaagcgccgcgatcttctcctgctgacgggtgttctccattgcatccagtcgtgcaatgatacggtcagtgtcgttgtgggcagactggataatgtcgcgtgcgttggttgccgcgttgtagttagtttcgcagaaaccgcgttccatctggcgctgggtgtcgcagcagcagccggacatctgcgtgccgagtgccgtcagaccggcggtcacgccgttaaaacc

SEQ ID NO: 13014 - DNA, 1212 bp, Unknown
  gut microbiota DNA sequence
aatgtgcagcgttccgaagatgcggcagaacgcttgcagcgtactgagcacatgacagcgctctatgctgccgcagacggttttgaaccggtgcgcgctgcttttattacgcaggacgaaatagacgaaatgctgcgcagcggcagcggcatagagcgcggcaaaaagcgcatttctgagttttatgcagaaaatcatacgcagaaagaacgcatcgaatttttgaaaaacgagtacggctggggcggtcgtgcttacggcggttacagcgaaaatcacgatggcaagggtattacattcgagcgcagtatcgacagaactgtatacgataggataactctgtcgtggagtcaggtcgatcaccagattagtacgctcatccggcagaaccgctatctgacaccggaggaacagcgccggtatgcgcaggaacggacagataccgtaacgatttctgaaccggaaaatgtgttccagtcgaacacacagaacgagccgcctgccgccgagccagacgatttttcggatattgacccaatcgcaatccgcgaggcgcttgctgaacgcggcattgtcaacggcaaagtggttgacccggaaaagctgaaccgtgacccgttcattcagcgtgtcatggcggatgtgggacaaacgccgcaagccgatgtgttacaatcgaacacacaaaagcagcaagcgccggttgacacactgaacgactataattccattaaactgaatgcgtcttacgcagacagtatcgtactgtttcaagtaggcgatttctttgaaatgtttggtgaggatgccaaacaggctgcggctctgttggaactgaatcttaccacgcgcgaacttcccggtactggtcgtgtggagatgtgcggcatcccggcgcacagcttggagcggtatgtggagaagctgcgcgacaagcatgatgtaacgattgccgccaccaaaggtaacagcaccgagcgccatgtctatactatgcgttccatcgaccacgaagcagaagatgctataaacgcttacgaaactgaattcggtgcagacggcttgcgggcattccgcgatacttctgctgaaacacaggcgaatgtgttccaatcgaacacgcggagtgctgagccgacgcagcctaagcagttcattgcccatttctatgttgcagaggatattcagaaacgcggcgctctggacatcaag

SEQ ID NO: 13015 - DNA, 139 bp, Unknown
  gut microbiota DNA sequence
aaaacaggctgcggctctgctggaactgaaccttaccacgcgcgaacttcccggtactggtcgtgtagagatgtgcggcatcccggcgcacagcttggagcggtatgtggagaagctgcgcgacaagcatgatgtaacg

SEQ ID NO: 13016 - DNA, 463 bp, Unknown
  gut microbiota DNA sequence
gaacacaggcgaatgtgttccaatcgaacacgcggagtgctgagccgacacagcctaagcagttcattgcccatttctatgttgcagaggatattcagaaacgcggcgctctggacatcaaggagtttcattctcttgaagatgctctgaacgcttaccataaactcccgaacaaccagagaaaagcgctgggagcaatgaataccgaagatcttccgggcagtctggattttgtgcagtgcgtagacggcaaggacaccattattcaggattatactaaggtggcaggctggcagaacgccgaagtccttaacagtatcgctcagatcgaacgatctctcaacaccagagaagctgtgtctgttcctgcggagaatgtgttccaatcgaacacgccggaagaaccggacagcgaccgctatgagatctaccagcttacggctgatccagccaatgcaaaact

SEQ ID NO: 13017 - DNA, 473 bp, Unknown
  gut microbiota DNA sequence
tgccgaagccgatcatcaggttcggcacgacgtcggcctccttttccgtctcgcggatgatcttgatggccttgtcgatgtcgagcaggatctttttaaggccctttaagaggtgcagcttgtcctgccgctttttgagcacgaagtacacgcggcgcttgacgctctcggtgcgccatgcgcaccactcgtctaaaagctcgcgcacgcccatcacgcgcggcatgccgccgatcaggacgttgaagttgcacgacgccgtatcctgcagtgtcgtcgccttgaagagcttctgcatcagcttgtcggggtcggcaccgcgctttaagtcgatcgtcagcttgaggccggagaggtcggtctcgtcacgcatgtcggaaatttccttgaccttgcccgctttgatgagttcggcgaccttgtccatgatggcctcggtcgtggtggtgtagggaatttcataaatttcgatg

SEQ ID NO: 13018 - DNA, 676 bp, Unknown
  gut microbiota DNA sequence
accctcaatcagggcgacatcatcatcgccggcacggccgtcggacgtgtgcgcacgatgaccaacgataagggtcagcgcgtgacgaaggccggcccgtccatcccggtcgagatcgccggcatgtccgaagtgccgagcgcgggcgacacgttcaacgccgtcgccgacgagcgcatggcgcgcgagctcgtggagcagcgcaagcagcagaagaaggacgccgccaacgctggcagcaagaaggtttcgctcgacgatctgttctcccgcatccagcagggcgagatgaaggacttcaacatcatcgtcaaggctgatgtgcagggcagcgccgaggccgtcaagtcctcgctcgagaagctctcgaacgaggaagtgcgtgtgcaggtcatccactccggcgtcggcgccatcaacgagtccgacgttatgctcgccgccacgtcgaacgcgatcatcgtcggcttcaacgtccgtccggacgcggccgcgcgcgacaacgccgcccgcagcaatgtggagatccgtatgtaccgcgtcatctatgactgcatcaacgagatcgaggctgccatgaagggcatgctcgccccgaagttccaggagcagatcatcggccacgttgagatccgccagaccttcaaggtctccaaggtcggcaccgtctgcggcg

SEQ ID NO: 13019 - DNA, 371 bp, Unknown
  gut microbiota DNA sequence
cgaagggatgagacatccaccccctatgcagggtaatttcggcacggaccgcgaccattacatgaaatcgcttatgcgccctgacctcctcattctggatgatttgggggcagagcgtaacaccagcttcggcaaggagcgcgtattcgatgtggttgacaagcggctgctgactggcaagcccatgatcgtcaccacgaatatcccgctttccgttatgaagcaagctgtcgatctggatgaccgccgcatttttgaccgcatcttggaggtctgcgtccccatcatgttcgatggagacagcttccgcaaaaacaccgctgccgacaatctgaaaacggcggctcgtctgctcggctgataaacccaag

SEQ ID NO: 13020 - DNA, 532 bp, Unknown
  gut microbiota DNA sequence
ggatcccgcacatcggcaccaagaccaacggtgcgcgccggtggctgagtctcggcttcacgacgtttcagcagtcggagatcgcgaagatcgcggtcgtgctgtttttctccagcatgatctgtacgtacaaggagcagatgcagacgttccgctacggtgttgtgccgttcatggtcgtcacggtcgtcatcgtcggcctgctgatgctcgagccgcacctgtcggcgtccatcatcatcatggcgcttgcgatcgtgatgatgttcgtcggcggcatcaagctctcgtacctgctcgtcggcatgggcagcgcgggcgcgctgctgcttttcgccgccaaattcgtgccctatgtgcacaagcgcatcgtgtcctggcgcgacccgtttgccgataccagcgaggccggctaccagatcgtgcagtcgctgtattcgatcggctcgggcggctttctcggcctcggcctcggccagagccggcagaagtatctctatctgcccgaggaacacaatgactacatcttttc

SEQ ID NO: 13021 - DNA, 206 bp, Unknown
  gut microbiota DNA sequence
aactgctttcaaaactgctggtcttgagtgatggagaggcaggcggaattccgtgtgtagcggtgaaatgcgtagatatacggaggaacaccagtggcgaaggcggcctgctggacattaactgacgctgaggcgcgaaagcgtggggagcaaacaggattagataccctggtagtccacgccgtaaacgatggatactaggtgtg

SEQ ID NO: 13022 - DNA, 10267 bp, Unknown
  gut microbiota DNA sequence
tgccatcagttgttttgcatcctgtgataggtcaagtccgggtaatgcgcataaagttttccagaacgcttctcgttcttgtgcattcattctttcggccccctatcttccaccgcattcacgccgccagcgcattggcattgacccgttcaatcgcctgtcggatgcctgcccacacggacaggtctgtgaacacttccacgatgctgccgtagtcggtaaacggtgcttcctgcaaaacggacatatctttcatcatgccgttatgaacaatgtactccacaatctggtttacgaagtaaatctgcctgctgtccaagctggcatcgttcagatactgcgcaaacgcctcctttgccgcgttcatgtcaactccgacgatttctcgcacgaactcgcccagcggcttctggccgtactcagccacataatcctgtttcgtaccgacctcgctccagagtgctttctccagcgcctgcacatcttccacagtcaaagggacattaccctttagtttggcaataacggcgtcattcatgtgctgacgcacgtagaactccgccttggccttgtagttcttcagatcgtcgttttccagctcagattctttccagtccacagacagaatttcgtcatcaaaattcgtatcatagcgcactttactgaccggaatatacttgatgaggtcgcgcagattctcccggatgtactcaaattcattgattccggcggtctccacatagtccgtatgcaaaatcttgtcaatcagctcagcctgcaccatgatctccggaatatttgccacagctgcaacggcagagacctttttaaacagatcactccgcgccttgccatatttctttcccgccaggtacgcaagctcgatgccgtatagcagcgcgtcgaaccgcagcgctttggcatcgtcctcttccggtgtaataagcggcgcaagctcttgccctatgagcaaggtatcctcataggtcagagcgctatagctgtccggttctgcataccgctctacatattttaaatgctggcggacagcaaagttctctttgttcagttcccgcaccttgcgcaccatgtcctcaaccagcgtcttgcggaaggcaatcagattcgttgtctgatacgccaagtcctgcaatttgaaggcaatttgggccttcagatggaagattgcgccttgcagggcgatcatattggcggtaggtctgcccttgttcatgcgaaagaactcaaagttgccgcagaagtcaaaaatatagaacttgtccttatccttaccatccatcagccccggacacagacgggtgccacgcccaatcatctgccagaacttcgctttgctcatgacctttttaaagaacaccagattcagcacctccggcacgtcgatgccggtgtccagcatatccacggaaatggcgatttgcggcagctttttcggatcggagaactcgtcaatcgcgctctgggcgtaagtcatatagttatcaatgaccttggcaaagccgggaaggtgcgggtattctttattgaaaaccgcgaggattttctccgcatgggtgtgattttttgcaaagatgatcgttttgcccagcttactgccgtagtcgatggtcagaccgtgggtcatcagcgtgttcagtacctgtcggatggtgtcttcattgaaaatccattcgttcagcgccgaggatgcaatgcgctccggtaattctccgttttcatcttcgaaggtgtcctcataggcctgcttgtcctcgtcggaaagctcatcgtaaacgatgccctgttcaataaatttcagcttcgtctctaccgacaggaaatccaccagatacccgtccttcaccgcctgcgccagttcatagccataggtgggtacgccgttttctagttcaaatatctcataggtgttcttgtcgatctcgtccttgggcgtggccgtcagtcccaccagcgaggcatcaaagtagttgaaaatatcccggtacttgttgtaaacggagcggtgagcttcgtcacagatgaccaaatcgaaatgtccgcaggtgaaaagcttaccctcttcatcctgcacgctgtcaataacattgtacatggtctgataggtggaaaacacacagtgggctgtgtagttgtccttctcctcacagagattggtaacggagagatcgggcagcaaattcacaaagctgcgcttggcctgcgtcaccagactgttgcggtcagcaagaaagagaatattcttcacccagccgtgttggagcagcacatcgcatagggcgatgacagttctcgtttttccggaaccggtggccatgaccagcagcgccttgcggcggttccgggcaaaggcgttgcaggcagccttgatggccccctcctgatagtagcgcccggcgatcttgcggtccaccatgacatttttcaggctcgtccgcatactctggagattgaagagcttctccagatcacgtttggagtaaatggctgcacatttccgctcaggatacagattgtccgtgatgcgggtctcaaagccgttggtcagaaagatgaccgggcggcggtgatactttttctccaacagatcggcgtagagctttgcctgctggcggcccttagctacgtccacgcaggtgcgcttggcctccaccactgccaaggggcgtccgtcatcaccgtagagcacatagtctgcatagccgacctcggacttgtttggcataccgggcagttctacctcattcagccagtccttgctctccgtccagcccgcatctgtgagcatggtgtcgatatacagcttgcgggtcttgtattcggacaggtcgaggggctttggcacataggtctgctgctgctcggcgcgacgggcggtgagttcctccttcagcgcagcgttttccgccatcagcgcggcgagctccacctccggcacttcctgcaccggctcggcggaaacttcgcttttctgcgtcagcagcgcatggtcgaaatgtccttcggtgtagttctcgccgtagcagtacgccacaaaatccagaagaatatagagattttccagacacagcgccgcctgctcttcggtgattttcttgccggtgtgggcggcgttgttgcccatgcgacggatcagatccatccgccgccagatgtccgcgcccacgatgtcccggaagtcctcggtattcatgaggctcaccagagagtcctgataaggcatgaccagcgccttgtccacggaatacatccacttcacggcaaactccatcgccctgcggcagttcagcacacaggcggaggggtcgatgggcagaatgcgctcagcggagacggcaacaggggcgaaggaggaaaattgcgggatggagaggaatgtatcaaagttggtcatcgggtttcacctcacgtttattactctagatttacggatttggagtaaatcctagcgtaattgtttctgtagtacataagcaaatttcgcaaaaagattttccaaagtcggttattgagatataactttcctcaaactttggcttgttgaatggatgtacccgatgcgtaatcgtgttgatttgcgattctaaatatcggtgttcctttaacggctcatatagggctttatttgtgagtgaagcaagcatagcgtttttaagtagcccaaggcgaatcaaattatcgaaatatttaccgacttcaaatggatattcacatttggctagctctccgacattagaaaaattttttacaacatcgtaaccttcttcttttttatttacacaccgaagggtaatggtcggtataattgtatttgaagacatgtaacgaagaattttagcttcatcaggactaagttgcttaataatttctacaaaggcaggatgaattccatctttcattgtctcgttcatagagttagccagtagttgggcatacagttctcttatttctatatcttccgttatacttgcgttttgtagagttggtactgcaattcttggggatggcggaacaatattctctgatggtatatttttcagcttctcttcaagcattttgcgcaaatcagatagtagctcttcccgcaactgtggataatactctcgaaacatggaaagggccatatgcgtagcgtctgccacggataatccattatactgctctgcgatgaacgtatttccgtgtgagccaagtcctgcattttggttgatttctgtcttgtcattcatcgtttttccctcctttgtgattgttctggattccgatgaatgtattattgctgccggacgatgtctgattgatggtagtagaatcagatttgcctttgctcgaattatctttttttatgagtccaaaaattccggttatgatggctaccgataccgagccacagattgttattaccgcaacttgcacggttgcgtctaacgatgaaaaccatgccattttgcttcacctcacccaaaatatttctgcatcaagctgtcaaacagtagttgtgcttcgtccaacgccttctgtacggcaacttttgatttgtcgacctgttcaacgaaggctgcaaactgctcctgcaatgccattggcgcaagcaatatccttattttgttcatggtagatattgggagctgaggctgtgcagagccgctggcgatcttcccctttatggattgaagctgtagcttaaattgctccataaagaagacctctgtcattacgcttttattcatgcgtagaataaccatgccggaattgatgcgtacattttcaaacgggacactgtcgtcataaaacgccaaatttccgagtgttcctcttgtcgttagcactacatcgccgcgttccagtttgccattgtgaagggcgttatctttttctttagtgatgaacatgcggttttcgaaggaaaagcccgtcgctgttacgttttttgcatttaagaacaggcagtatcccgtgtctgaaaactcatcctgcttgggatagttcttaccacggtctccgtctattatcgcacaaaccgtagtcatcggttcagtcggaagccccatgctatttcttacgggatcaccaaacatttcgacaaatcgggctttgacgagttcgtccagcttttggagctgctgctgacgcaatcgaacgattgagattattctatcaaattcgctggtaatatgtcgctgattttctaatgtggggcattctatctctacagattttaaatctgaactattggcccgtggcattttggcaccgcttgttttttcgtttatatatgccacaaattttggtgaccgtagaaaatatgtgagatattctctcgtaatatagtttttattaggcttcagtggaagcatttctgaagttgcatacccagggcaatcagggataacaactttgtttagatatggacgcaatttagaatagagaacattattagtatcaaatgcgatggttgaggttccgattttatcgaaaggaacatacaaacgctcatagatatgccctgtgttgctttccaccatatctagatttagcagccaatatgattcgctttctggaacacttccttgctgaatgggggctatatcacccagtttatatttcgccatatttcactccattacaatccaagcagctcttccagtttgctcatttcctcaccaatctccagttccaactctctcagctgggccatgatctcgctggtgggcgggtactccacgggcttatactcggttttcttgtatttattgatggacaggtcatagccattttctacgatctccgccttgggcacgaaaaaggatttttccgtgcgctggcggtctttttcgaaatcaagattgcggaaccgtgcgatgatatcagggatatcgttgtctgccaccgggctgcgcttatcgtccagcgaaaagccgtcggcggtcatatcatagaaccacacattgtctgtaccaccgtggccggtcttggtgaagatcagcaccgcggtagacacccctgcatagggcttgaatacgccgctgggcatggagatcacggcctccagccggttgccgtccaccagctctttgcggatggctttgtgtgcggtggaagagccgaatagcacgccgtccgggacgatgcaggcgcagcgtccgccgatgcggagcatccgcaggaacagagccaaaaacagcagttccgttttcttggtcttgcagactttcagcagatctgccgaaacggtgtctgcgtccaggctgcccttgaacggcgggttggccaaaatcagggaatacttctctttgtctgggttctggtcgctaaggctgtcccggtactcgataaagggattgtcaatgccgtgggtcatcatgttcatcgcgccgatgcggagcatggttctgtccatgtcgtagccgaaaaacatgtggttcatatagtgatccttcttctggcggttgaagaagatttcttccttgcggtgttccttcaggtattcacccgcagaaacaaggaagccggaagtgccgcaggccgggtcgcagatcacatcgtccgcttttgggtccatcagctccaccatcatgcggataatatggcgtggggtacggaactgaccgttacggccggactggctgattttgctgagcagatattcataggtatcgccccgcacatccaccgcctgagattcgttcatcaggcgataaatctcgtccagcgcatccaccactttggatagcagaagcggcgtgggcagcttgaaaatggcatcgtccatgtacttggaataggcgctgctcttatccccgtggaggttcttgatgaacggaaacacccactcctgcatcacagagtacattttccctgccgggaagtcatgaaacacactccatttgagttgctgaccgtcgatggtgcgctcacccatctgcacctcatcggtgaagatgctggtataaggcagccccagcatggcagcctcttttgcccggagattgtccgaatcgtccaagtcgtgaatgaacatcagatacgtgatctgctcgatcacatccagcgggttcaccaaaccgcccgctgcaaaaacatcccaaaggccgtcgattttatttttcagttcgcctgtaatcatttattctctctccctgttccaagtgtaagaagtgtaccgtccgccgccgattttcaagatttctccagactttatcaaatccgccagtgcgcgctggacggtgatctggctgatatccgggcacttttccatgatttcactcttggtgattttgccgaggtggtttttgatgatctcccgcacacggtcgggcttggacaggcccttggtggtcagcagctcgatccggctctcgaaatcccggtacgccgccaccagaacacccagcatataggtgacaaagggggcatagtcgttggttccctcatgccagttgtatgaactctgctgcaaagcttcgtaatatgtttccttggtgtcggaaatcaatttctcaatgctgatatacttgcccacgatatagccggagcggtacaggagcagcagcgtcatgagcctgctcatgcggccattcccgtcattgaatgggtggatgcagagaaaatccagtataaagatgggaatcagcagcaacgggtcgagttcagcatcctgcatagccgcttcaaacgcgctgcacagcgccgtaatagcctccggcgtttcccacgcaggaacaggctcaaaccggacaatctgctgaccgtccggcagttcttcggcaatcacgttatccgaatttttgaagcagccgccgatggacttcccgctgtatttgtacagatcccggtgaagctgcaaaatgatagatggctttggaggaatgaaatcgtggctttcatggatcgttgcaagcacatcgcggtatccagcaatctctttttcactgcgagtttttggcattgttttatcacgcacgattttcttcagtctgtcatccgtggtgataattccctcgatgcggttagatgcctctgtgctctgaattttcgcaacttccagaagttcagacaacgcatccgctttagcctcgataaagagattttgccgccccttgtattcgtgaatctgcgtcaggtaggccacgatctctggcgtcagcaatttgttgtattctgttttgaagtcgaacgctctcatgcactgccctcatttgaatttcaatttcatcaaattttatcgaatgatataattatagtatatccttaaattacatcgctgtcaatatcaattttctcatttttgcattaatgataaaattagaatttggctgtcgtctgctacgcatcatgtcccctcgcaggcgctgacaatcgaaaactgtatcgtaacgatttaagattgtcagcaaaaaaggaagtccgccactcatcggtacggacttccttttgcattttctgagcaggtgttccaaactgcgtttttacagtttgggtacccgtctgcgaagaaaatatggggagttcagaggggaaaatcccctttgacgcagggtttccaataggggcgcgcagcatccctgttggcacacgattttccgtaggaaagtctagtgtgttatacctttgcttccggctgacactggaaagaggctagcttcgccatctgctgtacggacagatagcggttggcagacgcttttcagcggcaggaggacaggcggattttgtgacgcgggctgcggtacaaatgcaggatttttgagaagcaaaatccgactgtccggaaaaggaagcagaggtatataaaagcccccgtcccgccgcagcgccgccgttgtttcagcgcttcttccgttttcccttgccgtgggtcatggtcgttttcccgcgctggctgatggggctttttaggtacttggacagtttgagtatttcaatcagtgagacgaactgctctttcgagagtttgtcataatcaatgccgaacgtagcaaggaatgaccgaatttgccttttctcggaactgccctcaaagttcattgcatcctgtaattagttctgtatattttctgcaaaggagacttcatccgcggtcatggtgtcggggcggtgttcactccgaatgtcacggagaatacctttcagatcatccgcaatcaggcttccgaaatattcatcttcccgaatctgcgccacttctaacgtccgcaggtgcaggtcattttcctcactgccgtttttcatcagtgctatctgccggacggcttccagcacggcattcatatcgttgacccgcatatccgcgatcaggtcaacgtaaatctcagcatccagcatgaagcgctggaaatccttgtggcagatcagctccgacagcagccggcggttgaacttgcccgttttcaatacatcaatcgaagcatcactcaaatgtagctcatgcagagctgtgttcaatgtcacttagttagcaagtaaggaacctcacaaagacagcacacagcaaagccagagcaagctgtgtgctgttttttgcgacatcagggcatgacaacaaagcggatcggaaaatccgctttaaaaagaatgttcaaatcacaaaataaatgaatacgacaaaatagtatatttcacgaataaaatatgcctttcaaaagaggtctctcagcgcacatcctacacaaataatgcagggtatctacacagatcgtgcacccctggaacaagcgcaatgcagcgggaatgaccgaattggttgtttcgcaagaatcattgtcgcaaggggggtacattatttgtatagatacctccttttatacggaacataattctgaacaatatcaacctatagaatgaatcaatgcggcagaatggtacatttcacgaatataatatgcctttaaaaagaggtcgctcaaaacacaccctacacaaataatgtagggtatctacacaaatcgtgcaccccctgaaacaagcgcaatgcagcgggaatgaccaagttggttgttttgcaagaatcattgtcgcaaggggggtacattatttgtgtaggtgcatatagtggttcgacagcgaactgcggcggctgatcaagcagctgggttatcacaataagatacgctgctccgatagcaaataccgttccgaaatttatatttatcgcggcagtgagcgcagaaaacggctcgaccgccgtgcggtcggcatcatcagcatcgcgctcggccacagtcgcgaggacaccgcgattacaaattat

SEQ ID NO: 13023 - DNA, 184 bp, Unknown
  gut microbiota DNA sequence
agcagccgtttccgactgttatccccctcttaaaggcagattgctcacgcgttactcacccgtccgccactaggttaagaattccaatcccgaaggattttccaaaataaccccgttcgacttgcatgtgttaggcacgccgccagcgttcatcctgagccaggatcaaactctctaaaaattg

SEQ ID NO: 13024 - DNA, 758 bp, Unknown
  gut microbiota DNA sequence
gtcagccatctgatgaaaattcccggctttgttctccgccccgagggaatccgttcgttctgcatggagaagatcaaacatttctcgacgctctggaagcgcttcaagatttccggcctgctcaagcagcaccgccatccggccggtgaggaaaaccgctggacatacgagtatgagatatgcgagacgcccgatctggaaacgccgtatctgaccaaccaccacgctgatggctcggtgtccacgattgcaaccatcggtgatttcctcgaaaagctcaaaaagcgtgtctctcatatccgcaagaacgtcagaaagaaggacaagccgcgcgcggtgcgccgcaaggagcgcagacagatcgagcagcagctgaacgctgacgcgctccgtcagcgcttcggcaacgacctgaccggaacggtcgtgacggcggtctataacatcaagcacgcggacaagctgttcatcaagggcgcggagatcgcgcaggagcatcgcgagaccgttgcgcagatgatttccccggaaaatgtggagcgcttcctcgacagcactacactggatctcagccgtatcaaaaacccggccgcctacttacagaccgcgctgttcgacttcctcgaaaaacagtgcagcacggacgcctcccctgccgacgaagcgccggacaagccgcttgccgactgggagcaggcatggctcgcacagaaggccgaggcacgccgccgccgtgaagaagcgattgcccgcggcga

SEQ ID NO: 13025 - DNA, 230 bp, Unknown
  gut microbiota DNA sequence
gcagctggattattcccagaattatgatgaagcctattcggagaataatctggacacaatcctacagaacaacccactgaatgattctttgattcaagaaatcaaatccatccccggtgtaacggatgtactgacgagagaaatcgtctctgcagatctgaacggaacaaaatttccggttgcaatcgtaaatcaagaggattttgaaatgatgcgcggggatggcgata

SEQ ID NO: 13026 - DNA, 567 bp, Unknown
  gut microbiota DNA sequence
cgcatttcaccgctacacacggaattccgcctgcctctccatcactcaagaccagcagttttgaaagcagtttatgggttaagcccatagatttcacttccaacttgccggcccgcctgcgcgccctttacacccagtaaatccggataacgcttgctccctacgtattaccgcggctgctggcacgtagttagccggagcttattcttcaggtaccgtcatttgtttcgtccctgattaaagatctttacaacccgaaggccttcttcaatcacgcggcgttgctgcgtcagggtttcccccattgcgcaatattccccactgctgcctcccgtaggagtctgggccgtgtctcagtcccaatgtggccgttcaacctctcagtccggctactgatcgtcgccttggtgggccgttaccccgccaaccagctaatcagacgcgagctcatctaaaagcggattgctcctttggcatcaaaaacatgcgaatttgatgctttatgcggtattagcagccgtttccgactgttatccccctcttaaaggcagattgctcacgcgttac

SEQ ID NO: 13027 - DNA, 7094 bp, Unknown
  gut microbiota DNA sequence
caaaatcgtttaagttagcgtttcagggagcgagtgggaataatctcagaggtcaaaaaaagtccgtaaacactggactttttgatccttgatgcccctcgtggcaacgatttggcaacagaatttcattattctcaagaaaagagctatctgatttcaaatgaagtcaggtagctctttttgctttctggattttcctagtctgattccaaaaacgttttctacagcgagatgagtggaagtggctcgtttttcgtttcccctatatttgagtatggttttggtcgcagattcctcagacggagataaatatgctccatatcccgtccaaaacacatcgaagtattttctggaatttagattccggtactgatctatctaatctctgccgcacctgcatcccttgacaaacgctgtgacggctgttatgatagctatggaaaaagagctcatataatctcgctgtcatggcgcgagagtttctacgagaccgccggaaggtctcactatgagtgtccgctgatggtaattccccatctgacgggcacttttttcatgcccagattgcggaaaggatgaaaaaatatgaaacttctgaagggcgacatcgtccacgcacctgtgctcggagcactcgagaccatcccggacggcgcgctgctgctcgatgacaacggcacgatctgcgaggtactgcacgagcagccgcaggatttcgacggcgaggtattcgactgcaccggaaaactcatcatgcagtcgttcgctgatatgcatctgcacgcgccgcagttcccgaacgtcggcacaggcatggatctgccgctgctcgactggctgataacctacaccttcccggtcgaagcgaaatttgctgacctcagctacgcgcgccgcgtctaccgcagactcgcgcgcgacctcatcgcgaacggcaccacacgtgtgtgcatgttctcctccctgcatacggacgcaacgcttgtgctgatggaggagctggaacgtgcgggcgtgaccggctttgtcggtaaggtaaacatggaccgcaacggcggagaaaatcttcaggagaccaccggaaactccatccgcgagacacagcgctggctcaacgaatgcagccgtttcacccacatcaagccgatcctgacgccgcgcttcactcctgcctgcacggatgagctgatggccgcgctcggaaagatctctgcggaaaagggtctgtatgtgcagtcgcacctgtcggaaaacctcgatgagatcgcgtgggtgcgcgagctgcaccccgactgcgcgcagtactgggagagctacgataaattcggtctgtggaaggaccacaccatcatggcgcactgcgtccactcggatgcgcgcgagcgcagcgccatccgtcaggccggtgttgtcgtcgcgcactgcccggactccaacatcaacctgtgtagcggcatcgcgccggtgcggcagatgctgaatgagggcctctgggttacgctcggctcggacattgccgcaggctcgtcgctttccggcagccagatggtcacgatgagcatccgcgcctccaaaatccgccactttaccgacccggaaaaaccggcttttctgaccgttcccgaggcgtactacctcggcacgacatccggccaccgctatttcggcgccggaaacggctttgccgcaggcgaccgactgcacgccgttgcagtcgacgaccgcgattttacggaaacaccgcgggcgctcagcctgtccgagcgcctcgagcgcgcgctgtacacgatgaccgccgcgaacgtctgcgcggtatggtcggagggccgtctggtgctcgaccgccgcacggccgcacccgtccggaaaaccgccgcccgctcgcgaaaactcggatgatttctgcgccgttttatggtatactttcagtaggataggacaattcttctgacggaggggatcatatgaaaaaacggttcagcaaagccgcgcggcagaccatgctcgccgcggcaacgctcgcgctgcttttcgcgccgttcgtgtgtttcggcgtgcaaaagataaggaccgatgccttggacagcgcatttctctggagcatacacactccgcacgatgtggaaacctttctgtctgaacacggtctccgcccggacagcatgccggtctccggtacgccggactggtatcagctccgcgtttttctttccatcgcctcctgtaacaaaggatgggatacgtcggtcattcttcagtataaggacgcgcagggaaacccgaccgtgcagcgctccggcctgttcgcgagctgtgtcgacagcgtttattcccttgatttcaccgatttcgccgccaaagatctgcgcgcgctctacgcctgtccgagcggctgctccatacagctttacggcaagctcgtgacgacggaatactggaagatcatgtgtctgaaccgcgtatgcatcgacggaaccgaatggacagcgcagacgccggtcgaggaaaccgaccattacgaaatcagatcggatgacctgcgctggaactttgaaaacagagccgagctcgaaagctatctcgatgtagtgaaagtctttcctgcggcgaccaaggagctctgcggcgaggagctctcccgcgatgaatccgaactgctgaccagcagagacggaccttcgtacatacggggttccatcagctatggaacggttttcgcccggcacgctgtcaactggcatgatgacctctttccgaaacttcgagtgcttgccctccgcaccgctgcgctgtacctgctgtccctgtttgcgctttacagatttttcttccgcgaataatccccctccctttcggttatacttctcccgaaaaggaggcggatctctgtgaacgcttgtgtaaatgatgatgcctgcatcggctgcggcctgtgcaccaatattgcgcctgccgtgttcgagctgaacgacgtcggcaaggcttatgcactcgatacggcggaggaaaaccgcagcgccgtgcaggaggccatcgacgcctgccccaccgcggcgatctcgtggacggactgacagcaaaaaggccggagagtctgggattttgttccctgctctccggctttttctcttattactcctcaaggcggtcgagaatatcgtccgcgatatcctcgagcttttcgtgctgttcgctccactcgtcgtatgcctcggatgccatgtcctccggctcgtcctcgtcgaggcgcgcgatgcgctcgcgtatctccgcgagataatcccggagcacgtcggcgtccatcgcgtcgatgtcgggcgcggcgccgagttcaatgatctgtgccatgtctgctctccccttttccgtttgttatgcttccataataccaagccgctcgccgttcgtcaatggttgcctttttccatgttctgtgctatactgattgcacagcataccgccgctttcttttttcgcgaaagcggcttcgacctttccaaaggagaacagaggattgaaattactgcaacgaatttgtctgtttgccgcgattccggtcattctcgcgctctgcgtctgccgcacgccgctgcgcttcggcgcacaggctgacgcgctgttcggaacagtcgcggatacatacgaagccggtgatgagaccgtcgaggtcagccggaccagccttccgcagggcggcagcgtccttctgctgcgcggctggacgctcggaggtgaggaccgctgcgtcatgggcagctttcagaccgcacaccgcaccctgcgctcccgcgccatctggtctaccgaaatcgcagacgacacgctctccgtgcggtggtttgacgggcagatctggcacgacgaacccatccgcaccggaaaatatcattccaacaccgcctttttcctaaccggccgcgatttttccgcgctgtgctacacgccgcaggtctgggcgttccgtgaaaacggctctcgccagcttgcggacaactggctcggctggatcgaagctgaccagacgaaaaacggctggcggctgacgttctgcacgccgcgcatgaagggcagcagcacagcggatttcaccttcctgaccgttgcggacagcagcggcatcgactgggcacgcgacggcattccggcgctctggagcagttaccgcaacgccggcgacggccgctggtgcttcgacggctactacaccccctcccccgagacctacatcccgaccggaaaccgcgttttcttccgcaatgctgcctcctatatgatcaagagctttctctatcaggcaggttcgacccgcacggcgcgcgacctcagcatcgccatgctcgataccatgatctccgagcagagcgatgacggctgctggccgacgctgtcgggcagtacatggctcgaaagtgagtacggcatcggcgccggtttctttgatacgcgctttaatacggaatttgcaaatctgctgctccttgcggagtcccgcttcccctcggacatctatcgggattcgctccgccgctactgcgactttttcaaggatttcgcggagaattatcattccgagaccgatctcggcggctggtttatcccggattactggcatgagggtatgtccagcgtctcgcatacgagcctcaatcatcagctcgcggagatcctgttcctgtacagggcttcggacgtgctcgcggagggcagtctttccgcactcgcggacaggatgctgctcgcggtcgatgaaaccggcgaggactgggtccttccggacggcaacctgcattatcaggtctcgcaggacggcgaatacggaaacacagactacccctacctcacctatgacgacctgttcaagctccagaaatacctcagcgaccgattttcgcgcaccgatcccgtgcttgatctgctgatgcagcacaagcgcgcatggatggacgcgaacggcatcactgcctacatgaaataaggagagaccctatgttttgtatgaactgcggaaaggcgctgccggacggcgcgaaattctgcatgtactgcggtacgccgctcggtgcggcagccgcgcccgcgcagagcggatgctgtctgcccggcaggaaatacctgtcctgcgacgcgctctatccgggcggcgcgtataccgaaacgcctgcctaccagcacgaccgcgagcgcatgcgggcctccgagctcgcctcggccccctattccggcttcgatttcacgaattatgtccgtctggagaatggcgcgatggttggcttcgtattcggccacaccgccgccaaccgcgctgccgaggactactacaacaacctgtatctgctgacgcaggatgggcgcgcggtctttctgaacgcaggcggccgccgctgcaccggcctgttcgtgcaggataatgaggtgcactggacggaaaacgggcagacgcacagcgttcccattccgctataaagcaaaaagagacgaacgatactccgtgagagaccggtatcgttcgtctttttcttatctctttgagaggtccgcgagcagcaccttcatctgtccgccgcagaccatgccctctttttccgccacatcgttcgacatatcgatagagacgctcctgctctcgcccgtgccgatgaggtagtaggcctgccgcaggacggcgctctcgctgcatccgccgccgatcgtacccatgaatttcgtcgagctgtccaccgccataaatgcgccggatttcaccggcgtcgagccgctcgtatcgtacacgagcagcagcaccttgtcgatgctctcgtccgcgacatagcgcagcagcggcaggtcgatgtcctcgctcgtcatgatgctgctgtgcgagcgacggtttgtgttcgcgcggcggcaggcgatcaactccgcgacgatggaaatcgcaatttccttgacgctcagcgcgccgatgtccagaccgatcggcgtatggatggcgtccagctgcgcccggtcgaagccctcgccctcgagcaggtgcagcaggccggccgtgcgccgcttcgagccgatcatgccgagatatttcggcatcgtgccgcgcaggatttttcgcaggcagtccgcatcatagcggtgtccgcgcgtgatgaccgcgacgtaatcgccctcgccgataccgatccggtcgatcgcgttctcgaaccggtcgcagtacaccgtgtgcgcttcgggaaagcgcggccggttcgcgaaggtcggacggtcgtccgccacgatgaccgaaaagccgagatcggcggcgtagcggcagagcggctgcgcgatattgccgccgccgagcaggatcagccgctcattcgggcggaagctgcgcacaagctccgcgccctccgcctcgaagtgcagcgccgatgcaagaccgtgctccgcactttcccttatggtctgaaattgctctaaaagattcatatttctcgctccctgcggcttattcgttcgtcctgctatattctccgctcctgccgccgtccttgtgcagcagcagcgtccggtcgatgcgcatgtcgcggtcgaccgccttgcacatatcgtagatcgtcagcgctgcaatggaagccgctgtcagcgcctccatctcaatgccggtcttgtgcgagcagcgcagcgtactgatgatgcgcacctgcgtgtccgagacggcttcaatgtcgatcttcacgctctcgatggggatgggatggcacatcgggataagctcgctcgtctttttcgccgccatgatgcccgcaatgcgcgcacacgcgaaaacatcgcccttcggtgcgcggtcctcgcagatcatgcgcagcgtctccggcttcatcgttatgaccgactgtgcacaggccgtgcgccgcgtcaccgccttctcccctacgtccaccatgcgcgccgcacccgtttcgtccagatgagtcagttccatgctttcgcctccgttgcttttgctcttattataccatatcggcataaaaaagaaaaacccggccttctcaaagaaggccgggtgagactgtcgaaaaacttcgtttttccgacaatctgtgttttgactttgcaaaacacggacgtccgaaagt

SEQ ID NO: 13028 - DNA, 4024 bp, Unknown
  gut microbiota DNA sequence
cgcgcggctgccgttcctgcatgaaaatatactttatcgacagactgacccggccttctcaaagaaggccgggtttttcatgtctgtcttatgcttttgcgctttcgctgttcttttcgctctttgcataggccttgaacgagtggataacgatcgtcagaccgagcacgatcagtaggactgcgaggatgagctggagaccgtttgcgatgaataccgcgccccaggtggtctcgcctgccgggatcgtcgtcgaggccgccgcagagatcgcctttaccatcgcaagcaggcgctgcaccagagcggtgaaggtgacgcacagcatgatgatcagcggcgggaaaatcatcttgttgctgcggccggtgactctgaggaatacgcacagcgtgatgagcaccagagcgctcagcagctggtttgccgaaccgaacagcggccagatgttggcgtagccgaccttggtcagcacatagccgaacgcaagggtaaggatggtcgagaaatagacgttgcagaacagctttctccagccctctgcatgctccatgtcatcgaccgagaacagctcctgaaagctcatacggccgatacgggcaactgcgtccagactggtcagcgccagagcggaaacgcacatggtcatgaatacggtcgcgacatagaccggaacgccgaacatttcgaagaagcccgcaacgccgctgctgaatacctggaacggcgtgccagccgccggggtgccgtctgctgcggcagccgcaccggcaacgcacagcgcgagaactgccagcaggctttccagcaccatggcgccgtagccgaccttcggcatatccttttcattctcgatggtcttggaggacgtaccggaggaaaccagactgtggaagccggaaaccgcgccgcacgcaaccgtgacgaacaggatcgggaacagcgtgccgagcttttcgttggtgaagccggtgaataccggcaggttcatggtcggatgcgcaacgaccagaccgacgaccgcaccggcgatcatgcagatgaacatgaaggtcgtcatatagtcgcgcggctgcttgagcagccacatcgggaggactgctgcgaagaagatgtagataaaggtgatgtagctccatgccgccttgccgaagatcagcgggcagtttgcgccgatgacaaaggacaggatgatgaacacgatgctgagaacggcttccttccagcccttgaagtcaaacttcttctggataaggccgaatacaacggcgaacaccataaacatgatcgagaccatgccggcagcgccgttggtctgagccgccggagacagctccatgacgcctgcgtcgctggccgcgaaggcgttgaacgtgccggctaccatatcagcaaacgccgcgatgacgatgcagcagaagatccacgagaatacgaggaacagcttgcggccggttctgccgatatacttctcgatcagcatgcccatcgacttgcccttgttcttgaccgaggcgtacagcgcaccaaagtccgcgaccgcgccgaagaatacaccgccgatcagcacccagagcagcaccggcagccagccgaaggctgcggcctgaattgcgccggttacagggccggcgcctgcgatagacgaaaactgatggctgaataccgtccagccgttggtcggaacgaagtcctttccgtcgttcagctcgacggccggggtcttggccttgggatcgatgccccatttgttcgcgagccagcgtccgtagaatacataggcgcaggcgagaacaacagccgcgatcagcacgattgtaagtgtgttcatggtttttcttctcttttccgtttggatttgcggctttcctgtcaatgagcgtgaacggcaggtacaaaaaaagccctcgtctttatcagctctccccttcaggagaacctgcaaagacgaaggcatttccgactcagtcggctgcgcttccgcgttaccactctgcttgccggagaaattccggccgctcatccgccgcccggtgccgctgcgccggaaggcgtgaccctgtaacggaggcttccgtctcgaactacttctgcctttcgttcgagctgctcgcaggggataatttctccgcgccttgctgccgtcttgcacgaccggcggctttctgaaagcggtgatgcgggaaaccgtgtcctgttcaaagcatttatccttttgacgaattcatcatagaacttcgcgcggcgtttgtcaatcgttttttgatctcttcgagtcattttcagcaggccgtataaattcgaacaaaatcttcacattcttttttgtgcatttttcaagcaaatttcagtagtactgcacaagaaaagggactcccgtttatggagagtccccaaatctttctggtttacttgctgtccttcggctcggtcatgacctccttgaacgaggaggcaaggcccgcaaggctctgaatctcgctcgggatgatgatcttggtcgccttgccgtcggctgccttgccgaacgcctcgagcgacttgagtcgaatgacctgctcggacggtgccgcgtcgttcagcagcgcgatagaatccgcaagcgccttctgcacggcgagcagcgcctccgcttcgccctgtgcttccttgatcttggaaagccgggtcgcctcagccgccagaacggccgcttccttttcgccctctgcgaccagaatggcggactgctttttgccttccgcgaccagaatagcttcgcggcgctcgcgctccgccttcatctgcttttccatcgactcctgaatagcggccggcggaatgatgttcttcagctcgacgcggttgaccttgatgccccaggcatcggttgcctcgtccaggatcgcacgcatcttggtgttgatgatgtcgcggctggtgagcgtctggtcaagctcgagatcgccgatgatgtttcgcagcgtggtcgcggtcaggttttcgatcgccgccatcgggctttcaatgccgtaggtgaacattttcgggtcggtgatctggaaataaacgaccgtgtcgatctgcatggttacgttgtccttggtgataaccggctgcggcggaaagtcaacgacctgctccttgagcgttaccttgcgcgcgatgcgctcgaacagcggcaccttgaaatgcaggccggtgttccaggtatcgcggtaggtgcccagacgttcgatgacgtaggcgcgcgcctgcgggacgataacgatattgctcgcgataaacgcgatgagcaggatcagcagaatgatccagatcaggggtccgatgaaaaacaagggcatattttactccttttctccgttggtttcggttttctgaacgattgccttgacgccgcgaatttcgaggatcgtcactctggctccggcaggaacgggagtgccgtccttcgtgcgcgcggtccattccttgccgagcacgcgcaccgcgccggtttccgccagattgtcgatcggctcagtgaccacggcgctctgaccgatgatgcggtcggcatttgtcgcctgtctgcctgccttgaggaagcggctgaacagcggacgcacgagcagcagcatgactgcggacagcaagacaaaaattacgagctgcatccatatggatgcgccgaaggttgccgcgacgagcgccgctgcgccgccggccgcgaaccagatgccgcacagaccaagcgtcgccgcctccgccgcgatgctgataatgatgacagccagccagaaatacaggctgtctatgccaaacaacatgctctatcctcccttccttttccatcagtatagcataacccgagagaaaagtatagttacagcacggatttttttcagcagtttgaacaattttcacacatagaaaaagagcgctgcatcaagcagcgctccggaactggtggacattaacgggttcgaaccgctgaccttccgcacgtcaagcggtgcactgaaaacagccaaatcgtcagctatatcccaacaaacagcgc

SEQ ID NO: 13029 - DNA, 145 bp, Unknown
  gut microbiota DNA sequence
tgtaagctcagattcaactgcttattggtcatgcctaccgcttgcagcacaccgtattcctgcttcttcgtggtgatattgatgatcatggtgtttgccagattcataaacccaatgagaccgacaattgccatgaacagatagc

SEQ ID NO: 13030 - DNA, 181 bp, Unknown
  gut microbiota DNA sequence
cgtagcgggccttgacgtcctcgacctccttcgcgtacagggcgtcggccttgtccgggaagttgttcttgagggaggcgaagcggttctcgcccatcaggaagtccatgaccttgtcggtgtccggctccttggagtcgagctggaacgggttcttgccctccgcgatgcggcgcgggtc

SEQ ID NO: 13031 - DNA, 396 bp, Unknown
  gut microbiota DNA sequence
aatctatttcaaactgaataccgcattgccgccgtttattcccttgccgcgcttcatgctggcgggcgaatattccatcaacgccaagctgctatatgggcttctgctcaaccgcaccatgctttcccagaaaagcggctgggtgtccgaggatgggaatgtgtatgtgatctatacgatcaagcagatggcaaacgatcttgaccggagtgagcggacggtcaagaccgccctgcgggagctggaaaatgccgggctgatcacccgcgtccgtcagggctggaatcaggcaaaccgcatctttctgcaaatcccggacagggtgcaggtttcttcccgtccagagggcaatatctgcccaatggatgtgcaggattcttccccttgcatggggca

SEQ ID NO: 13032 - DNA, 953 bp, Unknown
  gut microbiota DNA sequence
gtgtttttgctgtgctttgctgcgctcagcagcgcgttttggtcagagacagaaaacacgattgcagaataaggaggaaccctacatgaacgcagatgttgtcattgtcggcgcgggccctgccggtatcttcacggcgctggagctgctgcgccgcggctccccggaaaaaatcgtcatgatcgagcaggggcaggccattgaaaaccgccgctgcccgaaggccaagaccggcaagtgcatgaactgcaagccgtattgccacatcacgaccggtttttccggcgcgggcgcattctcggacggcaagctctcgctgtgcagcgacgtcggcggcgatctgcccacgctcgtcggcgagcggcaggcgcaggagatcatcaactacgccgacagtatttacctcgagttcggcgccgatgagcacgtcgagggccttgagaacacggaggaggtcaagcgcatccgcacgcgcgccatccgcgcgggcctgcgtctggtcgactgcccgatccgccacctcggcaccgagaaggcgcacgaggtctacctcggcattgagaattacctgcgcgaccacggcgtggagatgctcttcggctgcacgtgcgaggacgtcatcatgcgcgacggccgctgctgcggcgtcgtggcgcacgacgggcatcaggattataccatcgaggccaggcacaccgtcatcgccaccggccgccgcggtgccgactggctggagaaggtctgcctcgagcacggtgtggagcacaagcccggcacggtcgacatcggcgtgcgcgtcgaggtgcgcaacgaggtcatggaatccgtcaaccgcgtgctgtatgagtccaagctcatcggctacccggcaccgttcaaaaacaaggtgcgcacgttctgccagaaccccggcggcttcgtgtcgcaggagaactacgacaacgatctcgccg

SEQ ID NO: 13033 - DNA, 1599 bp, Unknown
  gut microbiota DNA sequence
cacgaacgtggccatcctctgctcgcataacttttccgtgccgttcaaccagccgatcgcctacgcgcagaaggtcggtgagctgacgaacatgctcggcgcgggccatattatggtgcagcgcttcggagatattctcgacggcaagcgcacctggcagaaggagctcgcgcagtcgaacgtccgccccacgctgccggacgccgttgcgggcgatatcacgtccgccatgccgtaccgcgccatgctcaatatcatcaacttcatcaaggccatggacaaggtcgtgcccggctttgccgcctacgagacgctgctgtattctccggagctgaagttctacagcaaccgcatcgccatggacgaggacctgaacacgaacgtgcccggcctgcactgcctgggcgattcctccggctggacgcgcggcctgatgatggcctcggccatgggcgtgctcatgggccgcaagctcgccggtatgctctgagccgtggcggggagctttgtcagcttttacacaaaatgcttgacaaatttccgcaattcggtactattaaagggatggaaaacggatatatccgcccccggcggagggaaggaatcgtttatggatggactgaaaaaagcatattaccgtacttaccagcaggtgtttgacattggcatgcgctgcctgcactggcgcaagccaatcgtgatctccggcgccggctgcatccggcaggtcccggacgtgctgagcaagagcggcgtgacgaaggtcatggtcgtcaccggctcgcacgtggtcaagtcgctcgggccgaagctgtttgccgcgcttgaggacgccggcatgccttacgaagtgttcagcgaggtcgaagccaacccctcggtgaacacggtcgagaagatccgcgcgcagtacacggagaccggctgcagcggctttgtcgccctcggcggcggcagcccgatggacgcgaccaaaggcgcggccgcccgcgttgcctgcccgaaaaagagctgcgacgatatggccggtgtcatgcgcgtcggcaagaccgtgccgcccatcgtcgccatcccgacgacgtcgggcaccggcagcgagacgacgatcgctgccgtcatcaccgacagcgagacgcaccacaagtacgcgctcatggacctcaagctcatgccgctgtacgccattctcgacccggagctgaccgtcggcctgccgccgcgcacgaccgcgaccaccggcatggacgcgctcacgcacgcgatcgaggcgtacatcagctggacatacaacaccaaggagagcctgcgcctcgccgaagaggccgtcaagctcatctttgataacctcgagcaggcgtatcagcacggcgaggatctcaaggtgcgcgagaacatgatgatcgccgccttcaaggcaggctttgccttctcccgcgccggtgtcggcaacgtgcacgccatcgcgcacacgctcggcggcctgtacaacacgccgcacggtctggccaacgcggtcattctgccgatcgttcttgaggactacggcgaggccgtgtatccgaagctcgcgcgcctgtgcgagattgccggcgtcaagac

SEQ ID NO: 13034 - DNA, 172 bp, Unknown
  gut microbiota DNA sequence
tgaagcattcggcagcgattatctgacgatcgaggacgaggaaggcaacgagttcgagctggaaattctcaacgagtttgagctcgacggtcaggactacctcgcggcgctccccgccgacatggacgaggacgaccccgatttcggcatcatcctgctcaagatcatggag

SEQ ID NO: 13035 - DNA, 23049 bp, Unknown
  gut microbiota DNA sequence
gcagatggcgaccgttcgtccgggcgttctgaagaagggcgagtacaacgaggctaaggctaacgcagtagtcgttgagccggtagctttcgagctgtccgatgcagacatcaagaccaaggttctcgaggtcgttaaggaagctaaggagctggtcgacctgaccggcgctgaggttgtcgtttctgttggccgtggtatctccaaggacgttgagaccggcatcaagctggctgaagagctggctggcctgttcggcggcgttgttggcggctcccgtgctgcaatcgactccggctggctgtctgctgaccaccaggttggtcagaccggcaagaccgtacatccgaagctgtacgttgctctgggcatttccggcgcgatccagcacaaggctggcatgcaggattccgagtgcatcgtagcagtcaacaagtctgactccgctccgatcttcgacgtagctgactacggcatctgcggcgacctgttcaaggttgttccgatgatgatcgacgcgatcaaggctgctaaggaagctaagtaatttagctgtacttttagacaatgaaagaccgcagagattctctgcggtctttttatctgtatctgaatagcaatgccaaaaatgtagaaccgcaccccatttcatggcggcaggtgttccctgctgcctgagagatggggtgcggttttgtgtctgattagattatattgctctgtccatttctgccgtcacaacagcgactgagcgtgcgccgagtgtaaagcattgcccgtcaaagggtatgtcaggcgtaaaggcgttctgagcaaatgtgtgcagtgtcagaacccagtgcatgccgtcaggtggcttcggcacctgctgctcgtgcgcttcccagtgcgaattgattgcaatcaatactaaatcatcagctgtatcttccgcatttcggccggaaaagagtacaccgatctgtctggtatcgtcattcatctcgttattccatgccacacccagattatgcagcgaaacatctggccagccgcagtgcgcaggctttgtcgcgccgcgcagcaccggatgcgcatggcgcagcgaaatcagtctgcggacatactgaaacatatcgcggtttgtctccagcagcgaccagtcaagccacgaaatttcgttatcctgacagtaggagttattgtttccgtactgcgtattgccgaattcatcgcccgccagaaacattgctgcgccgcggctgcaaagcagcacggtaaaagcgttttttcgtaaacggtcacgaagcgcgttgatcttcagatcatcggtctccccttctgcaccgcagttccagctgtgattatcgttcgcgccatccgtattgtcccagccgttagcttcgttgtgcttttcattataagcataaaggtcgtggagtgtgaaaccgtcgtggcaggtaatgaagttcacagaagcgttctgacgcttatccggcggatacagatcaggagagccgcagatgcgctgtacggcggcgtatgcaagacggtcatcgcccttgagaaagcggcgcagatcatcgcggtattttccattccactctgcccagcgattccatgacgggaacgaaccgacctgatacatgccgccggcatcccacgcctctgcaatcagcttcacgcggccgagaatggggtcgaatgccagactttccagcaacggcggttcggaaagcggaccgccgtcctcatcgcgtccgagaatgctcgcaagatcaaagcgaaaaccgtctacgcggtattccacgacccagtaccgcagacagtcgaggataaactgccgtaccatcggctgattgcagttgagcgtattgccgacgccggagaaattatagtatttgccgtccggagtgagcatgtagtagatattattatccatgcccttgaaggaaaagcatggcccgtgttcgtttccctcggcagtgtgattgaatacgacatcaaggatcacttcgatgccattggcattgagcgtgcggatcatggtcttcagctcagttccctcgcggttgtattccagagccgctgtatagcctgtgtttggcgcgaagtagcacaccgtgttgtagccccagtaattgagaagctgctttccgtcgatcacccgttcatccgccagttcatcgaactcgaataccggcatcagttcgactgtattgatgccgagttctttcagatacggtagcttttccatcagcccggcaaaggtaccgggatgttcgacctgagagctttcgtgcatggtaaagccgcggacgtgcatttcatagatgatcatatcctgaaacgggacatgtgcatcttcaaaatcaccccagtcaaacacatcctcgaccacgcgcgcatgataggagctgtcggatgccgggcggacgccccatcggctctgaccagtcacagcacgcgcgtacgggtcaagcagaaatctgttcttgtcgaacagcagaccgcgcgccggatcgtacggcccgtccatgcggtaggcatattcgaattccgtgatgtcgagaccgaacacgatcattgaccaagtgttaccgatgcggaactgctcgggaaacggcagcacggcatagggctgctgctcggtgcggcggaacaggcacagctcacagcctgttgctccgacagaatgaatggtaaagctgatgccgccgggtacgatcgttgctccgttggtcaggaacagtcccggacgtacagaaaagccgctgatgacattagtagcattcatttcgcgcatgccgcagtgcagtgtttttccgcagcagggatctgaatttagcatagtccttcctcctcccctgtttcaggaaagcaaaaagccgcagcagggatgcgctgcggcttttgaaacaggtaatgtgggttctgcctcggggggacagatgcagatctttagccctgaacagctacgacctcaacctcgaccttggcgccgagcggcagagctgcaacctgtacacaggagcgagccggagcctgttcggtgaaatacttagcgtaaacgccgttgaatgctgcgaaatcgttgatgtcagacaggaaacaggtggtcttgacaacgcggtcgaaggatacgccgccctgtgccagaacgtactgaaggttcttcatgacctgctcagtctgctcctcgatggtagcagcctcgatcttgccggtagccgggtcgatcggaatctgaccggaggtgtagatgaagccgttagaagcgattgcctgagagtacgggcctactgctgccggtgcgaggtcggtgtgaaggacttccttgatagccataataatggttctccttttatatcttttatttttgaaacaaatttagaaatgtgtatccacgcagcagcttacttcttaccgcccttggtctttttcagacgctcggtgttggacagaacgcgcttgcgcatacggatgctctccggggtgatctcgagcagctcgtcgtccgaaatgaactcaagcgcagcctcgatggacatctgacgcggcggaataaggcgcagcgcatcatccgaaccggaagcacgcatattggtcagctgcttcttcttgcatacgtttacagccatatcctcaccgcgcgggttttcgccgacgatcatgccttcgtataccatcgtgccgggggcgatgaacagcgggccgcgctcctgcgcgttaaacaggccatagccaactgcctcaccggtctcaaaggcgatcagcgaaccggtggtacgcttctggatgtcgcccttgtacggctgatagctgttaaagacagaggacataacgccttcgcccttggtgtcggtcaggaattcggttcgataaccgaacaggccgcgtgcggggataatgaactcgaggcgcatacggtcagcacccttcggattcatggagaccagctcgcccttacgggagcccatcttctccataatggagccgacagcgtcagccggaacgtcagcgatcatgcgctccatcggctcgcaggtcttgccgtcgatctccttgagcagagccttcggtgcgccgacctgaaactcatagccctcacggcgcaggttctcgatcaggatggacagatgcatctcaccgcggccgcatacgcggaatgcgtcagtggtatcggtttcgttaacgcgcagagatacgtccttgagcagctcacggaacagacgctcgcgcagatgacgggaggtgacaaacttgccctcgcggccggcaaacggagagtcattgaccatgaaggtcatctcgaccgtcggctcggagatcttaacgaacggcagagcctcaacgtgctccgggtcgcacagggtctcgccgatggtgacgccttcgatgccggagaagcagacgatctcgccggcctgcgcctcttcgatcggctgacggcccagctcctcgatggagtacagggtaacgagctttgcgttgtacggcttggtgttgccatggtagtcgcagaccgtgacctgctgaccgaccttcatcgagccgcgctcgatacggccgatgccgatgcggccgacatattcgttgtagtcgatagaggaaacgagcatctgggtcgggccctcggtgtcaacgtgcggcgccgggatatgctcgaggatctgctcgaacagcggggtcagatccttgccctctacgttcggagacatagatgcagtgccggcacggccggagcagtatacgatcgggctgtcaagctgctcgtcggttgcatcgaggttgagcagcagctcaagaacctcgtcgccgatctcgttcagacgggcgtccggacggtcgatcttgttgatcgcgatgatgatcttgtggccgaattcaagtgccttctgaagaacgaaacgggtctgcggcatcgggccctctgctgcgtcgaccagcaggacaacaccgtctaccatcttgaggatacgctctacctcgccggaaaagtccgcgtggcccggggtgtcgacgatattgatcttgacgcccttgtagtgtaccgaggtattcttggccagaatggtaatgccgcgctcacgctcgatgtcgccggagtccatgacgcgctcctctaccacctgattttcgcggaaagcaccggcctgcttgagcatctggtcaaccagggtggtcttgccgtggtcgacgtgcgcgatgatggcgatgttgcgtaaatcgtttcggatcatatatattcctccattattaaaggtcattttcgtacatcatctattatacttgtttttctgcttgttttctacctgttttatcgtcaaaattatgataatttctgcgtgaatttctgtaaacttttgcgtgacccctttggtacactgtttttcatttccggttctgcaaaaaatgtacgcgaaatgtggaaattttctgcgacttatgctataatgacagtgcaatctatgaatgacgaggaaataacatgaaaggtattattcttgccgcgggcaaaggctcacgtctttaccccatgacacgcccggtctgcaagcccttgcttccggtatacgataagccgatgatttattatccccttgctgtgctgctggaggcagggatccgggacattctgattatcattccccccggagaggaaggcccgttttaccgtctgctcggctcgggcggacgtctcggcgttaacatcacctacgaggtacaggaggtcgcgcgcggcattgcggacgccctgctgatcggctcgcagtttatcggaaacgatgatgtctgcctcgtactcggcgacaacatcttttattctccgaaattcggcggctatctcgagcaggctcttcagcaccgtgagggcgcctgtgtattcggctattatgtggatgatccgcgtgcgttcggcgttgtcgagttcgatgcacagggccgcgctgtctccatcgaggagaagccgcgctatccgaagtcgaactatattattccgggtctgtacttctatgacaacagcgtcatagagattgcgcgcaatctggagccttccgcacgtggtgagcttgagattacggacgtcaacctggagtatatgcgtcgcgagcagctgcatgtagtcaagctcgaccgtgattttgtctggctcgatgccggcacggcggacagcctgctctactccgcgcaggaggtcaagcgtgtacaggatgcgaccggacgctatattgcctgccccgaagaaatcgcataccgccgcggctatatcgaccagaaaaccgtgctgcgccatgccgcagagctcgataagacgctgtacggacgctatctggaatgtctgtaacctacaccgagatctgacaggattggagagattataatgccggtttacacagaaacaaaaacctaccgcaccaaggctcacatgggtatgatcgatgtgaccgatgacttccgcgcagcggtgcagaacgcctgccgcaacaccgggatgaagtccggcacgatcaccggctttacgaccggcggcgttgcaggtctgacaacgctcgaatttgagccgggcatggtctatcacgacctcaaggctgcgatggatgtcttttcgccctatcgcgacgaaaacggccgtgtgatctattaccatcatcatgatacctggcacgatgacaacggctcgtcgcatattaaggcggctctcctcagcccgttcatcgtcatccctttcgtcaacggcgagattacgatcggcccgtggcagaatctgacgctcgttgagtgcgatacgagagatcgtacgcgcgacatcgtttttcaggtaatgggcgaataaacgcatatcagaaacgcgaaaaggcacgccgtctggcgtgccttttttactttgcgaagcagcggatgcttcaaaagcaaacgcttttgaattactgatgtgcctcgatgtagtttacgatgtcaccgatggtgctcatctttgcagcttcttcgtcctcgatggtgacaccgaagttctcctcgagatccatcatcagctcaactacgtccagagagtcagcgttcagatcctccttgaccttggtctccatggtcatggtggaagcatcagcgtcgaacttgtcagcgagaatttcgcataccttttcaaacattggggttacactccttcattttgatcttgatttattgttctgaaaactccgattttacggaatttttcataccgtttctcgagcatcacttcgatgctcggctccgcagacagctctgcgagctggtcgcgcagcgtgcgcgcaacattacgcatcagctgggcattggacgagccttcctgaataatgccttcgatcatgccgaagctgtacagatcctgcgcggtaatatgcagggtatctgcggcctccgcctcgcgcgtcgggtccttccagagaatagaagcacagccgcgcggcgaaatgaccgaatacagcgcgttttcaagcatgagtacacggtcagcaaccgcgagcgcaagtgcgccgccggagccgccctcgccggtcacgattgagatgaccggagtcttgagctcgatgaactcatacaggcagcgtgcgatcgcttcgccctggccgcgttcctccgcgcctacgccgcagaatgcaccgccggtatcgacaaaattgatgaccggtcgatgaaatttctcagcctcgtgcgcgagacgcagcgcctttcggtatccctcaggatgtgccatgccgaagttcgcgtccatgttctgttcgatggtgcggcccttgcgatgaccgatcacggtcacaggggtaccgccgaaatagccgatgccgcccagaatcgcgtggtcgtcaccgaaataacggtcgccgtgcagctcgatgaaatcgtcaaacagctcgtcgatataatcggtcagcatcggtcgtttggtatcatgaatgatacgcattttttcgcttgccggtctgtcagtcacgtttccacacctgccatttctttgccttgggattgcaatgcagtcggagcagcttttcaagcgtttcctttaattgattacgcggaactattttatcacagaaaccgtgtgaaagcaagaattccgacgattgaaaatcatccggcagtgtctgaccaatcgtgccctcaataacgcggcggccggcaaagccgacgactgtgcggggctctgcaagaatgatgtcgccgagcatggcgaacgacgcggttacgccgcccgttgtcgggtcggtcagcacggtgatatacagcagaccggcgtccgaatgacggcgcgccgctgcacttactttcgccatctgaagcagagaaaacatgccctcctgcatacgggcgccgcccgagcaggtaaacagcacgaccggcagtcccttttcagtggcatactcgaacagacgggtcagcttttcgccgacgaccgaacccatggatgccatcatgaaatgactgtccatcacaccaagcgcagtctccacaccgccgatcttgcagacaccggtcttgactgcatcaggcatgccgaccttttcggcaagctcctttgtcttgtccgaataacccgggaagtgaatcgggtctgcggatgcaagatcgccgtatagctcctcgaaggtgtccttatccgcgatctgacggatgcgggtacgggccagcaggcggccgtagcggccacagtgcgggcacacatacagattcttgccgtaggcgtaggccttcagctcggcgccgcagcccttgcaggtgacgaccttgttggtggtctcttccccctgcggtttgagttccatggaggtctcgcgcgttttctggaacaggtcgatcagacccatacttactccctccctattcatctgcggtcaatcgctgataagcgaaagagccgccgttttattgatcgaaatcgccatttgcgattgaattaacattgaagttggcgtcaacgaacgccttggagcacagaatgtgcatctggtagtccgtgccggtcacgacgccctcgaacagcgtttccgcgagcgcgcggcgcatgcggtcgatggcctgtgtgcgatccgagccatagacgatcagcttgccgatcatcgagtcgtagaacggcgggattttgtatccctgatatgccgcagaatccacgcgcacgcccggtccgcccggcagatgcagggagaccagagtgcccggacagggcgcaaagttgcgagacgggtcctcggcattgatgcggcattcgatcgcatgaccgcgcataacgagatcctcctgcttgaaggaaatcggctcgcctgccgcgatgcgaagctgctcgcagacgagatcaacgccagtcacctgctcggtgaccggatgctcgacctgaatgcgggtgttcatctcacagaaatagaaattgcggtcgttatcgaccagaaattcgatcgtgcctgcgctgcggtagccgacgcgctttgccagcgcgacagccgcgctcgtcatcttttcgcgaagctcaggcgtgacgaatgccgacgggcattcctcaatgagcttctgatggcggcgctgtaccgagcactcacgctcgaacagatgaaccacattgcccagactgtcgcccaggatctgcacctcaatgtggcgcggattgtggatatatttttccatatacagacggccgtcgccgaagttcgctactgcctcagccgctgcactgtcgtaggcatccttgagatccttgacgctgagcgccacacgaatacccttgccgccgccgccggaggccgctttgagcatgaccggataaccgatgcgctccgcctcgctgatcgcttcatcaaagtcgtgcagaggtccgtccgtgccgagcgcgaccggaacaccggccgcgatagcgttgcgcttggcctccgacttgtcgcccatcagacggatggtcgcagcagtcgggccgataaacgcaaggcctgcctgcgtagtccgctctgcaaaatccggattttcggatagaaaaccgaagccgggatgaatcgcctgacagccggacgcaagcgccgccgaaatgatgttgtccatgttcagatagctttccgccgcgcgcgcaggaccgatgcaaactgcctcgtccgcgatctgcgcatggagcgcctcgcggtcagcctcggaatagaccgcgaccgaaatgatgccgaggtcacggcaagcctgtatgatgcgaactgcgatctcgccgcggttcgctatgagtaccttttgaaacattcgtttaatcctgccttagtccatgattaccatgcacttgatttctgcttccgcagccttctggtcgccgacccatgcgacgccctccgctacggccatcgggccgcggcgcttggtgaagtgcacttcaaggcgcagcgtatcgccaggcttggccatggcgcggaacttggccttgtcgatgccggtgtagaccgcagtcttgcccttgaactcgggcatggagagcagagcgacgccgcctgcctgcgcgagcgcttccagacggaacaccgccggcatgatcggatttcccgggaagtgtccctggaagaagaattcgtcgcctgtcaggtgcagcagaccaatgacatgctcctcgtccatctcgacaatctcgtcaacgagcagcatcggcggacggtgaggaaggatctccatgatctgttctttgttcagcatattataatccctctttcataaaaatgcaagagccacttagtgatttaagttactcgatgatgcagagcagctggttgtactcgaccatatcgcctggctgcgccatgatgcggacgaccttgccgctgcacggagccttgatctcgttcatgaccttcatggcctcgatgatgcagagggtgtcgccctccctgacctcctggccgaccagaacgaacggcggttcatccggcgagggagaagaataaaacgtgccgacgagcggactcttgacctgcgtaccggccggaagatcgtccgccggcgccgtttcggtctctgctgctgcggctgccgccggtgcagcggacgctgccggggcagcggctgcggaaggtgcagctgcgatgataggcgccggagcagccgctttgatcttgatcttgacgccctcgagctcgatggcgacctcgcccagcttcttcgaagcgagcgcatccatcagctcaagcgcgacatccttaatttcattgatttccataatacctcgttacaccttcttgatcaggatacatgcgttgtgaccgccgaagccgagcgagttggagatggcaacgttgatcggcatttcgaccgccttgttcggggtgatgtccagatcgcattccggatcgggctccttgtagccgatggtcggcggaacgatgccctcgcggatggccatgacgcacgcaatcgcctcgaccgcagccgcgccgcccagcagatggccggtcatggacttggtggaggatacctttaccttgtatgcttcgtcaccgaacgctttcttaatggcgatggtctcgtatttctcgttgagcggcgtggacgtaccgtgcgcgttgatatagtcaacgtcggccggagtcagaccggcatcctcaatggcaccgcggattgcatgcgccgctgcctcgccgtccggagaggggctggtgatgtgatatgcgtcgccggatgcgccgtagcccgcaacctctgcaaggatggtcgcgccgcgctgctgtgcgtgggtcaggctctcgagtacgagacagcccgcaccttcgcccatgacaaagccggaacggcgtgcgtcaaacgggatggatgctgctgtcgggtcgtcgcccatgtgaacagccttcatattctggaagcctgccatcgagatcgggatgatgccgttctccgtgccgccgcagacaacaacgtcctggtacccgtggcggatggcgcgcattgcctcaccgatggagtggttgccggtcgcgcacgcggagaccgggcagaaattctcgcccttgaagccgaagtgcatggagatataagctgccgcgatgttggcgatcatctccggaatagcgaacggcgaaacgcggccgggacccttttcgagcagcttcgggacctcctgctcggcaacgtgcagaccgcctacgcccgagccaaagatcacgcccgtgcgatagggatcgaaattgccttccttgaggcccgcctgctcgacagcctgaatcgctgccgccattgcataatgcacatttgcgtctgcgcggcgcgcctcacgcttttccatatactgagtcgggtcgaagtccttgacctcagcacccagctttaccttgaaatcggacacatcaaacttggtgatcgggccgatgccgcatttgccggtcttgagcgattcccaaaacgtcggcacgtcattgccgaccggagtgatagcgcccatgccggtgattactacacgttccatatatttgctccttcattccaatatcgtaactgtgcagccactgcacagtgtcaaatcttagtagagtccgccgtccgcaataatggtctggccggaaatatagcttgcggcgtcagaggcgaggaaggaaaccacgcctgcgatctcctctggcctgccgaagcggccgagggcgatctgcttttttgcattctcgcggatctcctcgggtactttgtcgctcatttcggtcgcaatccaacccggagcgaccgcattgaccgtgatgccgcgtgcaccaagttccttggctgcggtcttggtcatgccgaccatgccggccttggctgcggtgtagttgatctgaccgtagttgccggtgaaagcagaaaccgaggtgatgttgataatgcggccctgctttgcacgcatcatcattgcgccgcactggctgagcatgttgaacgcgcccttgagattggtgcggataacggcgtcgaactgatcctccttcatgcggatcatcagaccgtcgcgcgtaatgcctgcattattgacgaggatatacggcacgccgatctcggctttgatctctttgagtgcagcggcgcaggcgtcatagtctgccacatcccactgctttacatatgcttgaacaccgtatgcacggcatttttcggcaactgcctctgccttttcgaccgaggcggcacagttgataaggacgtcatgaccgtcctgtgccagcttttctgcgatggccgcgccgatgccgcgcgagccgccggttacgattgcaagtcccatttttgttctcctgtgatcgggttatttattcaaatctcttgtaagcatttttcagcagctcctccgcctcggcggtcatgcccttgaggatgtcctcgcacggacggagttccctgagcatgcctgcgatctggccggacatgaaggtgccttcctcatagttgccatcctgcacagccttgcgcagcgaaccggcggttgccttttcaagctcctcgagcgaagcgtcggtattctctttttccagttcaaggcacttgcgcgccatcggggtcttcagcgaacgaaccggatgaccggacggacggccggtgacaacggtcgaaatgtcggtcgccttgagaacaagctccttatatttgtccgagatgcagcactcgttcgacgcgaggaataccgtgccgcactgaacgccctctgcaccgagcataaaggatgctgccatgccgcggccgtctgcgataccgccggcagcgatgacaggaatgctcagcgcgtccacgacctgcggcacgagcggcatagtcgtcagctcgccgatatggccgccgccctccatgccttctgcgatgactgcatccgcgccggcacgctccatgcgctttgccagtgcgaccgatgcaacgaccggcatgatcttgataccggcgttcttccacgcggccatatatttgcccgggttgcctgcgccggtggtcagcacctcgattttttcatcgatcgcgagctgcgccagatcatcggcgttcggggagagcagcatgatgttcatgccgagcggcttgtccgtgatctcgcgcgccttgcggatctcgtcgcggatataatctaccggcgcggcgccgcctgcaatgatgccgagaccgcctgccttggatacggcagcggcgagatgatgctcggcgatccacgccatcgcgccctgcacgatcggatattcgatgccgagaagttctgtgatcttggttttcataataagactccccttttctttacagtttcagtacaaatgcgccataggtaagaccgccgccgaaaccggtgcagacgatggtctgaccctcgcgcagcagtccgtttctgcgcatctcattaaggcagatcggcacgcttgccgaggaggtgttgccgaagcggtccatgttgacgtaaaccttttccttgggcagatgataacgccttgcgataacgtccagaatgcgcaggttggcctgatgcggaacgacccagtcgatgtcatcagcggtgattccggcgcgctgaagcgcggtatcgatcgcctgcggtactgcgcgcgcggtgaagcgcacaacagctgcgccctgcattttcagaaaacgcgccttgggatctactgtgcggtcctctgcgaacgggtcttcgaccggcagcgcttccatgcgcagatattccgcacccgagccgtctgccgcgataaaggtggactggatgccgagattatcgtcctcggtcgcgcggtaaaccgccgccgctgcgccgtcgccgaacaggatgcaggtgccacggtcggtgtagtcgacgatacggctgagcgtttctgccgaaacgacgagcacagtcctcgccttgcccgacttgatgtagcagtccgcgatatcggtcgcggaaacaaagccggtgcaggcattgttgatgtcgaacgcaccaatcgcgcccgcgcccagcttgtcctgaaggatcgcggcggtgttcggcgtgttggtatcgggcgtgcaggtgctgaccagaatcagatcaagctcgcctgcgtcgatcttcgcatccgcgagcgcatcctgcgctgcgccgagcgcaagctcccatgtatgcatgttttttgcaatacggcgttcgcgaacacctgtgcgctgtacgatccattcatcattggtatcgaccatgtgctcaagcattgcattggtaaggacaaaatccggcaggcatgcgcccgtgccgatcagttgactgttgatgatttccacgctccccagaattttcgaatcgctctccccgaaagcgtggaaaagcgacaatagtttgattgacaaagtaatctctgactattataataaaagcacacgaaaatgtcaaggtaacaccgcataattgacagcacggcgcgtaaaaaaagcaccgttgtccgtgcggcagaccgcgacagctttatttttggaggaacagacatggaatacggttttgcatttttccccggtcagggtgcgcaggctcccggcatgggcaaggacctttatgagaattccaaggcggcgcgcctggtattcgaggaagccagcgacggcgcaggcatcgacgtcgcaaagctgtgcttcgaaagcgacaaggagaccctttcgcgcaccgaaaacagccagattgctatttttacgcactctatggctgctctggccgctctgcgcgagaacggagtagcgttcaaggctgcggccggtttttcgcttggcgagtacacctcccttgcagcggcaggcgttgttacactcgcggacggcgttaaaattgtttccaaacgcggcaagctgatgcagcacgcagcagacacgatcgacggcggcatggctgcgattctcggccttgaggacgcgaagatcgaagaggcctgcgcagcagtcaagaacggcattgtccgtccggtcaactacaactgcccgggtcagctcgttatcgccggcgaaaaggcggcgctcgcagaggcgatcgaaaactgcaaggcagccggtgcgcggcgtgcgcttccgctcgctgtttccggcgcgttccacacgccgctcatggcagaggcggcagctgagcttcgtgcttttgtctccgacttcaccttctccgcgccgactatggatatctactccaatctggacggtcaggtatacgattgcagcaatcttccggagcatcttgagcagcacatgatctcccctgttcgctggacccgtctggttcagaacggcatggcggcgggtctgacctcggcgtgcgaggtaggccccggcaagacgctgaccggcttcgccggcaagattagcaaggagctgacctgcaagaccgtgcaggatatggcgggtgttcaggccgcagcggaagcgtaacgctttcgttaaacttgataaaatcgaagggatgagccgcatcaggttcatcccttttttttgcacatttgttacgcgaaaaccttgaacagcatgatgactgcgcccagaacaacgagcaccacgccggtcgcgtggttgagcgttttcggctgcgcccggttggcgaaaaccgccgcgatgcgcgcccagagaagcgtaaacaccacgcacagcgcccatacggtccagtcgggtgtgccgccgatcatgaaatgcgacaccgcgcccgtcagagcggtaaaggtcatgatgaaaacgctcgtgccgacggcggttttcagctcgtacccgagcacgctcgtcagaatgagcagcatcatcatgccgccgcccgcgccgataaagccgcagataaagccgatcagaacgccgctgacgatggactggataagccgcttgtgcgcatcaacgcgcatcatgtcctctcgcgtggtcatgaccgggcggacgatgaacttgacgccgagtaggaaggtcatgaatacggaaaacgaacccatggtcgcagacggcagcagacttgcgacatagctgcccacgaccgtgaacagcagaacgctcagcatcatgacaagaccgtttttgacgtcgaggtttttgttcttgtgataggtataagccgaaaccgcgctcgcgagcacatccgaggacagcgcgatgccgaccgccatatacggctccatgccgagaaacgtgatgagcatcggactgatgaccgcggcggcgctcattccggcgaaaccggtgccgagtcccgcgcccatgccggcgaaaaacgtgacggcgacgacagacagcaggttcatttactccgcctccttgagcagcgcatccatgttgcggtcgattatctcgatggcagcgaaaaagaccgtctgcgtaccttcatccattccctcgagcagatgctggaagaaggctttctgcatggttctcccctgctctatgaccggctgcgcgagcggcgtgcaggtaagctcgattttgcggcggtcgttctcggcggtacgccgcgcgagatacccctcccgcaccagacgatctacattgaccgaaaccagattggccttgatatggcggatttcaacgatgtcgcgcgccgagcggcagccggggttgttcgcaaggaacatcagaatgtcaaacgccgtctgcgtcagtcccagcttctgacacagcggcttgcataccgcatgatacgcgagcgcagtcttctgcgcaaattccattccgcgattcattatacgcctccatagatacaattttagatatttcaaatttgaaataattatagcatacggggaatgccgtgtcaatcgggagatagaaaaatccaccgcatctgtgaaaatacggtggaactatgaatagtatattaaggcaataccgcataatgggacaagagcgatttgcgcaaggcgccgcagttttcattgtgcggtgttgccttaaaggtaaactggaattgattagtcttttggcatcgtgcatttccaagctataaatgcaagaataccgcagaccacagcaactccaatgcaaactgttcgtgcaatgctgctcaaatccaagaaaccacttcctgtacctgtaattgcacaggcaattgctaaaatggtcatgagaacaaaaacaatactaacaatcctcaaaatggtatttttcatgccatcacactccttcgtcaaatcccgatttattaaccattgtgaataaaaaccaactttgcgccctcaacaaagaaaaaccaccacaatttcatgaaatcacggtggataatggtggacctgaagagattcccggaaacgcctgcggcgttccggtcgcgtggcgattgaaaaagagctcgaaactcttcggcaaaccggtgcagtaaataaaaaacgaagcagaccgttaccgatacacttcgttttttatggtggacctggagggattcccggaaacgcctgcggcgttccggtcgcgtggcgattgaaaaagagttcgaatctcttcggcaaaccggtgcagtaaataaaaaacgaagcagatcgttaccgatacacttcgtttttagtggtggacctgaagagattcgaactctcgacctctcggatgcgaaccgaacgctctcccaactgagctacaggcccaaatattcattttgccgtctggaagcaactctgtacaaacttcccttgacaattactaattatatatgtagaataaatctatgtcaagacctttttcatctggtcaggcaaaaaaacttcgtgcagcagccagctgtgccaaaaggagattgaaaatgaacaacagcgaaaaaacaatggaaaaaatcgttgccctgtgcaagggccgtggcttcgtatactccggctcggagatttacggcggccttgcgaacacctgggactacggcccgctcggcgttgagttcaaaaacaacgtcaaggcggcgtggcgcaagaagttcgtacaggaaagcccgtacaacgtcggcctcgactccgctattctcatgaaccccatgacctgggtcgcttccggtcacgtaggcggtttctccgaccctctgatggactgcaaggagtgcaaggagcgcttccgtgccgacaaggtcatcgaggactggtgccacgagaataacttcgacctcggcaagagcgttgacgcgctgagccaggccgagatgaagcagttcatcgatgagcacgagattgcctgcccgacctgcggcaagcacaactggacggacatccgtcagttcaaccttatgttcaagaccttccagggcgttaccgagaatgcgaagaacgagctgtatctccgtccggagaccgcacagggtatctttgtcaacttccagaacatccagcgcactacccgtaagaaggttccgttcggcgtcggccagatcggcaagtccttccgcaacgagatcaccccgggcaacttcaccttccgtacccgcgagttcgagcagatggagcttgagttcttctgcaagccgggtaccgatcttgagtggtttgcatactggaaggattactgccacaagttcctgctgtccctcggcatgaaggacgagaacctgcgtctgcgcgaccacgagccggaagagctttctcactattccaaggcgaccaccgacttcgagttcctgttcccgttcggctggggcgagctgtggggcattgctgaccgcaccgacttcgacctgactcagcaccagaagacctcgggcgtttccatggaatacttcgatcaggaagcaaacgagaagtacatcccgtacgttattgagccgtcccttggcgcggatcgtgtcgcactggcattccttatcgacgcttacgacgaagaggttgttggtcaggacaagaacggcaaggacgacgtgcgcgttgttctccgcctgcatccggctctcgctccgttcaaggctgcggtgctgccgctgtccaaaaagctgaccgacaaggccatgccgatctggcacgagctggctaagcagttccctgtcgatttcgacgatgccggttccatcggcaagcgctatcgccgcgaggacgagatcggtactccgttctgtgtcaccgtcgatttcgagaccgagcaggatggctgtgttaccgttcgcgaccgcgatacgatgcagcaggagcgcatcaagattgaggatgttgccgcctacatcgcaaagaagatcgaattctgattttcgctgtctgttttctgccgccgcactttattttgaggtgcggcggcttttttgcttttcggacgcataaagcacgcagaagtacgccatactaagcaggaaatcttaaaaggaggtcctgttcatggacaagaaccattgcaacaccgcaattcactgtacggttgaacagtgtgcaaaccactgctgcagcgccgaatactgctcgctcgacagcatccatgtcggcacgcacgaagcatccccctcggtcgatcagtgcaccgactgcatgagttttaagcgcaagtaagcagaaaaaggacgcagcgtatgcagaaaatgcgtacactgcgtccttttattatcagtctgcggcatagagtgcagcaccgcaggccgcctcttccctgccgtctgacagggtgatctcggagtcgaacgctctcgaaaagctctcgcacagaaaacggttgtttctcagtccgccgcccgagccgatcagtttttttgctgtgccgccggcggcacgatatgcctgatacatttgatgcagctcgtgggccatgccatccatcatgccgtagatcaagtggagcggcgtgaaattctccgccgtgaggccggtgatgctgccggtctgcgtactgtcctgccgtgtgccctcaaacagcggcaggacagtcgggacatcctccgggcggtcagcgcttttgagcagaccttccatcgccgcatatgccgcatatggagcattcgtatccatacccatcatgcgcgctgtctgcgcgaagaagtccgcgagcaacgcataggctctgccgccgcagagcgccgctccggcgagcagccatcccccgcccggcatgggacgtgtctcgagtcccggcacggtcatgcagcgggacgagaaaacggaaaactggctgcctgtaccgacgttcacgagcatttcgtgctcgcgatcccgaactgccgaaagaaagctcgcctgattatccccgatcgctgcggcaacacgcgccctgctgcggcagatgccgataaaacgatcctccgtgagacccggcagaaacgccgggtcaatgccgatgccgcgcagtaccgtttggttaaacgcgcgcttgtctgcgtcaaaaaagccaaggcctgcggcattgctcgtgtccataactggcgtttgcctgccgcagagcttcatggcgatataatctccgatcgtgcacagcgtgaccgcgtccatcggcacgagaccgtgtgcaagattataggcatgtgtaacgaggccatagcctgttgcggcagcgagatcggtctcgctacacagatatgcggtccacgactgcatatctgagctcttttcacatggcgcatcgccgcgcgcgtcctgccacgtgtacagaggacttactgcattcccctcaccgtcgagatagaggatgccgtgcatctgtccggttacaccgatgcgttcgatgtcgggatagcgttcgaaaagcatatccaccgtgcgaagcgcagtgtcaagaatgagctgtgcgtcctgtatgcgctctccgggcagcgtcggcgcgagaaagctgttgtttttgcaggtttcgctcgtgataaagcatccgtcctcaagcacggctgcgccgatcgtcgttgttccgatatcgattcccagacttttcatggtgttccctcatttcggcttggcagctttttcttccattataggagaacgaatagcgaaaatcaagcgtcttcttccagccgcttcctgtaaaagtcaatcaatgcctgaagtgccggagaacgccatttgtttttgtggatgagcagctgtgtccagaccgagacagtgcagtctgtcaccggcaggcggcacagcataccgttttctacaaaggcctgcgtgatgaaatcgggcaggaaggtgagcatatcacttttggaaacgagactgcaaagctgcgtcggattgccgagctcaataagcggtgtgatcgcttcagagcgtgctgcgagcagcttgtcgagtatcctgcggtagctcatgctttcggtcatcgcgaatggctggtcgatgatctctgcaagagaaagcgtcttggctttctccagagcgctccctgccgccgcaacaaaatgcacctgctcctctttttccgcgcagatctcgaaatccggttcatagatatgcgtatcgagggtgaaaacgaggtcagcctcgttttttcggagcatactgaacatattttccgttccggcttcggtaatggtcagccggacgccgggatagctgcgctgaaagtcgatgaaatcgtcatcgaaatagcgtgagcacatcgagctggacatggcaaggtgcagatcgcctgtcacctcgtccgcgtgatggagcgccaccatcagcttttcctgtgcggtcaacacatcgcgcgcatagcgcagcaccagactgccttcctgtgtcagcacgatgcgatgataaaaacggtcgaacagcgccacattcagttctttttcgagctgcctgatctgcgaggatacggtggactgcgtatagccaagccgttcgccggccgccgaaaagccggaatattcgcacaccgccacgaatgtccgcagcacattgaggtccatgaaaagctctccttctacaaacgatattttcgttattataccgcattattatcaattttacaaatgtttctttccatagtaagataaacagtaagagtattatgcagaaagagcgttcctgccctttcggaaagagagtatcaatgaaacgtgagcgtcttggaagccgcatgggcttcatcatgctttccgccggctgtgcgatcggctgcggaaatgtatggaaatttccgtggatgtgcggtcagaacggcggaggcagcttcatgctggtctattttatctgtctgatcgtgctcggaatcccggctatggtcatggaattttcggtcggcagagccgcgcagaccagtcctgtccgtatgtac

SEQ ID NO: 13036 - DNA, 57410 bp, Unknown
  gut microbiota DNA sequence
ggtcagaaatggcatctttggggtgcggtctgcctaatcggcaatatcgccatcatggcattctactgcgttgttaccggctggatcatctattattttgtgaaattcctcaccggtcaaaccgcatccttcggctttgcttccatgatcgccaaccctgttatcaacgtggtatttctgtttgtcacggtcgctgttgcctttctcattctgagccgcgatattcagaagggtctcgagcggatcacaaaatatatgatgagtgctctgctcgtgctcatgcttgtgcttgcggttcacagcgcgctgctcgacggcgcggcagacggacttgccttctaccttacgccggacttttccaagatcaatggttcggttatcgtcggcgcgatgaatcaggcgttcttcaccctgtccaccggcatgggcggcatggcaattttcggcagctacatcgacaaggaccactcgctgatgggtgagtcggtcaacgtcatcgtgctcgatacgtttgtcgccattctggcaggcttcatcatcttcccggcgtgctcgacctatggtctggaggtcaacgcaggcccgagcctgctgtttgacaccatggcgagcgttttcaatcacatggcaggcggccgtatctggggcacgatgttcttcctgttcatgatctttgctgcgctgtccaccgttctcggcgtgtgcgagaacattcttgcgatggtacgcgaactgaccggctggtctcgccccaagggctgcatcatctgcggcacaggcatcttccttctcgcgctgactaccgctctcggatacagcgtcattcattttcagccgtttgcggaaggcaccgcctggcttgatctgtgggactttatcgtttcaaacaacgtcctgccgctcggctcgcttgtgctgacgttgttctgctgcaacaaattcggctggggctgggataatttcgtccgtgaagcaaacaccggcagaggtctcaagatccgtccgtggatgcgtccggtttttcagtatatcactcctgtcattatcgttttcatctatgtctacggcatggcaacgttccagtggcggtaaaatgaactttttagagagcatagtctaatctatgctctcttttttcgtcttagcgtattgcgcacgcccgtctgtttatggtactataatacagcaaagaaagacatttgcaccgccccggcggcgcaatgcagaaagggactgatctactatgcagaagggcgatattgccaagctgaagctgctgctcgcaggcatttcggcgcgaatgacgaaaaatcgtgattattttatccgtgcggtctgcacattcacttccggaaagaaaaaatttgatgccgaactttcgctcgacgggcaagactgggcgcttcgttttcagggcagtacctcgcccacggatgccgctgcattctgtgcattttttgcctctgaggctgaaaaatttgacgagagcgtgcttgtctataccgagcgcagcgctgtcgtgacgctctccgccactgcacgcggcgtgcagatgaagcaggcggagcgtgaggcgagcgatgaggaaaaggcgaacgccgccaatcccctgctcgacagcggccgtcagtatttgatccgtgtcgatcaggccgccgcgctgctgcgcgagatcggtattctgaccgcagacggcaagctgaaaaacgatatgattcgcaaatacaatcagatcgaccattacgtcgaactggttgcaccgatgtttgagcaggatgacagcgacgagatcgtgctgctcgactgcgcctgcggcacgtcctatctcagctttgtcatgaattattatctgcacgaggtgctccatcgccgctgccgcgtgatcggcgtagacatcaaggagcatgtcatcgacgagagccgtgcgatggcgaagcgtctcggctatcataatatgagcttccaatgcgccgatctgcgcgtatatcagccgccgaaaaatgttaccgctgtcatttcgctccacgcgtgcgatattgcgaccgatcttgcccttgcgaccgcgctccgtgccagagcgaaatacatcgcgtgcgtgccctgctgtcacaaggaactgctcaatcagtataccatgcccggcctcgaaccgctgacccgtcacggcgtcttcaaggcgcgcttcaatgatgtgctgaccgacagcatgcgcgcactcaagctggaggctgagggctataaggtatcggtcgtcgagtacatctcgccgctcgacacgccgaaaaacctgctcatccgtgccgtccgcacaggccgcgaaaaccgtcgtgcgaagtcggattacgaagcagtgcgccgcacactcggcacaacctctgagcttgatcgccgctgcatggacatggaaaacgaattcttcgttacagacgaggatctgataccgtaacataatgatccctccggaatacaatgataatacaggcggccgaggcaaaacgccgcctgcgcaaatcatgtgatccggagggataaatcatggctgaaaaaatctgctgccccggtcctctcggcacgtcgggcggcaacaccgcatccggcggcgcgttccgtgaggctgtgtgcgtacacacgagcaaggtctatgattcctgccgcagcaaggaatgtctgcgtgacatccgcgtttatctgacacgcgacgcgcaggatatgctcgattccggcggcatcgtttcggtaaagccgcgtacagctgatctgctctgtgtgaaaatcgacgttgaaccggtgcagtttaatcgcggtctgtacagtgtggacagccgattcttttaccgcattgagtgcgaggtgagctgtgcggtcggccggccgcgcattgtagacggtctcgctgtattcgacaagcgcgtcatgctgttcggcggcgagggcggcgcgcggatcttctcctcgcactatatcgaggacggcacggacgtacagcttcgtccgaattccaaccgtccaaccgcagtgatcgaggtcgtcgaccccgttatgctggatgcccgggtcgttgctcccgagacgaaatgcaactgctgctgctgtgctctgcacgaagtgccgaagcagctctgctcgtgctttgacggggatgatcttgtgcttgcgaacgacggctaccagctgttcgtaacgcttggccagttttccatcatccgccttgaacgtgacattcagctgcttatgcctgcctacgatatctgtctgccgcgccgcgactgctcgaacagtaatatcggcggtgagaccgacccttgcgaggttttctcgaacttcgaattccctattgacgctttcttcccaccgcgcggagagcgtgcaaactgccttttcacgggcgcgaatggcgtgaacggtgcaaacgcaaattccggctgcggctgccgtgcaaacaccgcaaacagctgcaataaataaggacggcactgcgagatttaatctgcggcgccttgcggaaatcctgttcgctgcctttggtacagtctcatggtaattcatcaggtattaccgcaaaaccataaataagaaaacggcatggacgtgcgtccatgccgttttgtattgcggagtgtatcagtaagcgatcgttaccataacgtcggaaacctccggtttagcagagatcagaccctcatcgtacatccagtcgatattctcctgccagcaggcctcggtctgagacaggaactttgcatctgcggtctccatgagcggaagcagcgtttcacaggacttcttctctacatccgggtccagcgcaaagttcgcctcatcctgattgtcgagcagaacctgcagaacctcgtccgtgctgttcttgaagtcctcgaagcccttgctgcatgcggtcagaaagccagcaagcacatccggctcgttatcgatcatctcatcgcttgcaaggaaaatgccctcgtagtatttcggcacaccgaaatcatccgggaagaagtaattgacctcgaagccctctttctccatctgcggaacctcatggttgaccaggcagccgatggttgcgtctacattgccggtggtcatcgagctcatcagatcaaagccgacatctaccagttttacgctgtccgggtctgcgccggagttcttcatgatgctgcggatcagggcctcagaaagctccgtaccggcataaccgaccgtcttgccctccagatccttcggagaggtgatatttttatccttgagcgaaagaacgatattcagcgggccctgcacaaccgcaccgatcgacttgatcggcacattctgctcagcgcgcgcctgaatgacatcctgctgatagtacaggccaatatcagctttgcctgctgcgaccatactcatcgcatcgttaacaccggccggagactgaatgtcgacatccagaccctgctcagcaaagtatcccttctcctgtgcttcatacaggaatgcgtgcagagcattcggataccagtcgagcacaacggtcagatggtgcagattatccttcgcgccgccgtctccgcctgcttcggcattgctgtttgcagcgccctgtgcgccgcagccggtcagcagcattgcgcctgctgccagaagtgcaagaaatcgctttttcataagtaattttctccttgaatattcaaaagtttgtttttctgttgttttctgattgcatgatatgtgtgcgtgaaatcagcataacgccccgagcgtcgttacaggctgcttctccaggtcacaatcttcttttcgagccagctgacgatgccgaccgcaatcattgcgactgcgctcagcagaacgatcggcgcgaaaacacctgcgccgtcgagctgcgtcatcatgcggcggctgaaatatccgaggcccgcctgcgcgccaagccattcgccgatcgcagcgccgatgatcgacatcgggattgccatctttatggctgagaagaaatacggcagtgccgccggcagcttcagcttcaggaatatctcctttcggcctgcgccgaacgtgcgcagcatatccaccatatcggtcttagccgaacgaaagccatcgaaaaccgtcatcgcgatcggaaagaacgtgatgagtacggtcacgagcaccttgctccagatcgtatagccgaaccagagcacaaataacggcgcgagcgcggtcgtcggaatggtctgcgacgcgatgatgagcggatagagcatgcgttccgccgccggactggcgtccatcacgatggcaagcagcaggccgagcgcgaccgaaatcgcgaggcctacgcctgtgcacagcatggttgcgggcagatgtgcagtgaagagcggcttccgcagttcccacaggcgcacgaggatctgcgtcggagacggaagaatgtatgctgcgttcatacccatcgcgcccgcctgccagatgatcagcagcgccagcatgaaaataaggacgggcagatttgcattcgtattctttttcattccgatacctccctgcgcagcagcgagataaggctttcgcgcagctcgagcatccgcggctcggtaagacacgcacgggtgcgcggatatggtgccggtacctcaaaggaacgcagtctgcggatgggcgtatcttcgaccacgagcacgcggccggaaaggaaaatcgcctcttctacatcatgcgtaataaacagtacggtcttgctgtcgcgctcccactgatcgagcagccattcctgcatggtgatgcgcgtgagaaagtcgagcgctgaaaaaggctcgtccagcagcagcagttcggagccggtcagcagtgtacgcgcaaaggccgcccgctgccgcattccgcccgaaagctcctccggacgcttgtcaccccagccggcgagaccgacatgctccagcgtctctgtcacacggcggtccatttccgcacgcggaataccgccgcgcacctccatcggcagacgaagattttcgttcactgtgcgccacgggaacagcaggtcgcgctgaggcatatagccgcagtagcctctcctgccgtcgatgctctctccgccaaccaggatgtcgccgctcttgcgcgtgagcagctgaccggtcagacggaaaatcgtcgatttgccgcagccggacgggccgatgaccgaaacgaactcgccttttccgatgtgaaaggacagatcgtcaatgatattgaaatcctcgacgtcatattgaaaggtaacgttgcgaaactcaagcatttacagttccccgttccatgccatttcccagaacataccctcgtagtgcgagcagtcgacaaaaatgtcgatgagacgctcgagttgcggctcggtatagtgttcggccagctgctccatatatgcgatgaggcggcggttctctgcggcgtaatcttcggaggcatagccctgtatccattcgccgtagaattcatgcttttccgcgttcggataattcgagacgatccattttgcgatatactcgtagctgagcgcgcaggaaagcaccgctgccatgatctccgccgggccttcctctgccgcgacagcgcgcatgtaggcagtatatgagctgttcgggagcgacggcttaacgcgttcggcgtcctcctccgtgataccgagacgcttcatgtagccgcgatgaatgttcatctcgccgccgaggatattcgcgaccgaggacgcaaacatgcgcatgacctcgggatcgcgcgacttgacaacgccctgtgcaaagaccttggcatagtcaaacaggtaaacgtaatcctgcaacagataaaaacgaaatttctgaatttcgaggctgccgtcggcaataccgcgcacgaaaggatgcttgagatagccctcccagatctcgcgcgttgcatcgagcagtctttgggttgttttgttgtttttcaaggtggtacccccaatgaattgatgttgatcgtatcctaagaccgtcggcatactctgccggcagcactttccgtctgcatcagatcagacggatgcgcgacgtcagttcatccgctgaaagcaggctgactgcgtcgatcaggcgtgtccgaaaggaagcggtgccctccatctctttacgcacacgcgcatctgcgatttctccgcaatgcttcatcacctccgatgccgtgactgcggcttcaaataatctatcgggtgcagcgccgcagtacacgccagcaagcgaggtgagcatacaccctgccccggtgatgcggcggagcaactcactgccgccgcacagcactgcggtgcgttttccgtctgtgatcacgtccatcgcaccggtcagcagtacgaccgtaccggtacgatgcgcaaaatcgcgcagccaggctgcggattccgcaagattgtcctcgtcaatgcggtcgctgaggtcggcctcaacgccgctctcctgctccgtcccaccggccagcgcacggatttcagacacgttgccgcgaatgactgagacaaggccttccgcgagaagcttcgcgcacatatcaccgcgcagatggctcgcacctgcggcaaccggatcgagtacgaccggatgtccgagtttttttgcggttgctgccgcgcgcagcatggcttcctgcgcgcgcaccgcgcccatgttgagaacgagcgaggaggcgtgcgccgtgatctcctcgacctcgcgctcatcctgtgccatgatagccgttccgccggccgcgaggatgatattcgcgcagtcattaactgtcaccggattggtgatacaatgggtcatcggacggcacgagaccgttctctcaatcacttttttcagttcttcgatcaacgcagagccccctcaaggctgctgaacacatgcgtgcgcttgagcgcggacagcacgagaacagaaatcgccgcgccgaccgcagtcgagataaggaagctcggtacaaaggtgaacagcgctgccttggtgttgcccatgaggacagcggcgatcgggtaggacgcaaggccgcccagaatgccggtgccgaatacctcgcctgcatatgccgcaggcagcttcggacacagcttgtatgccacgccgcacagcagcgcgccgatcatggagcccggaaaagcgagcaggctgcccagaccgaggagatttcggatgagagcggcggcaaacgccatgccgaccgcataaccggggccgagcaggaccgcgccgagtacatttaccatatgctgtacgggcgagcacttcgcgccgagcaccgggatggaaaacaggctgccgacaacagcaacagcaacaagcacgcctgcgatggtcagtttacggatgtttttcgctttcattttgattcactcctgttaaaaatacggcagaaatggtcgagcggtccgcagccgtgtccgagaccgggcgcgtgacggattgcatcggtgacatactccttcgcgaggcggactgcctcgggcacgtttttgccgagagcgaggttggacgcgatggcagaggacagtgtgcagcccgtgccgtgcgtcgaggtactatcgatctgctcgatctcgatacgatggcaggtctcaccatcgaacagcacatccacagcgcccggaatgttttttccgcctttgaccagtacgtttttacagccgagcgcaccaattctgcgcgctgcggtctccatatctgcgggcgtgtggatctccatgcctgccagatactgtgcttcgggcacattcggtgtcagcacatcggcaaacggcagcacggtctcgatcagcgcgccgaccgacttcgggtccatcagcggatcgccgttcttggcaaacatgaccgggtcgatgacaacattcgccggtcgatactggcgcagcttgtctgcgactgccttcatgcattccggcgaggaaagcatgccgatcttgaccgcatccggcacgatgtcctcaaacaccgcatcgatctgttcctcgatcattctcgtactgatgtcctgaatgtcgataacgcgcgcggtgttctctgcgacgaccgacacgatgacgctcatgccgaacacgccgtgcgccgccatggttttgaggtcagcctgcacacctgcgccgcccgaacagtccgaaccggcaatcgtaagcacttttttcatagaattctcctcttttccggaacagctccgcaagtccggataccgttcctgcataaaaatgccgcagtcctcatcctctgacgaaaactgcggcattgtaattgcgatgcgacagctccctacgatggttctaaccaacaggttcaaaaggttgggggtattccctctcagccgcatcctgcggcacccttgcttctttgtcaagtatagacctgtgtcgccctgtttgtcaagtatttgtcagtgttcgctctgtttttctcgtgaaaaaggctgttcagccttcatatttcagcagcttccggtatgctgcatccatgccgagtgcgccgaggggcgcagtgatcaaaatcgcgagcaccgccacagacagcacgatcttgccgcacggcagccccatcgcgagcggcacagagccgatcgctgcctgtacggttgctttcggcaggtaagcaatgacgcagaacaagcgctcgcgtcgactgagcttcgtgcctgcaaggcagagcacaacacctgctgcacggaaaatcagtgctgtaaacaccatcaaaaccgctgcgagaccggtctcggatacatatctgatatcaactgcggcaccgacgagcacaaacagaatgagctccgccgcgatccagagctttccgaacttttcgctgaggcgtgcgcggacttcgccggtcgtttttcgtgcaagcatgcacgccatgctggtgaccgcgagcaggccggacagcgcgatctttcccttgagaacagtctcgagcgccacgagtaggaaggaaacgctcagcacgatgataatcttgacgctgccgcgaaccatgtggttgcgggcaaatgccgcttcaaagaatctcgacagagcataaccggctgccgcaccgactgcgatgccgagcacgatcgaaaccggaatgttcagaaagtctgccgctctcgcatttcctccctgcgcgataccagtgaaggtcgtgaacagtacgataacgtagatgtcgtcacacgatgcaccggccagcagcatttggggaatgctcttgtccgtgccccatcgattttccataagaaagaccatgcgcggcacgacaacggccggagagacagctgcgagtacggcccccataacagcggcctcgatgcggttgacaccgagaagatacggcgcgagcagtatgtatccggcgagttcgcaggtagcaggcaggcacgagagcaggacggcaggacggccaacctgtctgaggtcggacaggttgagcgacagaccggccttgagcagaatgatgataagcgccatctgtcgcagctcggacgagattgacaggatcgagccgtcgagtacattcagtatgtgcgggccaagaacaatgccgacgaggagcattccgatgatacgcggcagcttgattgccgaacagactgctgcggcagccagtccggcaagaaaaacgaaggcaagtgatgttaacatagtttttctccttccgggggcataaaaaaagctgataccccctgtgaaatatcacagaagtcatcagcagtaactgcggtttcggcatgcgccgcgggagaacttcattccctttttatttgcagacctattatagcataaatataactgcatggcaaacgttttcttgaccggttgaaaagcgatgttttcggcagtctcaaaaggccggtttgatccggccttttgagattatctgatatggaaaatgtatctgagaatgccgcacagacacttcgggctcttccagacagcaaccttcatcacgctctcctcccttctcacaggctttgacacaggagcagacccgctgcaatgactgccgccgccagcagccgtactgtccagcacggcgtcagcagactgccgatgagtacgcctgcgccgaagaacagcaccgcaaggccgatagcctgaccgcggcagagcattccgcatccccccctgctttcagtataagcgcgaagaaggaaaaatgtgcataacaaagggaaaccacctttcgggcggttccccttgctgttcttttgacttattttccggtggtcgagccgaagccgccttcgcgctgaccctctgcatcatcgtctaccgtgatgccgtagggcagaaaaatgccctgcgcgaacgcatcgccagactgtacagacagcatcttgccgttcagatcatcacttgtcatcttgatcaggatatgaccctcgttttttgcctcgaaatagtcgctgtcgatgacgccgaccgtgttatcgagctgaaggcgatgacggaagcccagacccgagcgcgggtaaagctgaagcacccagccgtcctcgatcatgacacggataccggtcggaataaggatcgtctcgtgcgggacgagcgtgaagctctcgggcgcgaagaagtcgtagcctgcggagcctttggtcgcgcggcgcggcagacggatgttcgcatagaccgactttgcctcttcaacgctgctgccggtcgcggcgcgccagtcgttgatgaactgttcttcacttaccttataaaactgtgcgattttttccatcgttcatgctctcctgtttatttgtcagtattttcatgcagacagaccgtgccggtctcccgggtacgccgaacatcgatcacgcgctgattggcgctgccgcgccagcagagctgtgtgttcttctgcgattcgatgaacggcccgtccacgataacatctatggcatcaaggaacggcagatctgcgatctgctcccagcggtagcctgtatacagccagatggtcttttccggaaaacgtgcatggacttcgcgggcgagcgcaccgacctgttcccggtttgccggatagagcggatcgccgcccgaaaacgtcacgccggacacatagtccttggcgagttcggtgaagatctcttcctttgccgcctcgtcgaacggcaggccgccgttttcgtcccacgtgatcgggttgtgacagccggggcacgcatggccgcagcccgcgacccacagcacaacgcggagcccgtcgccgttcagcatatcgtccttggtgatattatgatactgcatggtgtgttacatactctttctttctgcaatttctgccatttttgcatcgttcaggcgtgtgtcgcccttgacgcgggaataggacagatacccgttcattcgctcgatcttggtgaggttgcggctgccgcacttcggacagacatccatcgcgagctcctcatgaccgcagtcgtcgcagtatgcgagcgagagattgacgccctcatagaatcccttcctcattgcacggcgcacgagcgagcggatggcctcgcggttatagctgatgggatacttgacatactggatcttgccgccgttgcacagattccagaaacggtcctccagatcctgcttttcgatcggagtcaaatcctcggtaacgtggcagtggaagctgttggatacatacggacggtcggaaacgccctcgatgatgccgtattttctgcggaactgctcgacctgaaggccgcacaggctctcggccggcgtaccgtagatcgcatacaggttgccgtcctcgtgcttgaactgctcgaccttatcgttgatgtacttgagcgtttcgagcgcgaacgcaccgtcctcggcaagcgacttgccgttataaagctcctgaagctcgttcagggccgtaatgccgaacgaagccgtcgcagtcttgaggataggcttgatcttatcgcccggcttgaggtggccgccgtagaagccgccctcgcagtatgcgagcggattggtggaggcacgcatttcaccgaggtacgcataggtacggatgtgcagtttacggatcagctccagatagtagtccagtacctcgtggaacggacggttttcctgctgcgacttggcgtagatcatcggcagatgcagcgatactgcgccgatattccagcggccgacgaacaccggcctgtcctcctcgtccgccggctccatgccgccgcgttcaaaccacggagacaggaacgcgcggcagcccatcggactgatgatcgcgccgtattttttgtacatggagggcacgtagccttcgccggtcagcgacagccagtccgggtacatcgcgcgtgcagagcattcgatgccggcctcaaagacgtcttcgagttcgccgccggggccgtgcaggttctcgtcgtacagaaatacgatcttcgggaacagaaccggctttttgttgcccttcttaccctgacccttgcggcggacgttgagcatggtgatggaagcaagcttcgcaaagcggcccgtgccggtgcccatcgtcatggtgataaacggataatcgccgcggctggatgcgaccgtgttgaatttgtactcccagccctggaagccctgctcaaaatcgttcaggatatccgccatgacggctttttcgaccgtctccggatcaaggccgagcgcactgtatttttcggtcagcattttatagctgcgctcggcatacggctcgagcagcagatcaacgctcggcacagtaaagccgccgtactgctgacttgccgccgaaagcacgatatcgccgatgacatcgaacgcgacattgagtgttttcggctcattgtaccacagattgcccatctcaaagccgtccttcagcacgtgcttcacatcgaacagacagcagttcatcgtgtcgcggcgcgcagacatatcatggatatagatatagccgtcacggcaggcctgcagctcctcggtattcatgaagaacttctgatacagctccttgttgagctgattaaagatcagactgcgctttgtcgagacaagcgcggaatcggtatttgaattttcgcggtcgccgatgtacatgatggactgactctttttatagacgctgtccagcatgccgacgaaatcctgcttgtagttgcggtagtcgcggtagcttttcgcgacctcggggcgcacggcctcgagggcagactcgacgatgttgtgcatctgccagatctgtacatctgtcatggcatggtcacggatataaccctcgacatgatcgcagatcgatttcagctcgtcgtcggtaaacgtgtaaagcacgcggttcgcacttttattgacggcggtcacaactttctggatgttgaacgcctctcgggtatggtctttcttgatgacgcggaccatcgtcgtcactccttttcttcctattttgtagcagtgactattataacacacaagatattgcgatggtagaccaaattcgccgaaatctgtcacaaaaattcggccgtaaaatcggcgattttctgcttgacggattttggaccatctgaaatttccgcttgcgcatcgcgtttttcgacgttatactgtattatatatagtaagagacgcgcgttttcagacgcgcttccctgcgcctgacattaagccgccctgcgggcgactgcgtgaaaggtgcagctgacagaaaatagctccctgcccgttccattttttccgggcaggactctctgcggctgcgcctgctttcgggtgcagccgcagtttttgtctcggaggaaaagttatgcagacaagagtcgccgtcatgggcatcatcgtagaaaacacggattcggtcgagcagctgaaccatctgctgcacgagtacggtcattatatcatcgggcgcatgggtatcccctatcgcgcacgcagcatcaacatcgtctccatcgccatcgacgcgccgcaggatgtgatctctgcgctttccggcaagatcggcagcctcgacggcatcagcgtcaaaaccgcctactccaatgtgcttgccgatgaataacgacgcaaaaaaactcatcgaccgtcttgcgcgcgagcacagcctttcaaaggaggactatgcgttccttgtgcgcgcgcaggacgaagagaccgcagcgtatgcgggggcgcttgccgccggtgtccggcgtgaggtctatggcacggacgtttatatccgtggtctgatcgagatcggaaatatctgccgcaacgactgcctgtactgcggcattcgacgctccaacacgcacgccgaccgctaccggctgaccgaggacgagatcttcgaatgcgcgtgcgagggctatacgctcggcttccgcacctttgtcatgcagggcggcgaggacggcgcgttcggcgttgatccgatctgccgcacggtacgccgcatcaagcgaaaatttccggactgtgcggtaacgctttcgctcggtgaatttccgcgggaagcttacgaggctatgttttccgccggcgcagaccgctatctgctgcggcatgagacagcagaccggacgcactatgaaaagctgcatccggcggaaatgtcgttcgaaaaccgtatgcgctgcctgcgcgacctgaaggacatcggcttccagaccggctgcggctttatggtcggctcgccgttccagacgcccgaaacgctcgctgaggaccttaaattcatcgaaaccttccgccctgcgatgtgcggcatcggcccgttcatcccccagaaggacacaccctttggcgacagacccgcaggaacggcggagcagacggtttacctgctctcgctgctgcggctcatgcagccgaagctgctgcttccggccacgaccgccctcggaaccatccttccggacggacgcgaacgcgggcttgccgctggagcgaatgtcgtcatgcccaatctctcgccgctctccgtgcgaaaaaagtacgcactctacgacggcaagctgtgcaccggcgaggaggcggcgcagtgcatcggctgcctgtcgcggcgtgtgcagtcggtcggcgcgaatatcgtcatcgaccgcggcgacgtaaaaccgtgaaatctgtttcgaacaagaaaggatataatataaatggctgtttataacccgaaatccatgtatgctgatgattttatcaaccatgaggagattctcgaaacgctcgaatacgccgagcgcaacaaaaataatctcgagctgatcgacagtcttctcgagaaggcgcgtccgaaaaagaccgccggcggcgttcactgcgccggtctgacccaccgtgaggcatccgtgctgctcgcctgcgaaaacccggagaagatcgccgagatgtacaggctcgccgaggagatcaagctcgccttctacggcaaccgcatcgttatgtttgcgccgctctatctgtccaattactgtatcaacggctgcgtttactgcccgtatcacgcaaaaaaccgtcatattgcgcgcaaaaagctgacgcaggatgaggtgcgcgccgaggttatcgcacttcaggatcttggacacaagcgtcttgccattgaagccggagaggacccgaagaacaatccgatcgaatatattctcgaatgtctggacacgatttacagcgtcaagcataaaaacggcgcgatccgccgcgcgaatgtcaatatcgctgcaacgacggtcgatgagtaccgcatgctcaagaatgccggtatcggcacctacatcctgtttcaggaaacctaccataagaacagctatcttgagctgcatccgaccggccccaaacacgactacgactaccacaccgaggcgatggaccgcgcgatggagggcggtatcgatgacgttggtctgggcgtgctgttcggtctggaaaagtacagatacgaatttgccggtctgctgatgcacgctgagcatctcgaggcggtgcacggcgtcggtccgcacaccataagcgtgccgcgcatcaagcgcgccgacgacatcgacccggacgtattcgacaacggtcttgccgacccgctgtttgaaaaggttatcgcgtgcatccgcattgccgttccgtataccggcatgatcatttccacccgcgagagcgaaaaggtgcgcgcgcgtgcactgcatctcggcatttctcagatcagcggtgcgtcccgcacctcggtcggcggctacaccgagcaggagcgtccgcacgacaccgagcagttcgatgtttccgaccagcgttcgctcgacgaagtcgtacggtggctgatggagatgggatatattccttccttctgcacagcatgctaccgcgagggacgcacgggcgaccgcttcatgagtctgtgcaagtccggtcagatcctcaactgctgccatccgaacgcactgatgacgcttgaagaatttcttgttgattacgcgagtgaggatacacgccgcgtcggcatggagctgatcgaccgcgaactgcacaagatcccgaacgaaaaagtccgcacgcttgcagcacagcacatcagcgacatccgctcgtccaaccgccgcgatttccgcttctgaggagggctgagccatgagtctcaatgcacaggtatctgcggagcgcgtacacatcggctttttcggtttgcgcaatgcaggcaaatccagtctggtcaaccgtgtgaccgggcaggagctttctgtagtctccgaggtgcgcggtacaacgaccgaccctgtccgcaaggcgatggagctgctccccctcggtccggtcgttatcatcgacacgccgggactggatgatgagggaacgctcggtgaagaacgggtgcgccgggcgcgcctcgtgctcgaccagaccgatatcgcggttctcgtggtggatgcggccgccggtctctcacgggccgaccgcggcctgatacagctgttcgaggaacggcacatcccttacgttatcgcaatgaacaaggcggatctgataacggttccggagaacatcccggaaaatatgatttttgtctcggcacgcgaaaacggaaacatccatgcgctcaaggaaaaaatcgctgctcttgtacactctgtgccgccggcacgcgagctcatcgccgatcttgtatcacccggtgatgcagtagtcctcgtcaccccgatcgactccgccgctcccaagggacgtctgatcctgccgcagcagcagaccatccgttcactgctcgacgcaggctgtattccggtcgtcacacgcgagaccgagctcgcacgcacgctcagcctgctgcgcgagccgccggcactcgttgtcaccgactcgcaggccttcggcatggtcagccggatcgtgcccgattccgttcgccttacctcgttttccattctttttgcacggtataagggcgacctgcgcacggcggtgctcggcgcggccgcactgcgtcggctgaaggacggcgatactgtgctgatctctgagggctgcacccaccaccgccagtgcggcgacatcggcacggaaaagctgccgcggtgggtcagacagtataccggcagagacattcgctttgtatttacttccggcggcgagttcccggaaaatctctcaccctatgcgctcatcatccactgcggcgcgtgtatgctgggcgagcgcgaaatgcagtcacgtctgcgccgcgcagcggaacagtgtatccctgtcaccaactacggcattgccattgcgcagattcacggcattctcgaccgtgcgctgcgcccgttttccgcgcttcacgcagagtgggagaaacagcagcagtaagcaggggttctgcttgcttttcgcacgtttttatagtataatgcaggcatacaggtgtatcgaattggaagcgaggtgcgcatgaatcttttagaattaccgttcttttccggctttactgcccaggaactgcggcttctccgcagtctcggctgcatgcgcacagaccgttttccgcatggcgcgctcattctgcgcgccggaagccgtacacgcgaaatgggtattgtcgtttcaggctgtgtgcacattgaaagcagcgatttctggggcgcacacagtattttgagcagcgtcgaagccggaggcgtgtttgcggagacttatgcgctctgcggtgaagcacttatggtggatgccgttgcggcgaaggactgcgaaatccttttcctcagcctgctccccctgcttgacggagacaatgcagctgaaagctggcacggcaagctgatgcagcgcattcttctgcttaccgcgcagaaaaatctgacgctgtcgacccgtattttctgtacatcggccaaaaatgtgcgtggcaggctgctgacttacctttccggcgaggccgcacgacagggccggtatgagttcgatattcccttcaaccgccagcagctcgcagactacctcaatctcgatcgcagcgccctgtccaaggagctgagccgtatgcgcgatgagggaatgcttgagtatcgccggaaccacttcaagctgaacaaaaacgaaacgtaaaatttaaggctgaccgaaaaataagcggtcagccttttcttgtgcgcaaaaacaggaccggatgcgtatttctgcattcggtcctgctttatttatgcggttttacggtgcattacgcacatttttcgtttatctgtgcggaacggcttagtacatgccgcccatgtccggagctgccggagccggagcaacaggttccttcttgtcagcgatcaggctctcagtggtcagaaccatagaagcaacagatgctgcgttctggagtgcagaacgatttaccttggtcgggtcaacgatgccgtttgcaatcatgtcgccgtaggtctcggttgcagcgtcgaagccgtagccgaccttgtcggagttcttaaccttgtcgagaacaacagcgccctcaatgccggcgttggcagcaatctgcttcatcggagcttccagaccgcgtgcaacgatctgcatgccggtcttctcgtcgccggctgcctctgctgccagagcctcaacagctgcgatagcgtttacatatgcaacgccgccgcctgctacgatgccttcctcaacggctgcacgggtagcgttcagtgcgtcctcgatgcggagcttctgctccttcatctcggtctcggtcgcagcgccgaccttgataactgctacgccgcctgccagcttagccagacgctcctgcagcttctcacggtcaaagtcagaggtggtgcgctcgattgcgccgcggatttcagcaacgcggtttgcgatagcctgcttgtcgcctgcgccgtcaacgatcgtggtattttccttggttaccttgatctgacgagcggagcccagcatatccatggtagcatccttcagctcgatacctacctcctcggagataacggtaccgccggtcagaatggcgatgtcgcggagcatatccttgcggcggtcgccgaagcccggagccttgacagctacgcaggtgaaggtgccgcgcagacggtttacaatcagggtggacagcgcctcaccctcgatgtcctctgcgatgatgagcagcttcttgccgctctttacgacctgctcaagaaccggcagcagctcctgaatgttggacagcttcttgtcggtgatgagcaccagagcgtcgtccaggtttgcttccatcttctcggtgtcggtgcacatatacggagtaacatagccgcggtcgaactgcatgccctctacgacctcagaataggtctcagcggtcttggactcctcaacggtgataacgccgtcggtggagaccttctccatagcctctgcgatcagggtgccgatctcgtccgagccggaggagatagcgcctacgcgggcgatgtcgccggtgccgtttacggtcttggaattctttgcgatcgcttcaacagcagccttgactgccttggagatgccgcggcgcataaccatcgggtttgcacctgctgcaacgttcttcagaccctcgcgaacgaatgcctgcgccagaacagtagcggtggtggtgccgtcgcctgcaacgtcgttggtcttggttgcaacttccttgaccagctgtgcgcccatgttctcgaatgcgtcctcgagctcgatctccttggcgatggtaacgccgtcattggtgatgagcggaccgccgtacttcttgtcgagtacaacgttgcggcccttcgggccgatggttaccttaacggtatcagcgagctgatcaatgccgcgctgcagagccttgcgcgcgtcctcgccgtaaataagctgcttagccatgatgaattacctctttctgaaattactctacgattgcaagaatatcgctctggcgaacgatgatatacttctcgccgtcgagcttgacctcggtgccggagtacttgctggtgatgaccttctggcccttctggacctccatcttgatttccttgccatcaacgacgccgccggggccgacctcgatgatctccgctacctgcggcttttcctgagcggatgcggtcagaatgataccgcttgcggtggtctcctctgcctctaccattttaacgacgacacggtcgcaaaggggcttgagtttcataatggattacctcctatgaaaaataaaaatatacattgtcgggagcttagcactcaaaacaccggagtgctaactcgagtattatattacatcaactctcgctattatgcaagggggtaacgccaaaaatttttgaataatttatgaattatttctttcagaaaatggcagttttagcagacgatatattcgagtgcttaaacctgcgggcgcggtttacgcggcgcattcttgaaatacatatgaagttcgcactttatcatgccgttatacagcttgcggcgtttgtctgccggacggccgtagcaacgttcaaagagcgggtccgagctgagaatatactgcttcatcggcgaatttttcgtcgcacggccgagcgtcgtataaagctgctctgcctgctgttggtcgagcagccgctcaccgtagggcggattggcgaacaggataccgccgccgctgtaatcgcgcttcgtcgcgtccgcctgctcgaagaataccgtgcctgcgacgcctgccttgtgggcattcgagatagacagcttgacgcattccgggtcgatgtcgctgccgacaatatcaaaacgggcggccgcatccgccatgcagagcgcatcctcacgcgcctgctgccatacttttttatcgaagcagctccatttctctgcgtcgaagcggcgcagcagaccgggagcgcggcgctgcgcgatcatcgcagcctcgatggcgatcgtgcccgaaccgcagaacggatcgaggaacggctctcggccgcgccagcgtgcgagcttgaccattgcagcggcgagcgtctcgcgcagcggcgcggcattgctgtttgcgcggtagccgcgcttgtgcagaccggcgcccgaggtgtcgaggtagatttccgccgtgtcgtgcatgatggcgaactggatctgatacttcgcgccgctctcctcaaaccagccctggccgtatttctgggaaaggcgcgaaacgaccgccttcttgacgatcttctgacagtccggaatggaatgcagcgcagagtccaggctgtgtcccttgaccggaaatgcgccgtccgccgggatgaattcctcccacggcagcgccttcacgccttcgaaaagctggtcgaacgtctttgcgcggaacgcgcccagtcggatgagcacgcgctctgcgcagcgcagattaaggttcgcccacgcaagcgtgctctcgtcaccctcgaaaaatacacggccattttccgcacgtacatcggtcagcttgccgccgaagcgaagctcgtccgcgacgatgccctcaagcccgaacagcgtcgggcagcacatggtaagttccatttttgtttcctccaaaaaggcccctgcctccgaggcaggagccgctatctcgatattatttctttcttatgatagcttttttacgcgcatttgtcaagatttgcgcgttttctattctctccgagcggcaagataacgcagcggatgcaggccgcacagccgcagcagcgcaagacagagcattcctgccccggtgagcgtcatcgcaagcgcaagaacaggacttgctacatgatcagaaaacagaagcgcaaacagccgcgtccagaggccagccgccgcgccgcacatcagcggcagtccgagacgccgcatcggacgcagcgcaaagccggtcgcatgatgcagaacggcaagattaaaaacggccgctcctgcgccgctcagcagcatcgcgagaagatacccgtaaatgccgagcgccgggcgcgagcaccatcgaatcacaagtacgagctgtacgcattccgccagaacggcggtcagaacgctccggttctgcaatccgagtgcgttcagcaggccggaggtgatcatctggtagtacgtggcaactgccgctgcgccggtgaacgctgcataccgcagtgtgagcggctgcgcgaacagcagcaggctgagcgagggtgcgagcggaatgagcacagcggtcgctgggatgccgatcagtccgaccgtcatgaccgcccggccgacgagggcgcgcacacgggcgcggttccccgtagcgtgcgccgccgtcacaatcggcagcagtgcagtgccgatcgagccgataagcgccgagggcagcagcatgagcggcagcgccatgccggaaagcgttccgagcgcagcaagcgcctgctctgcgtccagtcctgccgtcatcagccgccgcggcaggagcaccgcccccgcagcggacagcaggttggtcgtgagcgccgaaaccgaaatcggaaccgcaatagccgcaaactgccgccgcagctcgcggtccgggcgggttttctctccgcgaagccgcgcccgctcgcggcggaacaagcagctgagaaacagcgcgctgaacacctcgctgactgccattccggcgaagatcagcttggccattgtcccgcagtcgccgccgaccgtgtgcagcagcacgccgactgctgcaatgcgcaccagctgctctcctgtttcactgatcgcggtgtactgcacgcattccagtccgatgaacagcgccttgaggatattttcaatcccggtcagcataaggcagagcagcatgaacggaaacgcctgtgccgcgtgcggattgccgagaatgcctgctgcaatttggtcgccgcacagcagcagccctgctgcgcttgcgaacgcaagcgtaaaaaacactgaaaatgcgagacgaagcaccgcaccggttttccctttctcccctgttgcctcgcacgccgccgacagccgtgagcacgccatcgtcacacccgaaaggcagccggtgtgcagcaccagatacaccgaattagcgagccggtacatgccgagaccctctgcacctgcaaagcggctgagcatcacgcgatagacaaagccgagcgcctgcagggcgatattgccgcacgcgagcaccccggccgcatacagcactgtctttttccgaaaccgcacctgcctgcacctccccctcgggtcagcatatgagcgaacacagttccgtaaaaccagaaaagcgactgccctcacagcagacgcttcctgttgtatcctgcgcgtccttagatgcgcttggacattttttcgctgtattctgcacggaattcctcgaagcggccctcgtcgagcgcatcgcggatctcctgcatcagatggttgtagaaccagaggttatgcatgaccagcagacgctgcgacagcatctcgccgctcttgagcaggtggcgcagatacgcgcggctgaaccggcggcaggtcggacactgacagccttcctcgatcgggcggtcgtcggtctgatacttggcgttcatgatgttcaggatgccgctgtgcgtgaacagatgaccgtggcgcgcgttgcgggtcggcatgacgcagtcgaagaagtcgatgccgcgcgcaacgccctcgatgatgttgctcggcgtgccgacgcccatcagatagcgcggcttgttctgcggcgcgtgcggcaggacgacatcaagaatatggtacatgacctcggtgctttcgccgacggccagaccgccgatcgcatagcccggcagatcaagttcggagatcgcctgcatgtgctcgatgcgcaggtcatcgtaggtgccgccctgattgataccgaacagcagctgatgcggattgacggtatcaggcaggctgttgagacggtcgagctcggtcttgcagcgtctgagccagcgcgtcgtgcggtcgatggagttcttgacgtactcgcgcggcgccgggttttcgatgcactcatcaaacgccatggcgatatccgagccgagattggactggatgcgcatgctctcctcgggacccatgaagattttgcggccgtcgacgtgcgaatggaaggtcacgccctcctccttgatcttgcgcagcgtcgcaagcgagaaaacctgaaatccgcccgagtcggtcagcatcgggccgtcccagcgcatgaacttgtgcagaccgcccatctgacgaacgatctgatcgcccggacgaacgtgaagatggtaggtattggacaactcgatctggcagccaagctccttgaggtcgaacgcatcgaccgcgcccttgatcgcgccggccgtgccgacgttctgaaagaccggggtctgcaccacgccgtgtgccgtgcagaattcgccgcggcgcgcgcggccttcggttttgattaggttaaattttccgatttccatatattcctcacaaattacatattacatactgggtttgcggcatcagtacagcatcatgctgtctccgaacgagaaaaatctgtattcctccctgatcgcttcctgataggcgttcatgaccatttcgcggcttgcgaatgcggaaatgagcatcatcagcgtgctctccggcagatggaagttggtgattagatgatcgaccgccttgaagcggtagcccggatagataaagatcgctgtccagccggactgtgcgcggacatgaccggtctcgtctgcgatggtctcgagcgtgcgcgtcgccgtcgtgccgaccgcccagatgtcgccgcctgcatcacgtgtgtcgttgatgatctgcgcggtctcctcgtccatgacatagaactcggagtgcatgacatgatcggtgatctcgtcctccttgaccggacggaacgtgcccagaccgacgtgcagcgtgacgaatgcgagctttacgcccttgtccttcagcgcttcgagcagctccttcgtaaagtgcagacctgcggtaggcgcggcagccgagccgggcgtcttggagtagacggtctgatagcgctccgggtcatcgagcttttccttgatgtacggcggcagcggcatcgtgccgagcttgtcgagaatctcaaggaaaatgccctcataatggaagcggatcagtcggttgccgtccggctgcaccgcctcgaccgtcgcggtcagcaggccgtcgccgaacgtcagctcaacgcccgcgcgggtctttctgcccggacgggtcaggcattcccacaggccgtcgcccttgtcggtcagcagcagcacctcgatcggcgtcacatgaccgactgcgtggcccatcagacgggccggaataacgcgcgaattgttgaagacaacgcagtcgcccggttttacatactcgagcatatcatgaaaatggcggtgcgtcaccgagccgtccttgcggtcgagcaccatcatccgggatgcatcgcgctgctcgagcggatgctgtgcgatcagccgttccggcagatcaaaataaaaatcactctttttcatcacaaaagcatgggcgcagacaggtcctccctgccctgcgtccacactgtacctcctgtcacatattatttcgatacttcgataccggtgaagtagaatttcagaatatcctcatagctgaagccctgcttcgccatcgcatacgcgccccactgactcatgccgacgctgtggccccagcctgcgccgttgaacgtccagctggcagcagtttctacggtctgaccgtcatttccggtattgttattgctgttgtttccgccgttattgttgtcagacgtatcatttttgctgtcgccggtcgtcttttcggccgagcggatcacgaccacgtcctccgggtcccagtccaccgcaaagccgagcgcatcgccgatgtcgcgcagcttgtagtagttgttatcgtttacattatagccggtcagctgcacggtcttgtttcccacagcgaccgccgctgtcgagggcgagagcttcttgaccgccgcgatggtatcgctcatctcgccgcccaccttgacatagggcgcattgggactgagcaggatacggttgttcgcgccgtcccaggtcacgttgaactcgctgcccgtaccgttcaggatccacgccacatcgcgcagcttatagtagttattgtcgttgatgttgtaaccctgcggcttcaccaccttgccgtcaaccgtgaccgtatgtaccgacggggagattttaacgctcgtctttgtcgcggatgcggttttctgcacagcggttttggtctgcgagctcgtcgccgcagcgttcgcggtgatcgaataattgatgctcttgagtccgaaaaccgtgcgcacgttgctgcgcgtcagcgttaccgtcttgctggcggtatcggtgacggtcacctcggcaacgttgttcgttgcggtgcgctttgtgacctcgaccttcgcgaccgtgccgatcgaatagccggcattcgtcagcttggtcttgacctcggccggcgtcagcgtcacgctccacttgtccttgcccttttcctcataggggtcagccttgcccttgaggtagctgtattcgccgccccatacattggccgcgtcctcggtcgcgccgccgtccgacgagaagaagtagccgatgacctccttgccgtcgcaggacagcgtttcgcccgccgttgcgctgaccgcagcatccgactcgctcgtcgcgcgtgtcgcgccgagatatacctgacagttggtggtattgcacaggtcatagccgctgtctgtatgcttgtgcgtgccgagcgcgaacgagcgcgtgcagactgcctgcgccttctgtgcgtcggccggccagtccgggtcgatctcatacggcagcacgcccttcacataatcctcgacattcacatagtttataacggtgatgtttccgttcgaggcgcggcgatagacaaagtcgccgtaccacttatagcccttgaaccaggtcagacggctgttcggccggatcgccagctgctcaagaccctcggcggacgtaaacagcaccttgcccgtctcggtgtcgcacacctcaaaggcgtttttatcattcagccggatggtcagctgagaagaagccagcgaagcggcgctcttgaaggtcgtgccgcttaccgttccgaccgtatagccggtgctctcaccggagacattttccagcatgggcgtggcgaacgaggacgcgccgccgaccgtcagaccgacacgaagcgtggtatctgtgctcgcagcacccgccgcaggcacggccagcgtgccggtcagcgccgccgcgcacagcagcgccgaaaaaaagcgtttcattttctgttcaactcctgttagaaatcacgtttattttgccgccttctattgacaaatatatcgccttatcttaaaataagaaggaaaagtatctgatacagatagaggcgcggttttcatcagtatcgcctgacagggtccgcaaacccgttcatcagccgaaaaagggtcttccgccgaagtcggtcgttctgttgcggcaggaccgtactggatgctgcggataaaatccctgcgtctgtcatcagcagaaatgccggtggagagctaagctgtgttagaaagcggcggcgatttttccgctctttctattatagtataggtcataccggtttttcaaccggtatttttcatatttcggcacaggatgcagattttcccgcagaaacgcggcaggtctgctccgcacagggcgcattttttcgatgcgtatatccgttattacacctttctggaaggatctgataaacatgaagcagtacaaagtaggcatcgtcggcgcgaccggcatggtaggtcagcgtttctccctgctgctggagaatcatccgtggttcgaggtcgttgctctcgcagcatctgcacgcaacaagggcaagacctatgccgaggcttgtgagggccgctggaagatgaccgttccgatgcccgacaagtacaaggacatggtcatgtacgacgcaaccgcagacgcagaggagatcgcctccaaggtcgatttcatcttctgcgcggtcgacatgaagaaggacgagatccgcgctctcgaggaaaagtatgcgaagctcgagtgcccggtctgctccaacaactccgcacaccgttttaccccggacgttccgatgatcattccggagatcaatgccgaccacgctgagatcatcccggcacagcgcaagcgtctgggcaccaagcgcggtttcatcgcggtcaagtccaactgctcgatccagtcctatgttccggctctgtccgccctgatggactttgaaccgaccgaggtttccgtctgcacctatcaggcaatctcgggcgccggcaagaccttcgagacctggccggaaatggtcgataacgttatcccgtatatcggcggcgaggaagagaagagcgagaaggagccgatgaagatctggggccgcatcgagggcgaccacatcgagtcggcgacctcccccgttatctccgcgcagtgcctgcgcgttgcctgctcggacggccacatggctgccgcttccgttaagttcaagaacaagccgagcaaggaagtcatgatcgagcgctggaacaacttcaaaggccgcgcacaggagctgaacctgccatccgctccggagcactacctcacctactgtgaggaggataaccgtccgcagaccaagctcgaccgcatgaccgagaacggcatgggcgtcaccatcggccgtctgcgcgaggacactatttttgattacaagttcgtcagcctgtcgcacaataccctgcgcggcgcagcgggcggcgctgtcctgatggcagagctgctgtgcgctgagggctatatggaccgctaaggaggagcattcttactatgaagaagcctgtttttaccggtgcgggtgttgcgatcatcaccccgttcaagtccaccggtgaggtaaactacgaggagttcggccgtattatcgaccaccagatcgcacatcatactgatgcgatcatcgtctgcggcacgaccggcgaggcctccgccctgcacgacaaggagcaccgcgaggttctggcctggtgctgcgagtacgtaaaccaccgtgttcccgtcatcgccggcaccggctccaatcacaccgattatgccatcgcgctgaccaagttcgccgctgaatgcggcgcggacgcaggtctgtccgttactccgtactacaacaagaccacccagcgcggtctgatcgcgcactacaacgcgattgcagactgctctgacctgccgatcattctctacaacgtgccgagccgtaccggcgtatgcctcgcttcggacacgatcgccgagctgtccaagcacccgaacatcaacggcatcaaggctgcttccggcaacttcaccctgctcgctgagaccatggcgaagtgcggcgacaatctcaatgtctggtcgggcaacgacgaccagatcgttccgatgatgtcgctcggcgcaaagggcgttatttccgtcctttccaatgttgcgccgcaggagacccacgatctcacgcagctctgccttgaaaaccgttatcccgaggccgctcagatgcagttcaagtatcacagcctcatcgacgcactgttctgcgaggtcaacccgatcccggtcaagaaggcaatggagctgctcggctggaaggtcggcgatctccgtctgccgctcgttgagccgagcgaggagcacattgcctacatcaagcgcgagcttgagaacgcaggctgcaaaatctaaaacaggcgtttttccctgcataaacagataggagaacagataaagatgttgaaaatcgcgctttccggctgcagcggccgcatgggacgagtcatcagcgacattgtttccggccgtgacggcatggagatcgttgcgggttttgatctccgcacggagcagtacgccgatttcccggtttacaaggatttcgcggaatttcagggtgactgcgatgttgtgatcgatttttcgaacgctgcactgaccgagaacctcctcgactactgcgaagcacgccgtctgccggtcgttatctgcacgaccggccacagcgccgagcagctcgaccgcatccgtgccgcgtccgcctccattccgatattccgttcgggcaatatgtccatcggcatcaacctgatgagcgagctgctcaagaagtccgcgtccgtccttggcgacaagtacgatgtggaaatcattgagaagcaccacaatcaaaagctcgacgcgccgtccggcacggcgatcatgctcgcagacgcagtcgcctccgccctgccctacaaggctgaatatgtctacgaccgtcacgagcgccgcgaaaagcgtccggcgcacgaaatcggtatctccgcaatccgcggcggtacgattgtcggcgagcacagcgtgctcttctgcggccgcgatgagatcatcgagatcaagcacaccgcgctttcccgtgaggttttcgcggttggcgctgttgatgcagccgagtacatggcgacccgcacgcagtccggcatgtatgatatgaacgacgttatcgcgtccagataaacaaaaccatgcgccccttcattcgggaacgcatggttttcttttgcagcaaaaaaggcatatccgagagttttcctcgtcggatatgcctcttttctgtttatacgccgaagacgctgtccgcaaagtgaacagtcgccatcgcgtccttcgcgtagcagtccgcaccgatggagtccgcatattcttgcgtcagcaccgcgccgccgacgacaaccttggtgtccggttttttctcgcgcagctgcctgatggtctcctccatgctgacaacggtcgtcgtcatcagcgcgctcagaccgactaccttgatgtcctccctgatggcggtgtctacgatcacctcgggcggaacgtccttgccgaggtcgaggacctgataagcgtagttttcaagcaggaccttgacgatatttttgccgatgtcgtggatgtcgcccttgaccgtcgcgaggatgatcttgcccttggtctgctgatcctcacccttcatcgcttccttgacgacctcgaacgcagccttggccgcctccgcactcatcagcagctgcggcaggaataccgttcccttctcgaagcccttgcccacgcggtcaagcgccggaatgagctcaccgtttacaacatcgagcggcaccgccgtctgaagcatttccttcgcggcctgcaccgctcgctcgcccagaccgcgttcaatgctctcaccgaggggcattgccgcgccgcccgccgccgcgggagccgccgaagccgccggctgattgccgtaggcggcgatatagcctgcgcactgctcatcgaggttcgcgagcgcgaggtacgcgcgataagagcgcatcatcgcgtccatgttcgggttgatgatggcgcaggacaggccgctctggagcgccatggtgaaaaagttcgagttgacgatttcgcgctgcggcagaccgaacgaaatgttcgaaacgccgagaatggagtgtccgtgcagctcgccgcgcacgcggcgcagggtttcgagcgtcacgagcgccgagccgctgtccgaagaaatcgtcatggcaaggccgtcaattacaatatcctcgtgcggaataccatacttttcggcggtgtcgtagattttctttgccacctgaatgcgtccctcggcagtcgccggaatgccgttttcatcgagcgccagaccgaccactacgccgccgtacttgcgtacgagcggaaagaccgcttccatgctctccatcttgccgctgaccgagttgatcatcggcttgccgttatacagacgcatgccgcgttccatcgcctcggtattcgaggtgtcgatctgaagcggcagcgcgataacgctctgaagacgggtcacgacgcgctctatcatgagcggctcgtcaatttccggcaggccaacgttgacatcaaggatatgtgcgccgctgtcctcctgcgccatgccctcaccaaggatgtactcgatgttgttctcgcgcagcgccgccttgaacttgctcttgccggtcgggttgatacgctcgccgatgataaccggcttcgggccgatctcgactgtctgcgagaacgacgaaaccaccgttctgtgcttgggaaccggcgcggcgaacggctttttgcggcatacctcgatcattttactgatgtgtgccggtgtcgtgccgcagcagccgccgagcgcgtgcacgcccatgccggcaatctctcccatgagagtcgcaaactcctctgcgtcgatatcgaataccgtcgtgccgttttcgctgcgcggcagaccggcattcggattgacaacgatcggaagagaggaaacctcggtcaggcgcttgatgatcggcttcatctgtaccgggccaaggccgcagttgacgccgagcgcgtctacgcgcagaccttcgagcatggcaacgaccgaatccaccgtgccgccggtaagcagcttgcccttttcatcaaaaatagtggtgacaaccaccggcagatcgcagctttccttagctgcgagcaccgctgccttggcctcgtagctgtcgctcatggtctcgatcagaacaaggtcggcgcctgccgccgcaccgatgcgaatggtctcggaaaacagctcgaccgcccgctcgaacggcagatcgcccatcggctggagcagcttgccggtcggtccgatgtcgagcgcaacaaaagcctcctcgcgccctgcaaggctgcgcgcggtctttgcatggttcaccgccgcctcgacgatctcgcgcaggttgtccggatacttgagcgcattcgcgccgaaggtattggtgttgacgacatcacagcctgcctcaaaatagctgcggttcagcgcgatgatctcatccggatgcgacaggttccacgtttcgggcaactctccggccttcagtccgtgcgcctgcaggatcgtgcccatgccgccgtcaaaaaacacccattcttttcctaaacgttcggtcagtttcatttctctttatctcctgaagttgcaatctgttttgccgcattcctcgcagcccttgcgatggcagtcctgtttttcgggcgaaagaccgatgaccgccgtcaccgatttgatcggcgcgagcagacagctttcggtcacggtgagaccgatcttgcgcggtgtatcgagcagacgggaaaaatcacgctgatgctcgatggaaaaatcgccgtagccgggactgaagcgcggacggcagtacagcccctcccgctccgccatgtgccgcagcgcatcgttcacctcatcgcagcaggtctcgatcatggccgccgccaccgcctgcagaataacagcatcgctcatgcggactgccgaagcgcgcgcaatcagccgatctgcgccgatgccgagcgtcgccgccatcaggtatacttccgtgcagcccctgaggttgcgcgcgagattcgcgcttgtgacggtgagatcgccgatctgcatcgtattctccccgatgaaggacagcgggaagcgggcggagatgcttttcggctgcacagccgtctgaagctcagcggcacagcgttccaggctctccgctactgctgcgtccggctccgcaccgtgatatcccatgtagcgcagcgcttctctgcggtcaaaggagatcatccgaggatctccgacaggctggcctgaataccggcggcaatctccggcttgttcatcgagtaaacgtggatatggtttacgccgttcgcgatcaggtcgatgatctgctcggtcgcgtagatcacgcccgcctgcttcatcgccgccgggttgtcgccaaagcggtcgacaatcgccttgaagcgctcgggcagataagtaccggacatcgaagtgatgcgcttgatctggttgacgttggttaccggcatgatgcctgcgatgaccgggaccgtgattcccttctcgcgaatgcggtacaggaaattatacatgatattgttgtcaaagaacatctgcgtggtcagaaattcgcagcccgcttcgaccttttccttcagatgcagaatgtcctcggtcttgttcgccgcctctacatgaccctccggatagcatgcgccgccgatgcagaaatcgccctgtgacttgatgtcgcgcacgagctcggctgcataatggtagtcgctgtgcggagcgccgccctccgggatgtcgccgcggagcgcaaggatgttttcgataccgttttccttgtatttctgaaccatctttgcaacatgctcacgggtcgaggacacgcaggtcagatgagtcagcacggtgacgtcatactttttcttgaggtcagccgcaatattgaccgtatgctcgctcgtgccgccgcctgcgccgtaggttacgctcatgaaatccggtctcagcgccgcaatctcctgcgttgccctggctaccgactcatagctgctgctcgtcttgggcggaaacacctcaaaggagagggtgaccttgtcctgcttcaaaagttcagaaattttcatatcctgtatctcctacataatcgctctgttattgtcgtataatttttcggcattatgatttattataacacgccgccccctttatttccatacaaaaatgcgctataatatatcttaatggagggaacgaattttgatgagtctgctggaaaactgcaaactctgtccgcgcgcctgcggtgcggacaggacgaaaacgcgcggcgtctgcggtgcaggcgcttgcatcgaagcagcgcgcgcatcgctgcatctgtgggaggagccggtcatttcgggagcaaacggctccggaacggtatttttctcacactgctcgcttggctgcgtattctgccagaatcgtgccatcagccgcagagaggccgccggccgaatgattacagaggaaagtctcgccgccacctttctctcgcttcagcgcaaaggcgccgccaacatcaatctcgttacaggtgcacactatgtgccgcagatcatccgcgcgctcacgcttgcccggaacgaaggccttaccctccctgtcgtttacaactcgagcggctacgaatgtatcgagacactgcgcctgctcgacggacagatcgacatttatctgcccgactacaagtattacagcagctactacgccggcctctactcgcacgcacaggattaccgcgatttcgcggttcctgccatcgatgaaatggtgcgtcagaccggtgcgccgcaatttgatgaaaacggcatgctgacgcgcggcacggtcatccgtcacctcatgctgcccggtctcggcggcgacacctcgcagatactgcgtgatattgctgtgcgctggggagaccgcgtgctcgtcagcctcatgcgacagtacaccccctttgatatgggcgaatatcccgagctcgaccggacgatcaccgccgaagaatacgaaacagcctgcggagagttccgtgagctcggtcttggcggcttctttcagcaggacgagtcgatcagcgagagctttattcctgcctttgatggcagcggactggaggaaacagaacaatgaaaaatgtactcagcattgcagggaccgacccgacgggcggtgcgggcattcagaccgacctcaagaccttcgaggcacacggggtatacggcatggcggtcatctctgctgtcgtcgcgcagaacacctttcatgtgaccggcatgcaggctgtgccggccgatctcgtcggcaggcagatcgactgcgtttttgaggacatccgcccggatgctgtcaagatcggcatgctgtacgatgaggagatcatacataagaccgcagagtgtctgcgtgcgcatcacgcgaaaaatatcgtgctcgatccggtcatgatgtcatcgagcggtcaggttctgctgcgccgggacgccaccgaaacgctcatccgtgagcttttcccgctctgcacgctcgtcacgccgaatctgcacgaggccgccgccatctgcggccacgagatcactgaccgagacggcatggagcaggcagcaaaggaaatcgcagcgacaaccggcggcgctgtgctcgtcaagggcgggcacagcgccgactgtgcagatgacctgctgtttgacggtgagacctgtcactggtttccctcgccgcgcatcgacaaccccaacacacacggcaccggctgcacgctgtcctccgcgatcgcctgcaacctcgccgagggacattctcttgcgacgagtgtccgccgcgccaagcagtatctcaccgcctgcatcgcctatggtctcgatctcggccgcggctccggtccgctccagcacaaggtcggctgggaataatttcagaaaaacagcagtcctccgttccggcagccaaaccggcggaggactgttttctgttattcttccagctgttccagcagcagctttcgaaatccgtcacagacgtgctgcggcgcaacgatgcgcaccgcgccgttcaggccgacgacccacgcataaaactgcggactgaccgcaacggtcacactcgcaaagaaatgtgtgctgtcgtccggctgcaccatgagctcggagccgaaccggtcgcgcagaatgttgatggcatccttgcggcagcgcagacgcacgatctcctcgtgtccggaaaacatgccgaacatcttgcgcgcatacgctgccgggctgaagctgccgcggaaatgctgcgcaccctcgcgtttttcttcagtcagctgaatgttctccatcttgtcaacgcggtagttgcggatacgcgagccttccggcgcagacgggtcgtaggcgatgagataataattttcgttgtcccatgtcagcgcccacgggctgacgcagtaatatgcgccgtcatggcggtaatttcggtagattttatcccggcgtgtaaaatcgagcgcccagttgaaatacagaaatcgaattttcacgccactcgacaccgcgcggtgcagggcgtcgatattgtagtagatcctctcatctatgtttttcagacggtcgctgacatagacctggcgctgaagctgacgcgcttcttccctgcttgcaagagactcgatcttgccgatcaactcgcggcttttcttttccgtgataaaccgtgagcactggatcgcgtctacgagcagcttgagttcggggagctcgaactcgcgcgaggaaacgctgtagccgccgcccggaccgcgctggagaaaaatatccatgccatagtcctgcagggctgccacatctgcatagatcgtctttcggtcggcattgatacccagctgttccagcctggagaccagctgttctgcatttaggtgatgagtatcgtcggtctcttcgagcaggattcgccgcaggtaaaggagtttcagcttctggttcgagcttttcggcatgaaagcgcgccttctttccgggtgttttattggacttattataccgctgcgcacgtgaaaaatcaataagttctcgaaatcccgcaggctttgtgctatacttattttgaaatgatatgccccatacaaaggaggttttccgcatggagcgaccgatgtccgaatacgccgccgatgcgccgcgcatcctgcgcgattttctgacctatatttcgaccatccagggcaagtccgccaagaccgcccacgaatattatctcgatctgcggctattcctgcgtgtgctcaagcacaacaagggtctcgtgccgcgcgggctgccgatcgaccgcattgccatcgacgatgtcgacattgattttctcaaaaccgtgacgctgagcgatgcttatgattatctggaatacatgtccggcgagcgccccacgcagcagaacagcccggataccgagttcggcctgagtgtaaattcgcgcgcgcgcaaggtctccgcgatccgagcattctttcgctatcttactgacaaaaagcatatgctcgagaccaatccgatggcaagcctcgagtccccgaccatccgcaaaacgctcccggtctatctcaccgccgatgacagcgtaaagctgctcgaagccgtgcagggcgaatacgccgagcgcgattactgcattctgacgctgtttctcaactgcggcctgcgtgtatccgagctcgtcggtctcaatcttaccgactttcagcgtgataccgtgcgcgtcaccggcaagggcggcaaggagcgcacggtttatctgaacgaggcctgcgccgacgcgatcaaccagtacctgccgcaccgcctccgtccgcacgatagggataaaaacgcgctgttcatcagccgcaaccgcaaccgcatcagtgtccagacggtgaaatggctcgtcaagaaatacgtcggtcaggccggtcttaacacgcataaatattccgcacacaagctgcgccacaccgccgcgacactcatgtatcagaacggcgttgacatccgcacgctccaaaccattctggggcacacaagcgtcagcacgaccatgatctatacccatatcgaggacagcagcctgcgcgaggcggctcagaaaaatccgctcgcatccgttcaccctcaccgtcagagcggcgggaaagctgcttcagaacaggaggaaacccatgaagatacttaatttcggttcgctgaacattgataacgtttacactgtcgaggaatttgtccgtccgggagagtctgttaccgcaaagagtcacacggtctttgcaggcggaaagggtctcaaccagtcgatcgccgcggcgcgtgccggtgcggcggtcatccacggcggcgcgatcggccctgacggcggctttcttgccgctctgctcgaagatgccggagcggatgccggtcatctgctcaagctcgacatccccaccggtcacactgtcattgaggtcgatgccggcggacagaactgcattctcgtctggggcggcgcaaaccacgggctgacgcacgcataccttgaggatgtgttcgcctgcggcagcgacggagatatcgtcctgctccagaacgagaccagcctcaccgacagcatcatccgccgtgcgcacggtctcggcttccgcgtggtatttaacccctcacccttcccggcgaatcccgatgcgctgccgcttgacgatgtggatatgtttatcgtcaatgaaagtgaggcggcgcttctcgcaaacgccgcccccggcactgcaccggcgaccctgttagagcatctgcatctccggttcccctcggcggatcttgtcgtgacagcaggcgaacgcggtacgatcgcccttctcggcggcacagaatacgcgcaggaggccttcccggtcaagaccgtggacacgaccggtgcaggcgataccttctgcggctatttcctcgcggccgcctgcgcacacaaatcgccgcaggcagcactctgcgaggcctctgccgctgccgccctcgcggtttcccgtgccggcgcagcaccttccatcccgcaggccgatgaagtacgcacctttctcaagaagcgtatgttcctccagcagatcgagtgacagcggcgcaataagtccgctttatttccctcattctccggtataatgaaaccatcgaaaacgaggggaggcgcgcaacatgaactgcacgctggaatatgtaaacggacacattgaggtatatgacgcagacggcgcgttcctgttttccgccgacaccagacaggaagcggtcgaggaactccaggacgccgcatgaatacaaaaaagctcccgattacgctttcgggagccttttttattgcagtctgcatttattcggtacgcattttgtcgaatttttccttgatatgcgctgccgcggcggcagggtccgccgccttcataacagcggagacgaccgcaacgcctgcgatcggactttccgacagcacatccatgttgtccgcattcagtccgccgatcgcgacgaccgggatcggcacagcgcggcagacatcgttcagcacggaaaccggcgttaccttggtggtgacatgcgtggtggtcgggaagatcgcgcccgtaccgaggtagtcagcaccatcctcataggccgccttggccgcctcgaccgattttgccgtcgcgccgacgatcttgtccgggccgagcagttttcggcagaccgcgaccggcagatcgctcgcaccgacgtgaacgcctgcggcatcgcacgcaatcgcaacgtctacacggtcgtcaatgatgagcggcacctgaaagcggtcggtgaccgccttgaccagctgcgccagttccagatacgcgcggccgcccgtctccttctcgcgcagctggacgagcgtcgcgccgcccctgcaggcctcctcgaccgcgtgcagcagcgtttcggtcgtgtgataggtgctgtccgtaatgacatataatgtgggatcaaatttcattcttcttctccttcttcctcttcctctgttcctgcgatttccgtgacgagcaggccttctccggcgccgagcgatgcgagcgtcgtgccatccggggcaaagactgcgctgtggccgataaaatgatccgcgcgatactgatccgcaccgatgaccgtcacgtcgttttcaatggcacgtgcgcagagcagcgtattccagtgaagcggcttgttttcgccgcagacccagcctgccggtacaaaaagcacttctgcaccgcgttttttctgctcggctgcaagttccgggaaacgcagctcatagcaggtgatgatgccgagcctgccggccggggtctcgacaggttcaaagggctgctctcctgcccggcactcctccgactcgcgatagccgaaagcatcataaaggcggtttttgcggtgcgtgccgcgcagccgcccctcatcatcaatgacgacaaccgtgttgtacggcagaccgtcggtctgctcgtacatgccggcgcagatccagaggccctgacctgctgcaagctcgctgagtgcggtgacgaacgggccgtcgaacggctccgcggcctccatattgcgcgccgcgcggtcgtttcctgcgcagaacatcgcgtattccggcaggaacagcatatctgcaccggcctccgatgcgctccatgcaagccgttcgatcatataccggttcatctccttgttttcgccggaaccgatctgagcaactgcaatcctcattcttctctccatcctttgcatatgtctacccatgccttgaagccggaatatttttcgagctccgggatagtcagttcaatggcggaattggacgagccgcaggccgggaaaaccgtctcgaagcgtctcagcgattcgtcaaggaatacggtcacgccctcgttgacgccgaacggacatacgccgccgaccgcatgtccgatttccggctcgacctcctcaaaggcgagcatacgcgccttgcagccgaagcgcgccttgtatttcgggttgttgatcttggcatcgcctgccgcgacgatcaggatcacgccgtcgttcgtgcggaaagacagcgttttggcaatacgcgccggttcgcagccgactgcctccgcagccagctccaccgtcgcagacgatacgggaaattccacgatgcggctgtccgcatcatattttttcagccatgcacaggctttttcaatcgacatcaggtctcagtctcctttttcctccgagggtatcgcgtcgatcatgctctcgcacaggcggcgcaggtaattggcgatctcgctgagcgcaaggcacagacgcaggcggtcattcgggtcgctcgcgtcgtttgtgagctggcttcgcagcagctcggggataaatgtgcgcatatgctccttgtcttcaagcagtgcggcataacaggcttcgaaatccacatccgtccggcctgtcagtgccttgacgtcgctcagacgcagcgtctgcttgagatgatacacgcacagcagctgcatgatctgctcccgggtatactttttaccccggaccggtgtcatcagtccttctttgacataattattgaccatcgtcttagtcagcagcttgtcgcccggcgcacgcttgctctcggagagcgtgcggtcgaacagcgtgagcacctgatccatatacagatcaagctgcgggacgtcagacggtgtgatgtcgcggtcggaaaataccgcgtctatggtctgttccagccgtggcataggttccacctctttaccatatagtttactgtactattatatccccttcgttcgccgtgtgcaagagccgcagagtacgaaagtagacagatgaagaaatttgtgctatacttgtttcggctccgacgtagtaaggattttcctctccgccggacagaaaggcaggaaagaagcgatgaatcagttttttcagcggagcatagccgctgcggctgcggcactcgcgctgacggcagggcttgccgccggtgcggcagagacacagagcagctcaatgcccattctgatgtaccacgatctgactcaggacccgaacaagacctccagcatgacgatcacggatgagcgtttccgtctggacatggagtttctggcgtcgtttggctatacgccgctgttcccgagcgaagtcgaggagatcggcgagggaaagcgcagcctccccgcccgtcccgtgatgatcacctttgacgacggctacctctccaattatacgatcgcagcgcctatccttcagcagaccggcatgaaggcgaccgttgcactcatagcaagccacatcaaggacgcggacgataccgacagcagccgccactcgctgaactggaacgaggtaaaatccatgtatgacagcggtcggttccagttcggctcccatacctatgatctccataacccgaagtacggcggtgcaaatgcgccggacggcatcaacggcatcatgcgcgaaaagggcgagagccagtcacagtacactgagcgcgtcgggaacgatctcgcgcagagcatttccctgatcaagcagcacaccggtcagacgaccgtcaattacttttcctatccttatggcgcgtatgaccgctggatgcagcccatcctggagaaaaacggcatcaaaatctcaacgctgaccaatgccggcatggcgcgtccgacctacggtctttacaatctgccgcgctacggcatccgcatggaccgcacggttccgatggtgctgcgtcagagggcgaccgccgccccgacgaccgtcacggtctctctgaacgggaaaaagaccacgcttcaggcttacagcatcggtgatgaaaattatgttcgcgtgcgcgacgcggcgctgctgctgagcggctgcgaatgggattacgcagttggctggagcgaggaaaagcagcaggtcacgctttctccgcgcgagcagtacacccccatcggcacggaaaacaaggtgctttctcctcaaaagcgcactgtgcagtcggtcacagagccgaccatcgtggagggacagagtcacatgatcgcagcgttctgcatcgacgactacaactattatcgtctgcgcagcctcgcctcggtgtgcggttttgacgtgagctgggacgaagcaaaccagacggttaaaattgttgcataacgtaaaattctatatttttcgcaaaatgtgagcacagaattaagttctgtgctcttttttgttcccggtgcatactgttcgaaaaaacggcaaaaattacatacagactttctcttgcaatctctcagaaatatggtatcataataagtgttatatagtatttatctctacatcacttcaaggaggagtccatatgcctcgtgcatttctcaaggccagagatccgttttcctgttattcacactttgtcggcgccgttctcagtgtatccggtctgctgatcctgctgctgcggctgctgtttgatcctgatatttccggacagcttgcaggagcagccgtggtgttctgtctctcgctcatcgcgctctattccgcgagcagcgtgtatcatttctcgctgcgcggagaagctgtgcttcgccgcctgaaaaagctcgatcacagcatgatctacgttcttattgccggcagctacacgccgatcatcctgaaattcatgcctgcaccgcgcagttttctcttcctcggcgtcatctggctgatcgcactgaccggcattgcggtcaagctgctctggatcgacgcgccccgcctgatcggcacagcgctttatctggccctcggctgggccatcgctttcgatttcggtgtcgtactttccatgccctcccccgccattgcgctgctcgcagccggtggtcttgcctacacggccggcggcattatttacatctcgaagcggccgaatttcagcacccttctcggctttcacgagctgtttcacctgttcgttatcgtcggcagcatctgccattatctgatggtcatgctgtatgtactgtaatctttcgccaatttgcttcctgctattgacagacctgctaataggatatataatctaattaagattaaatatcaattagaaagtgaggtcatattcatgcagacaagaaacaccgttcagcgacagattgttttacaggcggtgcgctcgctgcacgaccaccccacagcggacagcgtttatgctgtcattgcagccgagcatccttccatcagtaaagcgactgtgtaccgcaacctcaaccagctcgcccttcagggcgaaatcctgcgcgttccggtgccgacgggcgctgaccgcttcgatttcaacacgcaggagcattatcatgtgcgctgcaccgaatgcggcaatgtctacgatgtattcatgccgcccatctccgacctgcttgaccgcgtgaccgactcctcggatgtcgagcttacccattatgacattctttttgagggcgtgtgcgcggcctgccggaataaataaacgtcagaaatcgaaaggagcaaaccattatggctgatctgaagggcacaaaaaccgaggcgaatctccagacggcgttcgccggtgagtccatggcgcgcagcaaatacacctactttgcctccaaagcgagaaaggacggttatgtccagatcgcaaagatcttcgaggaaacggcggcaaacgaaaaggagcacgcaaaaatctggtttaagctgctcaacggaggtatcgatgacacgatcacgaacctcaaggccgcagcagccggcgaaaactacgagtggaccgatatgtatgcagcctttgcaagggaagcgcgcgaggaaggcttcgaccatatcgcagacctgttcgagatggtcggcgcgatcgaaaaggagcacgaggcacgctacctcaagctgctcgacaatgtagaaaacggtctggtgttctcgcgcgacggcgactgcatctggcagtgctcgaactgcggtcacattgtcgtcggcagacaggcgcccgacatctgtccggtctgtgcccatccgcaggcatattttgagctcaaggctgataattactgatatccgttgtaccgataaacaaaggggagaagcgaaggcttctcccctttcctattcagtctgccgcgcggacggcgttcttcatgctctcaacgtattccttgacatacggcacacagtccttgccgtacttcgcgcacagcttgacgatggccgagccgacgatcgcaccgtccgactgagccgccatttttgcggcctgctcaggcgtggaaataccgaagccgacggcgcacggaatgtcctgtgtttccttaacgagcttcaccatcgcgccgatgtcggtcgtgatgttggagcgcacgccggtaacgccgagcgaggatacgcagtacacgaagccggaggcttccttcgcaatcatgcgaatgcggtcatgcgaggtcggcgcgatgagtgacacgagatccagaccgtactgacggcagagcggatcgaactctgccttttcttcgaacggtacatccggcaggataagaccgtccatgccgatctcagccgcggtgctgatgaagcgctccgagccgtaggaataaaccacgttcgcataggtcatgaacaccatcggaatgtcagtcttctgacggatgcggcgcaccatgttgaaaatcttatccgttgtggttccggcagacaaggcgcgcacatttgcctcctgaatgaccggtccctccgcagtcggatcggagaacggaatacccagctcgatgaggtctgcgccggcgtccgccatcgcatacacgatctgctcggtgacctcgagcgacgggtcgccacaggtcacgaacgggataaacgccttgccgtttgcaaaagcagtctgaatcttactcatggatattctctcctctgtaacgcgcaatcgcagcgcagtccttgtcgccgcggccggaaatgttgataacgatgatcttgtcccttcccatcgtcggcgcaagcttcatcgcgtgcgcaacagcgtgtgcagactcgatcgccgggataatgccctcgatgcggctgagatattcgaaggcctctaccgcctcgtcatcggtcaccggtacgtactccgctctgccgatatcatgcagataagcgtgctccgggccgatgccggggtaatccagaccggccgagatggagtagacgggcgcgatctggccgtattcgtcctggcagaagtaggacttcatgccgtggaagatacccagacggccggtcgcgatggtcgcagcggtctccgccgtatcaacgccgcgtcctgcggcctcacagccgatcagacgaacgccttcatcctcgatgaaattatagaatgcgccgatggcgttcgagccgccgcctacgcacgcgagcactgcgtccggcagacggccttccttctcgagcatctgctccttgatttccttggaaatgaccgactggaaatcacggacgatggtcgggaacggatgcggacccatgcaggaaccgaggcagtaatgcgtatcgtcgatgcggctcgtccactcgcggaacgctgccgagcaggcatccttgagcgtgccggtaccggtcgtgaccggaatgacctccgcaccgagcaggcgcatgcggtacacgttgagcgcctgacgctcggtgtcctcgacgcccatgaatacgacgcactccatgcccatcagtgcagcggcggtcgcggtcgcaacgccgtgctgaccggcgccggtctccgcgatgagacgggtcttgcccatcttcttggccagaagcgcctgaccgagcacgttgttgatcttatgcgcaccggtgtggttgagatcctcacgcttgaggtagatcttcgcgccgccgagatcgtttgtcatatgctccgcgaaatacagacgcgagggacggccggcatagctgttcagcagctcggtcagctccgcgttgaattccggatcgtccttatagtggttgtaggccgcttccagttcgatgactgcgttcatcagcgtctccggcatatactgaccgccgtgtacgccaaaacgtcccttgctcattggtgtgctcctttcacaagtgccgcaacacggcgcatcttgttgatgtccttggtgtcgtctgtctctatcccgctcgaaagatcgagcgcatacgcgccggtctgcgccgcgcgcgtgatattttcttcgttaagcccccctgcgaggaaatacgggtggctggtctccccaatcagcgaccagtcgaaggtctttccgctgccgccgtaggcatgctttacataggtatcgagcagcagatagtcgaccggaagctggtccgcctcttcaatgtcgcgatgtgtctcgacgcgcaccgcataaatgatgggagcgttcgtcagacggcgcagctttttgatgtagtgttcattttcgtcgccatgcagctgaatgaggtcgatgacctcgtccttcaccagcgccgcgatatgctcaggctcgtcgtttacgaatacaccgaccgttttaatctccggatcgagatgctccttcagccgtgccgcgtccagatcggacacatgacggcggctgtccgcaaacacaaagccgatatagtcagggcgggtctcatttgccgcctcaatatcctcgatacgagtcagtccacagaatttcagtttcattttgctacctcccgaagcgcattaagcgcctgttttttgtctgatgcgcgcatcaggtactcaccgacgagaatcgcgtccgcgcccgttctgcgcagcgccgcagcgtcctccggcgaggaaacgccgctctctgccacaaaaaccgtgcctttcggcgcgccgttccgcagcttagccgcgtttccgagatcgaccgtaaagtccttgaggtttcggttgttgacgccgatgagccgcgcgcctgcctgtaccgcagactgcatctcctgcgcgtcgtgcgtttccaccaaagcgcttatgccaagtttgtcacaaatgccgatgtaatcgcgtatcgtttcggtgtcgagcagcgtgcaaatgaggagcaccgcatccgcgccgagcacctttgcctgatagatctggtactcatccactgtaaaatccttgcggatcatcggacgggtgacgatctttcgaacctttttgaagatctcgtccgagccgaggaaccagttcggctcggtcaggcaggaaacgcagtccgcaccggcgtcctcatagctgcgcgcgatggcttcaaagtcaaataccgggtcgatgacgcccttggacgggcttgccttcttcacctcgcagatgaacgcgcagtccttccctgccagcgccttctcaaagcgaaaatcgcccttcggcatggctttcgcctgcgcttttatatccgcgagcggcgttttcgcctgatctgccgcgacccgtttccgggcaaaagcggccagttcgtcgaggatcatgccttcgccgcctcctgcgttgcggctgcgaactgatcgagcttggcaagtgccgcaccgctgtcgatcagctctgcggcctttttgatgccgtctgcgagcgtcaggccgtccaggccgagatacagcgcgatgcccgcgttcagcaggatctcttcacgctttgcgccctgctccctgccggaaaggatgtctctggtgatctgtgcattcaccttgggcgagccgccgcgcagatcatccaccgtgcacagcgacagtccgtatttctcggggctgagctggtacgggatcagcctgccgtcacgtatctcgcagactttgttctctccgatgaggctcgcctcatccatgccgccgccgcatacgaccatgccgcgcgttacgccgaggttggaaagcacctgtgccatcggcatgaccagattttcgtcatatacgccgagcagctgcatggtggcgcgcgccgggttagacagcgggccgagaacgttgaagatcgtgcgctcgcccatgcccttgcggaccggcgcgacgttcttcatggatttgtggtagccctgcgcgaacaggaagcagattccggtctcgctcagcaccttttcgttctgttccggtgtgaggctgagcacgacgccaagctcctccagaacgtctgctgcacccgacttggaggataccgaacggtttccatgcttggctaccggcacgccgcctgccgctgcaacgaacgccgccgtagtcgagatattgaacgagccgacctcgtctccacccgtgccgacaatatccatgaccgcgcccttcggttcgatgtgcgcacccttctcacgcatgacctcggcgcatgccgtgatctcggtgatggtctcgcccttcattcgcagcgcggtcagcagagtcgccatttcaatatcggtcgccgtgccgtccatcatttcctccatcgttgcgcgggcgatggcgtagtccagatcgcgcccgttgattgcttcgtggattgcaagctgtatcatgatatatcaacctttctgcttcagatgttatacattcaggaaattcttcataataaccgttccctgcggcgtcagaatggactccggatggaactgcacaccgtagatcggcatggttctgtgccgcacggccataatttcaccgcgctcgtcgcgcgagatgaccttgaggcagtcgggcagaacgtccggtgcggcaacgagcgagtgatagcgtgcgacctttaccttttccggcaggcccgtgaacagcggctccgccggatcgaccgtgacctcgctctgtttgccgtgcatgagctgctgcgcgtgctcgatacggccgccgaatgcctcgcagatagcctgatggccgaggcacacgccgaggatcggaatgcgtccgccgagctttgtcacgacctcctcgcagatgccggcgtccttcggatagccgggacccggtgagaggatgatgtgtgaaggattcagcctctcgatctcgctgacggtcagcgcatcgtttcgcacaacgcgcatatccggctcgatggctgccgcctgctgatagagattataggaaaaagagtcgtagttatcgatcaggagtatcattatccgtctacctccgaagcgccttccagtgcattgatgaccgcgcgtgccttgttcgcgctttccatgtattcattatgcggcaccgagtctgccacgatgccgccgccggcctgcacggtgacgataccgttctttttcgccgccatgcggatggcgatgcaggtgtccatgttgccggcaaaatccagatagccgagcgcaccgccgtatacgccgcgcggctcgctctcctgctcctcaatgatctcgcaggcgcggatcttgggcgcgccggacagggttcctgccgggagcaccgcctcgatggcgtcgcaggcgtcgtactgctctgcaatatcgccctcgacctgcgagcagatgtgcatgatcctggagtagcggtggatcatcatataatccgtaacctcgaccgtgccgaccttggacacgcggccgagatcgtttcgtccgaggtcgaccagcatgttatgctcggaaagctccttctcgtcggcgagcagttcccgctcgagcgccctgtcctcttcctccgtctttccgcgcggacgggaaccggcgaccggaaaggtagtcaggcggccgtcctgaaggcgtacaagcgtttccggcgaggagcacatgatctcgtccccgtcaacggaaaggaacaccatgtacggcgagggattggtggtgcggagcacgcgatacgcggagagcaggctgtctgcataagggctcgtgaactgccgcgactgaaccgcctgaaagatatcgccattgaagatatattcgcgcgtcttttccacgatgtccgtgtactgctcttccgttacgttgcaggtgaactgcggctttgccgtgaccctgagcggcggcagcggcgtctgatctccgatgagcgccgccattgcttcgagtgaagcgcaggcctttccgtaattctccagaacgttgtcggtctgcatattgacgatgagcacgattttctgcttgaggtggtcgtatgcgatgaccttgtcgaacagcatcagatcgaagtcgtcccatgcgccgcgcttgatcctgagcgtcggttcggcatagccgagcatcgcatatgcgaagtagccgacgaagccgcccgtaaacggaggcaggccttcgatgtgcggcgcacggtacctgctgagcacctcccgcagtacggaaagcggcttgtctgtctcgaccgtgcggttctctgcgccctcgagcgtgacccttccgttcttgcaggtcgcccggagaatggggtcgtagccgaggaaggaatagcgggcccacttttctccgccctctacgctttccagaagaaagaagcggtcagagcgcgtctgaagccggcgcagaagcgcgatcggcgtaatcatatcagcataaatctcacggcagaccggaatggtcgtgtatttttctgcgagctttacgatttcatcactgcctggagtaatcatggtgtctaacctccacatcgaatttaagtcaaacaaaaaaggctttcgtcctcatgatacatgactgtatcatgggacaaaagccttgaaaacttctgcggtaccacccagattgacgcatagcgcccactcaccagtgtgccatcacacaccttcccctctaacggcgggataccgtcagccatactctcccttcggatttcagaccaccctcacaagtccattcagaatcgtcctgcgatactgtcctttcaccaccggacagctctctgggaacgcggtttcgttcttacttactcttgctcttcggttttcgtgttcaactgtgaccaagtataataccagaattcggagttgtcaagcaccttttaacattttccccctttggcggacagctgcctgttttgtccgtgtcagcggaacatcggcggcaggcagagttcgtgtctgggaatacgcgaccagtcgaagtcccgcacaagctcccgaacacttaccggctctgcgcggtcggtgagatgcgcggcgaaggcaagcgctccgatgacctgctcgggcgtaaagcgctcgcgcagcaggccgagatcgagatcctcgtcccgcttggacagacggcgtccgtccacgtcgcacagcagcggaatatgtacgaaatgcggcggttcgaagccgaacaggcggtacagccagatctgacgcggcgtgctgaagatgaggtcgcttccgcgaacgacctcggtcacgcccgacaggccgtcatcgaccgtcacggcgagctggtaggcgaaaacgccgtccgagcgccggataatgaaatcaccgcactcctccgccaggttttcgctgtacgcgccgaacacgccgtcggtgaacgagatgatctcgtcgggcacgcgcacacgcgttgcaggcgcacgttttttccgttttttttcgatctccgcaggcgtgagatcccggcaggttccggcatacagcacgcggccgtccgaaagatgcggcgcactcgcggcgtgcagcgcggcccgggagcagaagcacggataaagcagccccttttcacgcaggatctgctcgtatttttcataaatcggcgcccgctcggactgatacggcacctcgccgtcccagtcgagaccgagccagcgcagatcgtccataatgaggtccgcgtagctgcgcggacagcgcatcgcgtcaagatcctcgatccgcagcaggaacgcgccattctgatgccgtgcgctcagccacgcaagcagcgcgcacagcacgtttccaaggtgcatacgcccgctcggactgggcgcaaagcgtccgaccgtctgcatcggcagtctctcccttctgtcttttcactccgactattctaccacatcgcgcatatacattgcaacagtccggtatttctgctataatgaagcgcacaaggatttgtcacgaggaggaaccgtcatggccgtacgaaaacaccttgctcttgcgctgctgctagcactcggcctttccgcgtgtgcatcgagcgagccgccgcaggcggaaacgccgcccacccggcagacacagcccgaagcacctgagccgacgctcgaggagcagcagcaggtcgccgctgagggatacaccgaaaagcttacccttgagcagcagactgcgcagctgttctttgcacgctgtccggacacggacgccgccgctgaggccgctgaatacagtcccggcggatacatcctgttcggccgcgatttcgacggcaggacccgggagcaggtgcaggacagcatcgcctcttgtcaggctgccgcagccgttcccatgctcatcggtgtcgacgaggagggcggcacggtcgtgcgcgtgagcgcgaaccccaatctgcgcagcacgcgcttttcctcgccgcaaaagctgtacgctgagggcggtctcgaccgcatccgcagcgacacggaggaaaaggacgcgctcctgctctcgctcggcatcaacgtcaatctcgcgccggtgtgcgatatttcatccgatccgtcgagctttatctacccccgcacgctcggtcaggatgccgaaacgacgagcgactatatccgcaccgttgtcgggcagatgaagagcgacggcatcggcatggtactcaagcatttccccggctacggcggctccgcggacacgcacaccggacaggcgctcgatccgcgcccgctgagtgactttgagaagaacgatctgctgcccttcgaggccggcatcgatgccggtgcgcaggccgtgctcgtcagccacaatatcgtcgcctgccttgacgcagattatccggcatcgctctcccctgccgtacacgctctgctgcgcgaccggctcggctttgacggcgtgatcatgaccgacgacctcgccatgcaggcggtgaccgattttacaggcgacgaaaacgccgccgtgctcgctgtacaggccgggaacgacctgatcatctcgtccgatttcgtcacgcagtaccacgcggtgctcgacgccgtaaaaaacggcacgctgcgcaaaaatgacatcgagcaggcagcacagcgcgttatcctctggaagatacagctcggtctgatctctttctgaaatcgctttttcttcgatatggaggcaatctatgaacataactgtatatctcggcgcaagcagcggcaattcccccgctcttgaacaggcggtacgcgcgcttggcgcatggatcggcgagagcggcaacgcgctcgtctacggcggctcgaaatccggtctgatgggcgtgctcgcggagagcacactgcatacaggcggccgcgtcaccggcgtcgaaccgcagtttttcatcgacgcagagcttcagtacgacgcgatcgacgagctgatcgtcaccgaaaccatggcggagcgccgcacgaaaatgatcgaactcggcgatgcgttcatcgcgatgcccggcggcacgggtacgcttgaggagatttccgaggtgatgagcatgtgtgcgctgggtcatctcgacgccccctgcattctgtacaatctgaatggctattacgatgacctccgctcgctgctgcgccgcatggtcgacgccggactttcgaccgaagaccgccagcgcggtattttctttgcgtcgacgctcgacgaaatccgagagctgctgaaataaggtttcgctgtctgtaaactgcgttatccgcagtctaatcccccctttctgtgcatatgctgaagcaaacgcatggaaaggggtcttttatttgctgtttcctgctctggcggcgctcggcggcgcatttttcctcttcgttctgcgcgtgcagggggcggacggctgctttcccaggccgctctccgccgaggaagaagcgaagctgctgaagaaaatgcgcgaggaaggcgatacatccgcgcgaaacctcctgatcgagcataatctccggcttgtttcgcatatcattaaaaaatactactccccagaggcagaacgcgacgatcttgtttccatcggaacgatcggtctgatcaaggcggtcgacacctttcaggcagagcgcggcatccgtctgactacctatgcctccaagtgtatccagaacgagctgctgatgcacttccgccgcaagcgcagaacggccggcgaggtctcgctttcggatacgctagagaccgacggcgacggcaatgcgctttcgcttcaggatacgatcagctgcgaggacgagggactgaacgccgtggacgatcacgaccgctattattcgatgtaccgcgcgctcttctcctcgctcagcccgcgcgagcgcgaggtcatccggctgcggtacggtctcggcgctgccgctccactgccgcagcacgagatcgcccgccgtatgaacctgtctcgcagctatatctcccgtatcgaaaagcgagccctcgagaagctgcgcggcgccatcggtgagatgcctccataaaaaatcctgctgttcggagaaaaaaacttgacacccggctgcggatgcgctataataataaagtcgcagagagcggcaagcattcagccgaa

SEQ ID NO: 13037 - DNA, 14545 bp, Unknown
  gut microbiota DNA sequence
ggaccacttgaaaccacagggtttcgagtggttttttatttatctttgaaaaaggacgtgaacaccatgcgcatatcctcggtcatcggactgtatttcagtccgaccggaaccacacgcacactcgtcaccgccgccgcggagcaggctgctcaaacgctcggtgtcccctgccgtctcatctcgctgaataccccggcagagcgtgaaacagaatttcacttttctgctgatacgcttgtcatcgtcggcgcaccgacctatgcaggcaggctcccgaacaagatttcgcccgacctgcgccgcatcctgcatggcagcggctctcctgcggtcgcactcgtgacctacggcaaccgcgcctatgagaacgcgcttgcagagctgttccgtgtgctgaccgacggtggcatgaagccggctgccggtgcagtctgtgtctgccagcactccatcgcccgtgcgcttgcggtcggacgcccgaatgaagaggactgcgctgaggtgcgccgctttgccgccgaagccgcagaacgcattcaggctgacgaaatcgttctctcccctgccgtgccgggcgacgcagacagcagctattatgtcccgaccggtacgagcgggaagcccgcgaaatttcttaagtctgcaccgcagaccgaccctgaaaaatgcgacggctgcggccgctgcgcggcactttgtccgatgggctcgatcagcagcaaagatccgtctgttgtttccggtatctgcatcaagtgccaggcctgcattctcggctgcccgaggggcgcaaaatttttcgacgacgaacagtttctctcccatgcgcgcatgcttgaacagaagtttgccgggatacataaggaaaacgagttttatctgtaaaaaagagcgaaacctgcttccgcatggtttcgctctttctttattttcggcccttgacgcgatcccagtacgtctttgctgtctgctcggtcttattcgggccgaattcataatatttcgcgccggaaagctccgccgggagatagtcctgttcgacccagtgattcggatagctgtgcggatattgataggtcagtccgcgtccgagcttcgccgcgccgccgtaatgcgcgtccttgatatgcgccggaatgtcgccgcttttgcctgcgcgaatgtctgcgagcgccgcgtcgatcgccatgcaggcactgttggacttgggcgcggtcgccatgacgatcgccgcctgtgcgagcggaatgcgtgcctcgggcagaccgagctgaaaggcgctgtctacgcacgccttgacaatcgccgcgcactgcggataagcgaggccgatgtcctcgctcgcgatgaccagcatacgccgcgccgccgagatcatgtctccagcctcgagcagacgcgcgagataatgcaccgctgcatccgggtccgagcctcgaatggatttttgcagcgcggacagaatgtcataatggctgtcgccgtcgcggtcgtagcgcatgttcgaacgctgcgccgcctgctgcgcatctgcgagcgtgatgccgttctccccggctccggagacaagcagctcgaccgcgccgagtgccttgcgcacatctccgccgaccgcctgcgcgatatgtgacgcaacgccggcctcgaccggaatatcgcgtccgtcaagcgcgagcacgaacgcccggtcgaccgcgcgctgcatatccgatgcttccaccggcttgaactcaaacaccgtgcagcggcttaaaatcgcgttgtaaatatagaaatacggattttccgtcgtggacgcgatgagcgtgatcttgccggtctcgataaactccagcaggctctgctgctgctttttattgaaatactggatctcgtccagataaacgagcgcgccgttcggcgtcagaaaggtatcgagctcatcaatgatggccttgatgtctgcgatgcctgcggtcgtcgcattgagatgatacagcttgcggtcagtctgcttcgcgataatagacgcgaccgttgtcttgcctacgccggacgggccgtaaaagatgaggttgggaatgctgccgctctcgatgacgcggcgcagaagtccgtttttcccgagaagatgctgctgtcccacaacatcatccagcgttttcggacggattttatcggctaaaggctgatacatggcaaattcccttccaatcatagaatgtaaatcaattatagcacactctccccgatttcacaaacttctcttgacttttccactttatcatggtaaactaatgacatcaacaaaaccgacagcaaaggagccttctcatgaacaagccttttctcgataagctgcgcaggatcgacccgtatgtgccaggcgagcagcctaaaaccgcgaacatcatcaagctcaacgccaacgaaaacccgtatccgcctgcgccgggcgtgaccgaggtgctgcgcacctttgacgcggcgaagctcgctgtctatccggacgcaaacgccaaagcgctcaagaccgtgctcgcggagcgggaaggcctcaagccctcgcaggttttcctcggcaacggctcggacgatgtgctcgcgctcgcgttccagtcgttcttctgctcgggcgagcccatcctctaccccgacattacctattcgttctacccggtctggtgtgatctgctccgcatcccttacgagaccgtgccgctcgatgaaagcttctgcatcaatctgcgcgattacgacaagccgaacggcggcgttatcctgcccaatccgaacgcaccgaccggccgtgctctctcgctcgcggagatcgaggatctgcttcagcacaacgccgactgcgtagttatcatcgacgaagcctatgtcgatttcggcgcggaaagcgcgatttcgctgatcgaaaagtacgaaaatctgctggttgtacagacctcgagcaaatcccgttcgctcgccggcatgcgtatcggctatgccttcggctcggaaacactcatctccaccctcgaagcggtcaaaaattcgtacaattcctatacgatggactcgcttgcgctcgcagtcggcgaggcatccattcgcgatgaagcgtatttccgtgagacctgccgcaaggttgctgcgacgcgcgacagagcagcagacgagcttcgcgcgctcggtttcgaggtcacgccatcgctggccaacttcctgtttgcgacccacccgaaaaaggcggcgcccgaaattttctctgccctgcgcgaaaagggtatcttcatccgctatttcaaactgccgcgcatcgacaatcacctgcgcatcacggtcggcacggacgagcagatggacgcgctcattgctgcgctgaagcaaatcctgtaaccgtatcgacataaaaaagctgaacccgcggaacaaaacgggttcagctttttactttttatttgtcgatgagcttgatgatctcgtcaattttctgttcgcgtgcctgttcgtcgccgttttcaaaggcgtcccggacgcagccgttcagatgtgcgcggagtacctcccgctgcgccttgtgcacgagtgactcgaccgcctgaagctgggtcacgatgtccatgcagtagcggttttcgtcgatcatacgcagcacgccttcgagctgtccgcgcgcggtgcgcagcagcggctcgacacgcttgcggtctgccatcattcgatgccgaccaccttatagcctgcctcggtgactgcgctcgtcagcgctgcatcgtccggaagctgctccgctctgacgactgccctgccgccgtcgagatcgacctcggcggtcacgcccggcagctcctcaagcgcctttttaacatgtgcgacgcagtgcatgcacatcatgccttccaccctgattgtcttttccataacattttcctccttatttttcgccgtttccgacggattaggctgttcactgtgcggcagaacgaccggatcgcctgtctggctgacgcgctcgcccgctttgaaaaagcgcaggcgcagcgcattggataccacgcacaccgacgaaaggctcatcgcggccgcgccgatcatcgggctgagcttgatgccgaacggcacccacagcgcacccgctgcgatcggaatgccgatgcagttatagaagaacgcccagaacaggttctgacggatgttgcgtatggtctgccgcgacagacggatcgcgtccactgcgtccatgaggtcgctcttcatcagcacaacatccgcagacgagatcgcgacatccgtgcccgcgccgatggcaatgccgacatcggcccgcgcgagcgccggtgcatcgttgatgccgtcgccgatcattgcgaccctgcggcctgcggcctgcttctcacgcacgatgcgctccttgtcctgcggcaggacctctgcgatgacctcgccaacgccaagctcagaggcgatggtctgcgcggtctttttattgtcgccggtcagcagcgtgacctcgatgcccatgctctcgagcgccttgaccgccgcgcggctcgtcggtttgagcacatctgctaccgcgaacgtgccgacgacctgacggttcgccgcaaagaatagcggcgtcttgcctgcgtctgccagcttttcgcccagctcctgcatggagcgcgagagcacgagaccgtttgcgagcagcatgcgctgattgccggccatgcacggcacgccgtcgactgctgcacggatgccttgtccctcgaccatctcaaaatcagtcacactgcgctccttcgcgcccttttcgagagcgtagcgcacgatcgcgtccgcaagcggatgatccgagcgtttttcgagcgacagcgcgagcgacagcagctcctccgtgtccacgccccaggtctgcacatcggtcacgaccggacggccttccgtgaccgtgccggtcttgtccatgatggcgctcgtgacgttatgcaggttttcaagtgcttcagcagactggaacagcacgccgtttttcgcgccgacacccgtgccgaccatgatcgcgaccggagtcgcgaggccgagcgcacacgggcaggagatcacgagaacagaaatcgcgcgggtcagtgcgaacgagggggtctcccctgccagcagccagatgaccgcagtcacgagcgcgatacacatgacgaccggcacgaaaacaccggcaaccttgtccgcgagcttggcgatcggcgccttggatgcaccggcctcctcgaccagacggatgatctggctgagcgtggagtcatcaccgacgcgcgatgcacgcatcacgaaatagccgctcttggaaaccgtcgcgccgatgactgtaccgccgacatggcgctcaaccggcatgctctctccggtgatcgcgctctcgtcgagaaacgcgctgccttcggtgatcacgccgtccaccggcaccgactgaccgccgcgaacgaccacgagatctcccgtctgcacctgctcgatcggcagctgaatggcccggccgccgcggatgacctctgcggtctgcgggcgcagatccatcagcgccgcaatggcctcgccggtcttgcgcttagctcgcgcctcgaagaacttgccaagcgtaacgagcgtcaggatcatgccggccgactcaaagtaaaggtcatgcatgaagctgtgcgccgcctcgggcgtcggtgcggtgccgatgcggacgagcgcataaataccgtagacgagcgccgcgcccgagccgaccgcgatcagtgcgtccatcgttggcgcgcgatgcagcagggtcttaaagccgttgatatagtatttacggttgatgaggacgatggggaccgtcaggacaagctcggtcagcgcgagcgcaaacatgccgtccatgccggcggcatacgacggcagcggcagtccgatcatctctcccatggaaaaatacatgagaacgatcataaatacagcagatacgatgatgcgctttttcatctcgcccagcgcctcatctgcctgtgcgccctgcgccggcgctgactgctgttttccgtcgtcaacagcagcggtatagccgccggacacgacagccgcaatgattttccctgcatcacagacagcttcatcatattccacggtcatgctgcccgcgagcagattgacctgtaccgtgctgacgcccggcacggcggacacgcttttctcgacatgtgccgagcaggccgcgcagctcataccgccgacccggaaacgttgcttcatatcggttatctcctttttatttccccggaaaagcagcatgggcaaaggcttcgccctcttgcccctcccccgggagggggtatttgttatcttgagtatacggcacggactgcgcgttgtcaagagaaagtttgctcttgctaacgcactttgttcttgacacggacgggctgaccatggtatacttcaaacaattaatggtagttaatctgtccgaacgggcgaggtaagcgaaagtttatctcgctctttttttatgtcaatcaaaaatttttatacatataaaggagagcaatcaataatgcccaagaacaaatttcaagacgtcgtttttaccatcatcatggcttccgtcatggtctacggcatggtcgcgtacaacatcgtgctgaacaccggttcgcttgagaactgggtattcggcgccgtttttcacgagtggcccatcatggtgctcattgctatcgcactcgagctcgttttcgtcggcagactcgccatgaaggtcgcattccgtctggtcaatccgcgtgaggccggccagacccagatcatgctcgcgatctctgctgcatccgtctggatcatgtgcccctgcatgagcttttttgcgaccctgctgttcaaggacagccacaatgcgcagttcctcgccatctggatacagactaccgtcatgaatttcccgatggcgctcctgctccagtttttctttgcaggcccgattacgcgccgcatcttcggcgcgctgttccgcgagaaaaacgccgctccggccccgcagacagagcgcggttaaaccgatatagcaaaaggcaccctgagactgtcgaaaaacttcgtttttccgacaatctgtgttttgacttcgcaaaacacggacgtccgaaagttcccatgcggaaaccttctccctcttagagtacgaaaaccgaggtacacgcccccggttttcgtgcatttgctgcgcaaacgcttttgaatgcgcgctgccgcgcggctgccgttcctgcatgaaaataagctttatcgacagactgaggcaccctttcgggtgccttttctcgtttgcagcgccttattctgtaatcgtggtccggaatgcgagggtttcgctctcgcccggagcaagtctgcggattccctgcttgttctcgatggcgtgatcgagatgcgtaccgtccgggagtgtactccacggctccaggcaggtaaacggcacatcaaaatccttgtacgggctccagacggcgaagtacgggaaatccccgaattccatcgtcacccggcggctgtttttcgtgctgccgatggacgcgcggcggacggtcagtccctcggtcattaccgcatcggacgcaaaaagctcacgcgaaatatgcagcctgccgccgtcgagcggcagacggctgcgctctgcggtcagcataacgctctcgtcggtaacaatacgcgtcagcgcgtccgttccctcgaactcgacgaaataatccgtgattttctcgtccttctgccagcacagcgtataggcatcgtggccgccgatctcataatacatcgtgctgctgctgtcgttgcgcgtgatgtgctccttgaggagcgagccgccgtcgagcgtgaagcgaagcgtacaggtgaagtcccacggatacattcttttggtatactcgctctgcgtgagcgtaaattccgcacaggtgccgctcacctgcttcggctcccactccagatcacggccgaagccatgctgcgtgatctcaaaggacgcgccgcccaccgtgtaggtcttgtccttgaggcggccgacaatcgggaacagaacaggcgcgtggcgcttccacgccgccggatcgcctccccagacatattccgttcctgtcgttttgcttctgaagctggtcagctccgcaccgaacgggttgatctccgcgcggaagccttcgttttcgagtacgatcatgatttttcctcctctttgctcgtttctatgcgaaaaaggcgcaaagtctggtactctgcgccttttcgttttacttgttgatgtatgccttgagcgcctcagccttgtcgcggtcctcccacttaacgccaagctcctcgcggcccatgtggccgtaagcggcaagctgcttgtagatcggcttgcgcaggtcgagctgctcgatgattgcagccggacgcaggtcgaatacgtgctcgaccgcctgctcgatgacgctgtcgtcaacgataccggtgccgaaggtctcgaccatgatggagaccggctctgcaacgccgatcgcgtaagcgagctggatctcgcagcgctttgccaggcctgccgcaacgatattctttgcgacccaacgggcagcatacgcgcccgagcggtcaaccttggtcgggtccttgccggaaaacgcgccgccgccgtgacggccgatgccgccgtaggtgtcgacgataatcttgcggccggtcaggccggaatcgccctgcgggccgccgataacaaaacggccggtcgggttgatgaaatacttggtgttctcatcgagcagctcggacgggataacgtgctttacgacctgtccgatcatatcctcacggatctgctggagcgaaacctccgggctgtgctgggtggagatgacaacggtgtccacgcggaccgggcggttgtcctcgtcgtactcgaccgtaacctgactcttgccgtccggacggaggtaatcgaacataccgctcttgcgtacctcagtcagacgctttgccagcctgtgcgccagagaaatcggcagcggcataagctccggcgtctcgtcgcaggcatagccgaacatcatgccctgatcgccggcgccgatcgcgaggtcggcctcggaagcaccttccttgctctcgagcgagttgtcaacgccgagcgcgatgtctgcggactgctcgtcgatcgcagtcagaacggcgcaggtgtcgcagtcgaagccgtactttgcacggtcgtagccgatctcgcgcacggtgtcgcgtgcaatcttcggaatgtctacatagcaggaggtcgagatctcgcccataacctgaaccatgccggtcgtgcaggtggtctcgcaggcgacgcgcgcatacggatcctgcgctaaaatctcgttaaggattgcgtccgaaatctggtcgcagatcttgtcgggatggccttctgttaccgattcagaggtgaaaaaatgatgtgccatttgtgtcattgtcctttctgtttctcgtggaagcggaataaaaaacgctcccgtttgggagcgaaaaatgcgttctgctccctcatctttcgtgtttctacgccggatttggcaccttacagcgctttcgcgcgcaggttgccgggtttcacagggccgttccctccaccgctctcgataaggtagattattcacttacggagtatatcttatataaaatttcagtgtttgtcaagggaaaatttcggtgtctccggaaaatctaaccgcattgacattttacacgaacgagtatatagtaaataagtagcattttgcccgcttttttacgcaggcgcatctacccgcattttcacgcgccgtggcagcagcagctgtccgtcggcgcatttattatcatgggagtacgattaggatatgtatgtaaatgttggcatcgacatcggttcaacaacggtcaagatcgttgttgtgcgcgatggagagatcatccacaaacactatgaacgccatttttcaaaggtgcgcgaaaaggctgtcgagctggttcgcgccgcacgcgggctgatcggcgaggatacgccgattcactgctcgatcaccggctcggccggtctcggcgttgccaaggcggcggacatcgacttcgttcaggaggtctttgccacgcgcaaggcggtcggcgtgcacgtaccggcggcagacgtcgtcatcgagctcggcggcgaggacgcgaagatcgtctttctgaccggtcagctggaagagcgcatgaacggttcctgcgccggcggcaccggcgcgttcatcgaccagatggcggtactgctcgacgttaccccgtccgagcttgaccatctcgcgcagggtgcagagcgcatctacaccatcgcttcgcgctgcggtgtgttcgccaagtcggacatccagccgctgctcaacgagggcgcacgcaaggaggatgtcgcagcctcgatttttcaggcggtcgtcaaccagaccatcgccggtctcgcacagggccgcgaggtcaagggcgatgtgctgttcctcggcggcccgctgttcttcttcaagggcctccagaagcgctttcaggagacgctcggtctggatgatgagcacgcacacttccctgccctcgcgccgtatgccatcgcggccggcgcagcggagtatgcaggtaccacctctaagacctacaccgtgtcctccctgctcgatgcgctcgaaaaggccgccggcgcgccggtcgttgcgaactatctgccgccgctgttcgagtccgagcagcagtatgaggagttcaaatcgcggcacagctcgcatgacgtcatgacccagaacgttaccgtttacgagggcgacgcctatctcggcatcgactgcggctcgaccacgaccaagctcgtgctcatcggcgaggacgaccagatcctgttccaccactaccagtccaacaagggcaacccggcggacgttatccgcgagcagctgacaaagctctacgagctgtgcggcgaccgcgtacatatcgtctcctccgccgtcacgggctacggcgaggcgctcatccagaacgccttcggcgtggatttcggtctggtcgagacggtcgcgcatttccgcgcggcacgtcatttcaaccccgacgtcgatttcattatcgacatcggcggccaggacatcaaatgcttcaagatccgcaacagatgcatcgacaacatttcgctgaacgaggcgtgctcgtccggctgcggctcgtttatcgagacgttcgcgcgctcgatgggctactccatcgaggaattctgcaagctcggcctgtttgcgaagcatccgatcgacctcggctcgcgctgcaccgtgttcatgaactcgtcggtcaagcaggcgcagaaggacggcgccggaatcgacgcgatctcggccggtctgtccgtgtcggtcgtcaagaacgcgctttacaaggtcatccgtgcccattcgcccgatgacctcggccagcacatcgttgtacagggcggcacgttcctcaatgatgccatcctgcgctcgttcgagcaggagatcggccgcaacgtcacccgtccggccatttccggcctcatgggcgcttatggcgcggcgctgcacgccaaggacaaccgccgtgacaccaccacgctcatcggcacggacatcctcgcgggcttcgagcacaacgtgcgctccacgcgctgcggtctgtgcgaaaatcactgcaatctgaccatcaacgacttcggcggcggccgccgtttcatttcgggcaaccgctgcgagcgtccgctcggcggcacgaaaaaggccgacctgcccaatctctataaatggaagctcgaaaagctccgcagctacggcgagccgtccggcaacccgaaccccatcgcgaccatcggtctgccgttcggtctcaacttcttcgagctgctcccgttctggacaaagctcctgcggacgctcggcttcgaaacggtgatttccgatgtctccacccgcgacatgtatatgaaggggcagcattccattccgtcggatacggtctgctacccggccaagctcatgcacggccacatcgaaaatctgcttgagaagggcgtagacgcgatcttctatccctgcatgacctacaatctcgacgagggccgcgcgtccaactgctacaactgcccggtcgtcgcctactaccccgagctgctcaaggccaacgtctccgcgctcgcggacttcgatttcatgatgccgtattttgagcttgcagaccctaagcgcttccgcaagcacgcagtcagctatttctgtaagaaatatccgcagctgaaaaagaaaaaggtgctcgaggcagccgatgccgcctatcaggcgcagcaggaatactgcaccgccgtccgtctggagggtcagaaggccattcgctacgccgacgagcacggtcttgatgtcgcggtcatcgcaggccgtccgtatcacgttgaccccgagatcaaccacggcatcgatcagctcatctcgtcgttcggacttgtcattgtttccgaggacgcggtatggcagctgaccgacgcgcccgaggtacacgttctcaatcagtggacctaccactctcgtatgtacggtgctgcgaaatacgtcacccagaaggaaaacgcgcagctcatccagcttgtatcgttcggctgcggcatcgacgcgatcacgaccgatgaaatgcgcgccatctgcgaaaacggcggcaagatctatacacagcttaaaatcgacgagatcagcaacctcggcgcggcaaagatccgcatccgaagcatgctggctgccgtagaggagggcagaaaacttgcagaacacaacgcctaaaacctatgattatccgcagtttaccgaggagatgcggcgcgattacaccattctcgtgcccaatatgctcccggtccagctcggtctcatctgccgtctgatgcgcaactacggctacaagatggagctgctgcataccgaaggcccgaacattgccgagcagggcctgcgcaacgtacataacgacacctgttaccccgcactgctcgtcatcggtcagctgatagacgccattcagtccggccggtacgacgtgcataagatcgcgctcatcctgccgcagaccggcggcggctgccgggcatccaactatatccacctgcttcgtaaggcgctcgaaaagaacggctacggcttcattccggttatttctctgaacttttccggtcttgagagcaaccccggcttcaagctgaccaagaccatgctcatgcaggtggcgtatgcgctgctcatcggcgaccttatcatgatggtcgcgaaccagtgccggccctatgagatcgtcgccggttcgaccgacaaggccatcgagatctgcatggatgccgttacaaaacgttttaccggcgagcgcgtcatacgctacggcgaggtcaagcatctgttccagttcgtgctcgatgttttcggcaaggttcgtctcgacaagacgcagaaaaagaaactcgtcggcatcgtcggcgagatctacgtcaagttctctcccctcggcaacaaccggctggaggagttcctgctctccgagggctgtgagcctgtcctgcccggcctgatggatttctgtctgtactgcatctacaactcggtcatcgaccacgatctgtacagccgcaatgccaaaaccgcgatgatctacaaaatggtctatcagtttgtgctctccaagcagactgacatcatcaagatgatgaagaaagacggccattttcgtccgccgatggcctttgacgaggtgcgcaggaagtcgcacgccatcatcggtcagggcgtaaagatgggcgagggctggctgctgccggcggaaatggtcgaacttatcagcgagggcgttaccaatatcgtctgcacacagccgttcggctgcctgcccaaccacattgccggcaagggcatgatccgcaaaatccgcgaggtctaccctcaggcgaacatcgtcgcggtagactacgatcccggtgcatccaagatcaaccaggagaaccgcatcaagctcatgctttcgagcgcggaataagaggaacatcatgaaacagctcaaaccaaacgatatttccgtcatgcgcacggcaatcggcctctatgcgcagccgttcggtgtcgaatcgttcgcagtcatgctgaacgaggacaagaccgagccgaagagcgaggaggagcgcgtaacgtgcgatctgctccaccgtctcgaccagtacgaatacggtctcgcgcccgagttcacgctctccgaggatgaagcaaagttcgtcacggacgcactgcgtcagctgatcgtgcgcgacaatcagtcactccggtacgaaaaacgcccgaagtgcattcgtgaatgcgaaaaggaaatccgcgccgcgaccgtctgcatctcgcgtatcggctgaatacaaacatttaaggcacgcctgcggcgtgccttttaaactgtcgaaaaacttcgtttttccgacaatctgtgttttgacttcgcaaaacacggacgtccgaaagttccc

SEQ ID NO: 13038 - DNA, 174 bp, Unknown
  gut microbiota DNA sequence
gttcatatcgaacaaaattttaagcacatcgttgtttaatttacaaggtgcaattttcctttgccttcagcggaaaattgcaccgcgtgtcgatttcatcaggaaatcgaccaaggtacacaaaatgcgttagcattttgtcctccgaaggtttcggatgccgtctcattgaca

SEQ ID NO: 13039 - DNA, 3205 bp, Unknown
  gut microbiota DNA sequence
acaatccgctgttttaagaagctcagcttctcattcgcagcttatttagtatatcagattcgttttcatttgtcaagaacttttttcaaaactttttcgaagtttttgaatcaattctttcaaaactcaaacttttctgaccgccgtctctttcgaaacagcttatttattatatcaaaccgaaatccgtttgtcaagaacttttttcgttcttttcaagccgcttttccgttcgaccgccgcgcctctcagcgacagctttaatagaataccacagtgagaggccggtgtcaacacttttttactgtaattccgactttttctttcaaagtctgtcaagaaagctgtggcggccgttttcatcgcgccatccaagcagctttcccgtatccacattcttgaccgcattgaagatatttgcctcgatctgcggatttttcgccgcaagagacgcgatcagctgcttgatttcggcgcgttttgtgtcgttttccagttttttcgccggacagtcgcagggcaggaaggtcagtccgcagaattccgcccattccacaacatttgcctctcgtgtgaagtaaagcggacggatcagctccatcccctcgtagtttttcgccttcacgcgcggcagcatcgcctgcacctggccgccgtagatcagacccatcagcaccgtgccgatcgcgtcatcataatggtggccaagggcgattttgttgcagccgcgctttttcgcctcggcatagagatagccgcggcgcattttcgcgcagaggaagcacggatgttccgccgaatggctgcctgcgacgcgcagcacatctgtgtcgaagatctcgagcggaatgtccagtttccgcgcattctcctccagatgtctgcggccttcgggcgcatatccggggtccatcgccagaaatttcagctcgaaatccaccgtgtgctgcaaatcccgcagcagcaggccgagcagcatggaatccttgccgcccgagatgcacactgcgacgcggtcgcccggacgcaccatgtcatattcctttaccgcatccatgaatggcttacggatcgtgcgcacgaactcgcgctgcaaggtctttctgatctcttctgctgtcattttacgcccttcttatgctgaaaatggtaggtgatgcgcgcgagcaggctgtccggcgcgaaatgccgcgcgaccgtcatcgccttcatggcaatgcccggaacgatgaccgttttcccggcgaacatcccgtcgaccgcttcccttgccacacgctttgcgtccagaccgttcagcgcgaacttcacgccggctaccttgttgaattcggtgtcgaccggccccggacagagtgcgcacaccttgaccgcgctgtttctgtgccgcagctcctcgcgcagcgcctgtgtcagacggagcacatagtttttggtcgcgtagtaagtcgccatgagcgggccgggcaggaagccggccgacgaggcgacatttagaatatatccgtggccgcgcttcgcgaaatcctgcaccgcgagcttggtcagaatgtgtaccgcacggatattcgtgtcgatcatgcgcagctcctcgtccagatcggtgtccagaaactcgccgaacaggccgaagcctgcattatttatcacgatctcgagatcgtcgccgcgcaccgcactgtacagcaggcggcattcctcttcgtcgctcacatccgccgcgatcacatggcacacagtcggcagctcggccgcaagctcacgcagacgctcctcgcgccgcgcacacagcaccagctcgcagccgcgctcagcgagcacgaacgccatttcacgccccagtcccgaggacgcaccggtaatcagcgccttcatataactccctccatttcccggtgtttcggtataatatatcagtgtagcacagcccgtcccgcccgtcaaacagaaaacggagaccgttccttgcagacaggtctccgtttcgtgcttatttgctgtgatcttacttcatgaggttgccgtcgtcgaaatagttgatcttcatcgcggcgcgaacatctgcgagggtctccgcagccttgcgctctgcgacctcgctgccctttttgaggatctcatagacctccggcttgcgcgcctcccagtaggcgcggcgctcgcgcatcgggccgaggatggactgcatgacgttattgaggaacttctttacctttacgtcgcccagaccgccgcgcgtgtagtgcgccttgagctcgtcgagattgctgtactccggcaggaactccgcaaaatgctcgtcggtgcagaaggcgtccagataagtgaacacggtgttgccctcgagcttgcccgggtcctcgatgcggatatgatccggatcggtgaacatggacatgatcttggtgcggacagtcttttcgtcgtcggccagatagatgcagttgccgagcgacttgctcatcttcgccttgccgtccgtgcccggcagacgcaagcaagcggagttggacgggagcatgatcttcgggtcggtcagcgtctcgccgtaaatgcggttgaaggaatgcacgatctcgcggcactgctcgatcatgggcatctggtcctctccgaccggtacgcaggtcgcgcggaaggcggtgatgtcggctgcctggctgatcggatagcagaaaaagccgaccggaatgctcgactcaaagccgcgcatctggatctcggactttacggtaggattgcgctgcacgcgggaaaccgtgacgaggttcatgtagtagaacgtcagctcggtcagctcgggcaccatggactgaatgaagatgttgaccttttccgggtcgagaccgcaggccagatagtcgagcgcgacctccatgatgttctgacggaccttctccgggtgctcggcgttgtcggtcagcgcctgcgcgtccgcgatcatgatatagatctcgtcgaactcgcccgagttctgaagcctgacgcgctcgctcagcgagccgacatagtggccgacgtgcagacggccggtcggacggtcgccggtaagaatgatctgtttcattggtatatctccctttttcgggacgcgatgcccggttttcagccgtttccgcggcacttgatttacataggtggattttaccgcatcatcgagtgaaatcgtacggtgttgccttaaggcaataccgcataattggac

SEQ ID NO: 13040 - DNA, 14754 bp, Unknown
  gut microbiota DNA sequence
gctttgaagtcggagcggcgctgtattcagttctccatcagcgtcaaaatgtttttagcctcaatctcgtagtcataaaatgaactagggcagcaccgcacaatttactcgcaaatcactcttgttcaattatgcggtattgccctagaaataaagacattgcgccccattccgtgcccgggagagagtagtgtgggatacctccgccattttggcaatatccttgatggtcagttttttcataatattccctttccgcagcttcacagggaaatgttcacatctccctgaaaagtataatagcattgggaatcgcctgcggcgcacagggtgtcgatttgtgcccccatatcttcagtataatgggtttcgtcgacactgaccactaaaatttcaggtttgagaattttttgaacatattctgaaaaatatcgagtgcagattccatgatgggatagcttttgcagccgcggccgagcctgccgtccacacagagccgcccgcatggtttcatctgtactgtcaccggacaacagcgccaaatcggtactgcccttcctcaacagccaaatgctgctgtcctcattgcaggtttgcttgtatgccgccagattccaggccatagcctcctccgtcaagttcggatcgcacaatttctgtgcataagccacagaacgctgcgtgctgttccggaggggatagaggcattccaagacatagtcaccgaaggtgaaggtcctgccggcacaatctgcagaacggatcagttccgttttactgcgctctaaataccgaaagaagtcatggtattccctgtaaaactcccgatctccatacaccggatacacccgatcggcaaatcgcaggtctccgcatggtgccaccgcccgccgcacctgcacacggtctactagatgtacaaagccgccgaagtgatcctgatgcaaatgagtcaggatcaacagatcaataacggtgatattcctctgtacgaggaattccaataggggcttgcggttcttatggtattttccgccgccgtcaactactaccgtccgccgtccctggggagtatccagcagcaataccgtgcaatccgcgcgccctgcatccaaaatgtacagttcactcataaagttaggatcacctcatcccccacctgatagtcctcgtttccccgatagcggacctccaaaatctcattatctgcttgattttccactatgccacgttgatgttctgttagatactgataataaacttctgaaccgtgaatagcagttcgataagaatcaagagttgtttgcacgacttcaccaccttggtgccgttttatattaaggcaataccgcataattggacaagagcgatttgcgagtaaattttgcgtactgacgaggcgcggttttgcggtaatacttgacgtattaccgtgaaatcgcaacaaagtcagggcacaaaatttccgcaaagcgccgcagctttaattgtgcggtattgccttaattataatgtaagaatacgccgctgtcaactgcggccgttcatcgaaacaaacaggatcttttcgaaaatatttcactttttcgacaggcagcgcccccgccgtcgttttactgctcttttcatccgggcgcggaaatggtatactatacctaaggttagaaatatattcttcgttacagatcggagggaaagatatggaggagtatacgcttgacggcaggctgctgacgctgctcgcgcagccgctccgcatcgaggagatccgccgcgcgctgcccgacatcggaaagcacgagctgaaggatgcgctcgaccgtctgacgcaggacggaaagatcatgaaaaacaagaaaaaccgttttgcggtggcctcgcactacggctgcgctaccggcacgttcctcgcgaccgagcgcggctttgcctttgtcgcgcccgacgtcgagccgggtgagcccaaaccggacgattatttcattccgccgaacgccggcggcggcgcatggcacggcgacagggtgctcgtcaaggtcagcgagcgcaaaaacaaccgcggccgccgcgaggcgacggtgctgcgcgtcctcagccgctccggtaaggagctgaccggcgagctcgtgcagcgcggcaaggcatttttcgtgcagccctcgtccaaaaagtaccctgagatcgcggtcagccgccgcgacatcggcgacgcacaggtcggcgactgcgtggccgtcgaggtgacgagctacggcgacgacacctatcatccgcagggcgtcgtctctgcggcgctcggcgaaaacggcacgatagaggcgtctatcgcggccatcctgcatgaaaacggcgtgttcgacgtattcccggacgaggtcctgaagcaggcggacgccattccgcagcaggtcgacctcgccacggccggaaagcgtctcgacctgcgcgacaagctcatctttaccatcgacggcgacgacgcgaaggacttcgacgacgcggtctctctcgaaaagctcgataacggccattatctgctcggcgtccacatcgcggacgtcagccactatgtcacgccggactccccgctcgatgcagaggcgttccgccgcggcacctcggtctacttccccggtcacgtcgtacccatgctgccgttcgcgctgtccaacggcatctgctcgctcaacccgaacgtcgaccgtctcgccttctccgcgctcatggagatggacgcgagcggccgccgctacggcgcgaagttcgcgaaatccatcatccgctccaaggcacgcatgacctacaacaaagtcaataagatcctcgccggcgacaagggtctgcgcgaagaatacgcctttctcgtcgaaacggcggaaaagatgaacgatctcgcccacgcgctctacaagcgccgcatcgaacgcggtgcgctcgagctcgatattccggaggcggagatccgcgtggatgaggccggaaagccggtcgagatctgcttccgcgagcgcggcgagagcgaaaagctcatcgaggaattcatgcttcaggccaacgaggcggtcgcggagttcatgtgcaagcgcgagcacccaacggtctaccgcgtgcacgaaaaccccgacccggacaagctgcgcgcgttcgcgcagttcgcgcgcccgttcggctaccgcatcgacccgtccaagcccgaggacaccgcccagttccaggtcgtgctgcgcggcgcgaagaacgacccgaagcagcgcgtgctgcccaccttgctgctgcgttcgctcgcccgcgcacgctacgccgacgagtgcatcggtcattacggcctcaaggcgaagttctatctgcactttacctccccgatccgccgctatcccgacctcatcgcgcaccggatgctgcaaaaggcgctcaccggcgaggaattcaccgccgcagacgaaaatatgtgcgccgaggccgcgcagcagtccacaagccgcgagcaggcggcggataactgcgagcgcgacatcgacaagctgttcatcgccgcctacatgaagcaattcatcggcgaggagttcgacgccgaggtatccggcgtgcagtcgttcggcatctttgtcgccctcgccaacggctgcgagggtctgatccgcgccgagctgatgaccggcgacttctaccagtacgacgaggagcacatggccatggtcggccgccgcaccggcaagcgcttcaccatcggcacgcccctgcgcgtcaagctgctcgccgcgagcgagatcacgggccagatcgacttcgccccggcggagggctcgctgcccgtctcggaaaagcccgagcgcgcgccgcgcgatgacgaccggccgcccttcggcaaccgcgcttcgcgccgccgtcattcgcacggcaggggccgcagcggcggccagaagggcaaaaaaccgcccacaagaaaacgcagataacagcaaaaaggagactcagcattgcccggactcgttttagagggcggtaccttccgcccggtattttcctgcggcgtcatggacgcgctgctcgaccatgacatcatgttcgactacgtcgtcggcgtttccgccggcatcacctacgccatctcctacctctcccgccagcgcgggcgcaatctggaggtgctgcgtcgctaccgcggcgacagccgctatttcggcgtgcgcaacctgccgcacgaccactcgatcttcggcacggatttcgtgttcgataccattcccaatcagctcatcccgttcgactgggagacatatcaccgttataaaggccgtattctggtcggcgtgaccaacgccgagaccggcagagccgaatatctcgacggcgcgaagctcgaccgcacctgcaccatgctgcgcgcgacctgcgccattccgctctacttcccggcggttcagctgagcggcggcacattctatgacggcggcgttgccgaccccatccccatcgtccgcagcctgcacgacggcaacagaaagaacctcatcgtgctgacgcagccgaaaagctaccgcaagaccctgacgcgcggctcgaaattcgccgcccatgcgctgcaccgcaaatacccggccatggccgaaaccatgctcgcgcgtcccggtctctacaacgacacggtctgcctgtgccgccgtctcgcggaggaaaacccggcggacacggtcctgctccagccggacgcgccccttgccaccttcgaaaaagatattaaaaagctggaatggggctatgaaatgggatataatatgacgtgtgaccggatagacgacatcaaagcactgttcgtctgacggataatagaaataaagattttagggggaaaagaaaaacacatgcagaacaacagaatcattcaggtcgaggacaaggtcccgccgagactgctcgtgccgctgtccatccagcatatgttcgcgatgttcggcgcatccgtactggtcccgttcatcttccatatgaacccggccatcgtgctgttcatgaacggcatcggcacgctgctgttcatcctgatcaccaagggcaaggcgccggcctacctcggctcctcgttcgcgttcatcgcacccgcgaccatcgtcatccagaactggggctaccagtacgcgctcggcggcttcgtcgcagtcggcgcgtgcggctgcatcctcgcgcttatcatctacaaatgcggcacggactggatcagcgtcgtgctgccgccggcagccatgggcccggtcgtcgcgctcatcggtctcgagctggccggctcggcggcttccaccggctgcatcgtcggcgacagcgtgaccgtcggcacggtcgtcacctttctcgtgacgctcgccgttgcggtattcggcagcgtcatgttccgcggcttcttctcgaccattccgatcctgatcgcgatcatctgcggctacattgcgggcgttattaccggcgtcatcgacacccagaccatcgtcgatgcgctgcacaccagcttcatctccattccgaactttcagacgccgaagttcgacatcaacgccatcctgatcatcctgccggtcatcctcgtcatcgcgaacgagcacatcggccatcagctcgtcacgagcaaggtcgtcggccgcgatctgctcaaggaccccggtctgcaccgctctctgttcgcggataacttctcgaccatgatctccggcttcatcggttcggtcccgaccaccacctacggcgagaacatcggcgttatggcgatcaccaaggtctactcggtgcgcgtcatcggcggcgcggcagtcatctccatcatctgctcgttcgtcggcccgctcgccgccctcatccagaccatccccggcccggtcatcggcggcatctccttcctgctgtacggcatgatcggcacctccggtctgcgcattctggtcgacaaccacgtcgattacagcaagaaccgcaacatgatcctgacgtcggtcattttcgtcaccggcctgtccggcgtgaccctgtcgctcggcgatgtatcgctgtccggcatgaccctcgccgccatcgtcgcaatgatcatgagcctcgtgttccatgctctcgacagagcaaagctcaccaacgacgtctgataccggcacaaaaaagcaaagcgcctgctcccgaaaagggatgcaggcgctttttttacatgggattaaaagcccggaggaggcggaggattcagtatccacatcacaagccgcacgacctcgatcaccaggaatacaaggaataccgctcccgttgctgtggcgaccgtttcccctgcctccgtctgaaagatctcctccactgcgacaaagaaaaagctgaccgctgcactcacggcaaacccataatcccacttgtttttccaccatttcgagtcccatatacttctctttgtcggcgtttcctgctgcggctcagcctccggcgaagatgtctgtacagtctgcggattcgagtctgcttccttcgtcgtgctctccgacggcatcacaggcttcgcgctgctgaccggcgttttctgcggcggctcgtaaaataggtcatcctccggatcgtcgtattcgtcaaggtcatcgagatcatcgaggctgtcatcgcgaccgtgacggcacttgctgtacggcgcgtggctctcgatctcctttatgccctgccgaaaatgtacatatccgtccagaccctttccgtaataaccgaaatcccagtcctccatgctcatattctgcgcctccctttctctttgtgctttcattatagcgcagaaagagggaaataaaccggacataagcaaaaggcacctgctcttaaaaaagaacaggtgccgatttttatgactttacgccagtgggcaacaattacttgttgtcaacctctgccatgtgctcgatgagcatcagcagcttgttggagtagccccactcgttgtcgtaccaggaaacaacctttacgaaggtgtcggtcaggtaaacgccagcgttagcgtcgaagatagaggtgcgctcgtcgcccaggaagtcagaagatacaacagcatcctcggtgtagcccagaacgcccgcgaggccgccctctgccagcggcttctcggaagcagccttcatagcagcgcagatgtcttccttggtagccggcttagccaggttgcaggtcaggtcaactacggaaacgtccagggtcggtacacgcatagagataccggtcagcttgccgttcagcttcgggtaaaccttgcctactgcctttgcagcgccagtggtggacgggatgatgttgccgcaagctgcacggccgccgcgccagtccttcttggacgggccgtcaacaaccttctgcgtgccggttgcagagtgaacggtggtcatcaggccttctacgatgccgaaggactcgtcgagaaccttagcgatcggagccaggcagttggtggtgcaggaagcgttggatacgaaggtcatatccttggtgtaagtgttctggttaacgcccattacgaacatcggggtgtcgtccttggacggagcggacatgatgaccttcttagcaccgccgtcgatgtgagcctgtgccttctccttggtcaggaatacgccggtggactctacaacgtagtcagcgccaaccttgccccacggaatgttcttcgggtccatctctgcgaagaagagaaccttcttgccatcaacggtgatggagttctcgtcatactcgatggtgccgtcgtaacgaccgtgcatggtgtcatacttgagcatgtatgccatgtagtccggggtcatgaacggatcgtttaccgctacgaactcgatgttcgggttcttcagaccagcgcggaaaaccatacggccgatacggccaaagccattgatacctactttgatacccatttcagtgttcctcctaaaaatgttgaagtttgaaatacttttagtagatacatttattatacactaaagcgtgtctgtgccgcaaggtgtaatatttgtgatttttttatcattgcctgccgcttttttgtacatatttcatctacccgcccgtctccgtcccgctattatccacaaagtcaccaaaataacaagcattccacaaacagatgcccataaaaaaccgcatctgctgcggcaaaacattttatcgtttgcgtgtctttctgtcgatttttgtttttttccatgttataatttgaatatccatacagggttctccgcctccgcagacagcatatgcagctctgcgcgcggttatacctttcttcccttaaaaacaaaccccgcattctgcccgtgcacctgcccgttctccccgcatccataatttccgcacaggccggaatttttgtgccgaaccgcagatactaaactcccggacagatcttaggaggaaaaaagctatgaacgatgatttttttgcactggttgacaccgatgctctcaaggtgctctccgggcagccgtctgcatccgcagccgcgatgctcctggtcgacacacacgggctcatccgtgcgcagaccgcagccgcaggcgagctgctcgagctcgaaaacggcgacctgctggccagcgccctgtccgacgaggcggtcgcgctcgtcgaggactgcgcatccggcggcggcgcgaacagcatgaccgagcatctcgacgtcggtgactgccgtctgaccgttgttccgcacccggacggtgcgctcgtcgcgctcgagccgcagccgctccgcctgccgcgcggtctgagctatgtatgcggcgatacgctcaacgcctcgatcgcccgcctgtacgaccttgccgccaaggcatccgacccggcgctcgccgccgccctctcccgcgagatgttccgccttcagcgcatggccttccatgtcaccgagctgctcgacccgccggtcctcggcacgatcaacgcccacgactgcgagctgtcgcgtctgtgctcggatgtcgcggaccagatcctgcgccgcctgcctgaggacaggcgcgactgcatcatgaccagcgtcccgatgcgctgctcgtcctatgtcgatgcggtacgcctgcgcgccgcgctctacaacctgctcctgaacgccgtcgcggtctcgtccgatcccggcagcatcaccttcacactcacctgcgaaacgcgcccggccttcgaggacgaaacgatcgaatatgcggtcatgacggtctgcgacaaaggccccggcctgtctcccgagcgcttccgcagcgcggtcagcgcatggtgcacctccatgtccgcgcgtgagcgcatgcgtctgacagcgagcggcatgcagcccggtctgggtctggccttcgcgcagctggtcgcgcaggcgcacgagggcacgctcacctgtgcgcagcgtcccggcggcggcacggaaatgcgtctggccatcccgctcttcgagccccttatcaagctcgcgccgggccgctcgatccgttcggatttcgtccgccccatgtcggtcgaggacgtcgagctcagcgttttataaaaaatatgacacaaaaaagaaggaacgccagtttttgacgttccttttgctttacctaagcgccgctcgcgcggcagcgcgcattaaaaaggctttgcgaagcaaagcccaaaaaaccgggggcgtgtacctcggttttttgactctgagagggagaaagtttccgcatgggaactttcggacgactcgtgttctgcgaagtcagaacacagattgtcggcgaaacgcagtttcgcgacagtctcgttacggtgcgacgcagcccacgccgtccagaatatagtgcggacggtatgcgtagttctccacttccgcgcgcgaggtgcagccgctcagcacgagcacggtatccagaccggtctcgatgccggcaacgatgtcggtgtccatgcggtcgccgatcatgaccgcctcgtgcgaatgtacgccaagcaggcgcagaccggtgcgcatcatgagcggattgggcttgccgacgtagtacgcggtcttgccggtcgccagctcgatcggcgcgacgagcgcacggcacgccggaatgatgccctgctcggacgggccggtcaggtcggagttggtcgcgatgagacgcgcgcccttgttgatcagatcgaccgccttgaggatggtctgatagttataggtattggtctcgcccgcgatgacataatccgggtcgacgtcgttcatcacgatgccggcctcgtacagcgcgccgaccagaccgggagcgccgatgacatatgcggatgcgtgcggcttctggctcgcgatgaagcgcgccgtggcaagcgccgaggtatagaagtgctcctcgccgatctccagacccatgcgtgccagcttctgctgcagctcgagcggcgaacgctcggaggagttggtcaggaacagaaagctcttgttttccctctgaagccacgcaacgaagtccgttacgcccggaaggagacggttgccgtgatagatgacaccgtccatatcgcagataaagcctttcttttcgcgcagaagttccaaatcttcagccatagtgcttgttctcctttcggtcggtcggcagaccgaaatgcaggccgccgccggaatagtttttcacacttttattatgcgtcagaaatccgcagcgcgtcaagataaatctgcgttaaaacgttcttttttcccggctgtccgtttatgcctcgcacgccatgccgtcgtagcgcgtcacgacgaacggatagctgcggctctccgcctccacgccgatctcgtgcagaccgctcatcaggtctccgacgatctgcatattgctgtcgcgctgcgccaccgacagcttcatcgtatccccgtaggacgagatgagcagcgcgaacggctgcaccgcgcacggcaggatcgcgccgtaatccagaacatacgggcggcagctctccggcatggtgaagcggccgacgttcgtgatgaggaagctgtcctcgaggacgaaatccatcgtgaccttgcgcgcggcctgcatcttctccgcgagcggcatatccgccttatgcagcgtgtcgcagcggtcggcggccgtcttggcgcggtagagcagctgttcgcgctccatctgaccggcaaggaaggccttcgtgcggcggaacacctcctcgagcggcaggctgcggtattccggcaggtacggcaggtcgatgaagcagataaagtagcgcgtcgtgacgctcggcagcagcggacgaaggtcgaccgggatctgcgcgatgaccggcttgtccccgccgccgaacttgcggtcgaacgcgcgcatcatgagcggcgcgatgatcgagagcgggctgacgccgatgcgctttgcacaggcgtgcagctgcgaaaacgggaatgtgatctcgctgacgacctcgcccgcgtccgcctcccactgcaccgcaggcgcgtggacggcctccggctttttccagatgccctccggggaaaactcgcggtcggcaagctgttcgtagccgtccgcgctctcctccggcgtccatctggtatccatcgcgcggaccgtgccgtcgttctcgaccaggcagccgcagttcttcagatactggaacaggacgcagcggatgaattcctcgaagccgcgcccgtccgagatcgaatgctgatattccatgtagatcgtgtcctcgtgatagccgacgaggaacagatagccgttcgtgtcggccgagccgatggtgtagcgcgtggaaacgccgtcgaacggcagcacaaccgccgggcgtacattcgtgcggtagcggaagccggtctcggtgcgctcgacgctcagcatcatgtgcggaaagcgcagcagcgcctgctcgaccgcctcgcgcagcttgtccgggcgcacccggtccttcatgcggatggtgtggcgcggcacgcaggccacggtctcgtgcgtgttgtaaaggaaaatcttcgcgtagctgtctgtgcgcaggcgcggatcgttcatcatattcatagctgagccctcccggaaaatatcctgtccctgttttctgtccgttttttccggtttcagtgtagcattcacgagggtatttgtaaatcattttatgtcgaatttgtctattattattcatataagcaacactttgtacggaaattttccgtacattttgtctgttatgaacacagccttcgggatactcctcacgctgtccctgtctgccgttgcgcggcgcagccagatatgatatgataacatcatcttaaacgcaaacgaggttcatcatgaaaaacgtaaccatttataccgacggcgcgtgctcgggcaaccccggtccgggcggctggggcgccattttgcagtacggcacggcgaaaaaggagctgtccggctccgagccctccaccacgaacaaccgcatggagctgctcggcgtgatctccgcgctcgagctgctcaaggagccctgctcggtcgatctgtattcggacagcaaatatgtcgtcgacggcatcacgaagggctgggcgaagggctggcgcgcgcgcggctgggtcaagagcgataagaagccggcgaagaatcccgagctgtggggccgtctgctcgacctgctcgaccgtcacgaggtacgcttccactgggtcaagggccacgcggacaacccgtacaacaaccgctgcgacgagctcgccgtagcggaataccagaaatataagtaaaacagaaaacagcgcagaaaaggctgctccacgcacacaggagcagcctttttcatctctatatcgttttatcggcgttcgtcgatattggtataagccgtggtctttgcgagcggcttgtatgccggacggatgatcttgccgccggtggtgacctcctccaggcggtgcgccatccagccgacgatacgcgcggtcgcgaacagcggcgtatacagcgacttgggcaggccgagcatacggtaaacgaagccggaatacatatcgacgttcgcacacatcggcttgtcgctgcccttcttttccgcgaacacctcgggggtcagcttttcgaccagctcgatcaggtccatctcgtcgctcatgccctttttctcggcgagcggacgggccgcgtgcttgagcgcgaccgcacgcgggtcgctcttggtatagatggcgtgacccataccgtagatcaggccggagccgtcgccggctgcgccgtccagaatgcggcacaggtagtcgcggacctcgccctcgtccttccagttcttgacgttctccttgatctcctcgaactgcttgacaacgcgcaggttcgcgccgccgtgacgcgggcccttgagcgaggagaccgccgccgcgatagcggaataggtgtccgtgccggaggaggtggtgacacgcacggtaaaggtcgagttattgccgccgccgtgctctgcgtgcaggatgaggcagcggtcgagcagcttggcctcgtcgtcggtgaacttgccgtccgggcggatcaggtgcaggatgttctccgcggtcgagcgctccgggtcgggcacgtgcaggaacatggacgctccgtcaaagtagcggcgcttcgcctgataggcgtgcgagatgatgaccgggaacttggcggtcagactgatgccctgacgcatgatgttctcgaccgtcgtcgcgtccgggttgctgtcgtaggaatacagcgcgagcgtcgcgctggcgagcttgttcatgatgtcgcggctcggcgcgcgcatgatcatatcctcggtgaagttgtccggcagcgcgcgctccagaccgatgacgtgctggaactcctcgagctggcggcgcgtcggcagttcgccgcacatgagcagatagccgatctcctcgaagccgaagcggtcctcgcgctcgagaccgtggatgagatcatatatgttatagccccggtaggtcaggcggccttcgatcggctcgcgctcgccctcgttcaggatgtagccgtgaacgttgccgaggtgggtcgcgccgaccagaacgccggtgccgtccgagtttcgcaggccgcgcttgattcggtaacgggtgtacaggtcaggcgggatctggttatgcaggcggaagctttcgctgagttcctgcaactgttcttcttttacaaaatcaggctgaatgttcatccggccttcccctttctgttcccgaggcgccccagccggcgcagcggttatttccaaaatagtgatatgaatatatcatactccactcctgcaaatatgtcaatttatcttggggatatattctgccaaaaatgcgatatgatgggcttttggcggttgttgaccctgcacgagcgcaagaccttttttccgttcgtgcaaacgattttgcactttgctatgcaaaagtgttaaatttccatctgccgccgccttgctttttacagttctccgcacataatcgcggcgagcgcgtcctcgaccgtccgcatgccgagcgacaccgcgcccatggcctccgcccggcggccgacctcatatttatgcagatggacgccgccctcgatgcactgtgtcgtaagaaaaacgcgcgtgccgtccgctatcagtgcacgtaccgcctgctccatgtgcgccgggatgccgccgccgccgaacgtctcgatcatgacgctcggaaagccgtgcaggaccgagaagaacgacagcggcaggtcgggcgtgagccgcagaacgaaaacgtgcgggtcgatttcggtgacgaggcgcggcgtagcttcg

SEQ ID NO: 13041 - DNA, 3329 bp, Unknown
  gut microbiota DNA sequence
cgtccgcgacacgacctgccggcggctcattggccgaaacgaacgcatcgagcgcggtcgaatgcaccttgaggacgttcgtgccgcgcaggatgctgccgcgcagcacggcatacacgccgcgccgtccatccgccgccacgcgcagtgcatcgagcagatttcccggcgcgtccgagccctccgcgcccatcggcagcatcgagccggtcacgacgaccggtcggtcgatatgcggcaggagatgatgcagcagcgccgccgtgcacgcgagcgtgtccgtgccgtgcgcgatgacaaagccgtcatacgctccgcgtttttcccagaccgcccgcgccatctgcatccggtcgtccgctgtgatgtcggtcgagtcgcgctgcatcagatcgagtacctcgaccctgcacacctcggaaagccccggcagctcgcgcagcagcccctccccgtcgagcacgggcgtcagaccgtgcccggtctcgcggcaggcgatcgtgccgcccgttgcgatcagcaggatctttcttgccggattcacgttatttcccatgaatttctccttgcctcctcttgaatttcctgtgcatttttcattttttcgtgttttttgtgcgacaagccaaggaaaagattgatttctcctttgactttcggcatatttttccttgtttcacaattcccgattatttcgtcgtttttccctgtctttctgtgttttttatgcactttttcgtatttatacgcacgcagccgcgccgtctccgcgttttgacaagcgtctgtattatgaagtataatattaccagtctacatttctgaaagcgaggagtccccggatgcgtcatccactgctgcaaaaatacgacaggctgatcgatttcttcgggcaggtgctcggtcaggattatgagctgtcgctgttcgacctcagggccgaaggctgtccgctgatcttcaccgccggcggactgaacagcggccgtccgctcggcacgccgcttaccgcagcagggctttccatgctcgagcgtttccgtcagggcgaccgcgagccgctggtcaacagtcacagcgtaaccgcagacggacacctgctgcgctcctcggcggtcatccttgtcgacggcgccgacgaaccagagggcctgctgagcgtgcgcttcgacgacaaccgctaccgcgatctggtcgatgaaatgctgcatctgtgtcatccggaccatttctggcaggagattgagggactcgagcttgccggtctcaaccggccgtcggacagcgggcaggcattctcggcgccggacggcgagctgaccgccgccgaggccgtgcgccgcatgctgcttgaggcgaataccacggcggacgcgctgacgtccgaggagcggctgcacatcatctccgagctggaaaagcacggttatttccgtctaaagggcgcagtacgcgaggtgaccgaggtgctgcactgctcgcaggcgagcgtttacaggtaccttgcgcagctgcgcaaggtctaagggggacgctgtcccccttagatacgcccccggttccggagaaaccgggggcgataaccccctctcgtccgcacggcggacgaggccgcgccgccgcggcgcgggcagtggagtaaaagtcaggtacacgccctgacttttacggggaatttttgcgcggcgctctgcggagcgcctgtcctgcctcttttgccgaaggcaaaatgcggcaggagattgcgcacgccctgcgtgcgcagaaggcacgccataggcgtgccttttttcctttgtttcgacttcctttgttcagatcagagctgtcgggttcagctcatagatatccgtatcgccgaacaggccgagccggtccatatcctgcaggatgatgctgccgtcggtgcggctgcggtagatgcacagccagatgtcgctctcgccgcgcgcatcgtaccagggcggaaccgcggtattcgatgccgcttcctcgttttttgtcatccaggtcagataaaactcgtaatcctcggtcggaaatctctcctcgtcataccagctgtcgctttcctccgagcagctggaatagccctgctcaacatactgcttcgagccgtccggcgcaatatagccgagcgtatacgagccgtcctcgccgggttcaaaataaagcgcgagcgtcgcgccgtcactcagcggaagttcgatctgctccccgaccagaatgctcagatcgatataagtatccgcattatcataatcatggctgctgtcgccgtccgtaaaatcgtaaatgaaatccgggagccgctccgggaaattcgcggtgctgtcctcaatcaggctgatgatcgtcgggataaagttgaccagaacaacgactgccgcgatgatcgcgcccgccttgcggctgcccttagcgccgccagattttttcggcatggcggaaggaacggccttcgtgccgatgggacgcgcttcgtgcgaatgcgttttgtgctgtgcggtcgtgcgcacgctttcatactctgggtctatcgcagatcggacgctttcgcgttcggtctttttttcggctctcgggcgtacagttttatggggaaacagggtttttcccgtctcactgagacggcctttgctgccggcgcgctcgccgcagatcgggcagaaccgttccccgtcctcgaagttgataccgcagtgttggcatttcatatgatgcgccccctttctggtatcttcatcatatcaaatcctgccgcgcagtgcaagatatttcgccgcagggcggcgaatgcccctctttttccctcagcagagggcaagcggttccgccgatacagcggtgcgccgctggaggcgaaaaacgccctatcttagggcgcgaagaatggccgcctgcggcggccgggagtgccggtgttcaccggcgggaatgccgccgtctggcggcggagacaaaagggggcaagggcaccatatggttcccttgccccctcttgactcccccaaaccctcctttgcgccgcgacgcccttcggttgcgcggcgaaacgggggtacgggggctcggttccgggcgtcgggcagatttcgggatgctgttatgccctgaatttactttgcgtggtttgccgcgcatgacagtgcgcggccagacggtacagggcggcagcgttccgctgcgaaaaactccgcttccatcaagggtgtacccttggagcaccaaacgcatctgtgggcccctcgctttttgacgcgcgaccgaagggagtcgcgtcctaaggaaaggttggggagtcaagaggggcagggaaaccttggtgt

SEQ ID NO: 13042 - DNA, 2235 bp, Unknown
  gut microbiota DNA sequence
gtcgcctccagcggctgcgccgctgtatcggcgcaaggtccaccgtcagcagacggtaaaaaaaacggcacggccgcccgaacggcggcaagtctcccccctctgccaaggggaaaatcttttttatttttcctcttgacaggtttgtgttattgtattattatcatagtacaacataacaagaaaggactgaggctatgcagtggcagcttcgtggggatcgcccgatctatcagcagatcatggaaaagctgaccgagcagatcgtcagcggtcagctgaacgcgggtgataaggtgccgccggtgcgtgagcttgctgcacaggcaggggtcaaccccaacaccatgcagcgcgcccttgcggatctcgagcgcgaggggttgatgcacagcaaccgcacaagcggacgatatgtaacggaggataggagtatgatcgcacagattcgcgaacagattgcggacgaacggatttcggagtttctcgccggcatgagccagctcggctttaccgaacaggaaatcctgtcgcttctcgaaaagcggcacgggaaaggggaatgatcttttatggaacagaacaagcctctggtcgtatgcagcggcctgacaaaaagctacggcagctttactgcactgaaaaatctcgatctgaacctggagcgtggccggttcattggcctgctcggcccgaacggctcgggcaaaacgaccaccatcaaactgctcaacggtctgcttcagccgacctcgggcacgatcaccgtggacggcgcacagccgggatgctacacgcacagcatcgtcagctacctgcccgaccgcgcctatctgagcgactggatgaaggtcacggacgtcatcgactttttctctgatttttacagagatttcgaccgtgtcaaggcaatcgaaatgttcaaagcgctgcgcatttccccgcttgaccgtctgaaaacgctcagcaagggcacgaaggaaaaggttcagcttattctgaccatgagccgcagggcgcagctctatgtgctcgacgagccgatcgcaggcgtcgacccggcagcgcgcgactacatcttaaacacgattctcgcaaactacagcgaggacgcttccgtcctgctctcgacccatctgatcgctgacatcgagcgcgtgctcgacgaggtcgttttcctcaagaacggtgaaatggtcctgcatgagagcgtggacacgatccgcgaggagcacggaaaatccgttgatatgctgttccgggaggtatttgcatgttaaagttactgaaatacgagtggaaggcgtgcgcacgcacctgtctgccgctctacggcgcgatcattctcgtcgcgctcatcaaccacctgctgtattcggaagcggttccggatctgctgttcggcattccggcggctatcatgagcatgctctatgccgtgatcttcgcggcggtatttgtcgcgacagctgtcatcctcgtgcagcggttctacaagagcctgctcggcggcgagggctatctgatgttcaccctgccggtttcggtcacgcagcacattttcagcaaggcgatcattgccgtcgcgatgtgctttctgagctgccttgtggcgtttctgagcatcctcctgttatcgcacggcataaatcctgcggcattttctttctttgacctggccgcagtcccctatgtactcgagggtctgctgtggcttgtactgtgcgcctttgcagccgtgctgttcatttatctgtgcatcgcgctcggccacctcgcgaaaaagcaccgtctgctcatggcgttcgtgtggtactttgtgctctcgactgcggtgcagatcatcggcatgctcgtgatgatggccggcggcaacgtcgtcagcgagtccatggcgcgttcgatcgtcctgttctggaagtcgatgggctccggcgccgtgcatttcgtggtgctgatcctgtgtttggtgagcgccgccgcagcagcgatctgctttgccggaaccagatatattctgacgcacaagctcaacttagaataagcccttacaaagggcagactcgaaattttccgccgctagaggcgaaaaacgccctgtcctagggcgtgaagagtggccgcctgcggcggccgggagtgccggtgttcaccggcgagaatgccgccgtctggcggcggagacaaaagggggcaagggcaccgtatggttcccttgccccctcttgactcccc

SEQ ID NO: 13043 - DNA, 17613 bp, Unknown
  gut microbiota DNA sequence
gttcttcttttttattattaaaatcgtgcaagatatataatatttcatattttttacaaaaaagtcgtgactaacagcaaaaattgtagtagaatgtctccagtgagaaaatttccgatcaggaaatggaacggaggaagctgcaaagatgcaggagaaattaaaaaagctcattggagacaacattaattttgtatttgtcggcgaagccggaagcggaaaaagcgagatttccattaatttcgcaaagtggctggtgcagcttcaggataagccggtacatttctttgacatggatatgacgaaaccgctgtttcgctccagagatgtagaagtacagatggaagaaatgggaattatctgtcaccatgaaaaacagttcatggatgcgccgaccgttgtcggcggtgtcaatcgtctgttaaaggatgaagactgttacgtggttatggatgtcggtggagatcacatcggagcgcgtgccattggcggttatgcaccgaagctgaacaaagacaataccattgtatattatgtactgaatgcgtatcgtccgtggtcaaatgatattgaccatatcgatggtacactgggacagatccttggtgtttcccatattcagcttggcaaacttcacatggtaaacaatccgaacaatggaattaccacaacggcaaaagaatttatcgagggcagtcgaaagatgtctgagatggtgaccccgtatattgcggtagattttgcatgtgtcagagaagatctgtatgaggaagtaaaagattcttcagacgtgccggtatttccggtggaactgtatttgacttatccgtggttgcagaatgaccttccaaacggtcagccggttccgggtcggggttaggaattccgaaaaaaagctttcaaacaccgctgaatattggtgtttaaaaaataatttttttaacaagtatttattatcttgagaggaggatttaatcgatggcaaaaatcgtggttaaatcagaacgctgtaaaagctgtggttactgcatcaaattctgtccaaagaacgtactggaaatcggacatgatgtaaactctaaaggttacgagtatgtagtaccgacaaacatggatgcttgtatcgcctgttgtatgtgcggacgtatctgtccggatggtgcgatagagatctacaaataaggaggtagaaagattatggcaagagtattaatgaaaggctgtgaggctatcgctgaagcagcagtaagagccggctgtagatttttcgccggatatcctatcacaccgcagaacgagatcccggagtattttgcaagaagacttccggaagtaggcggtaactttgtacagggtgagtctgaggttgcatctgtaaacatggtatacggagcagcagcagcaggaacaagatctatgacatcttcttccagcccgggaatcgcattaaagagcgagggaatttcctattgtgcagcagcacgtgttccaattgtgtacgcaaacatctccagaggaggcccaggtgtaggtgctatccagccggcacagcaggattatttccaggctacaaaagcttccggtaacggtggtttccgtatgatggttctggctccgtctactgtacaggaggcagttgaccttacatatgcagcatttgattatgcagatcgtgacatgaacccggttcttcttcttgcagacggtgtaatcggtactatgatggagccggttgaacttcctgagatgaagacagaggaagagattgctgcaatcaaagaaggcaaaaagaaatgggcttgtatcggtcatgagcttgactatgcaaaccgttcatggatccagccaggtcagtgggatacaaagaaaatgcaggagtggaacgagagagcttctgaaatgtatgacagctgggaaaaagatgtaatggtagaagagtatcaggtagaggatgctgagcttgttcttacagcttatggtatctccgcccgtatctgcaaatctgttgtagatatgcttcgtaaagaaggatacaagatcggtctgatccgtcctattacagttagcccgttcccatatgcttcttatgacaagatcaactacgatatctgtaaagcagttcttgatgtagagatgtctatcccggcacagttcatcgaggacgtagagatgggtgttaaaggtcgttgcgctatcgagacatgcctgtgctccggtggtaacatcatgagccgtgaggcagtgatcgaggctgttaaaaagattttaggataataaggaggatacggaacatggaattagtttattcaagaacaaaaacaatccaggaagataaagtatccggattctgcccgggctgtatgcacagcacggttgtaaaattaatcggtgaagctctggaagagatgaacctggtagagaaagcagttatggttaccggtatcggatgctgcggtcttcacatggattatatcgcatatgatacaattacagcaccgcatggtcgtgcctgtgcagtagcaacaggtatgaagagaagcaatccggacagcctgtacttcacatatcagggtgatggtgacttcgcttccatcggtcttgcagagtctgtttctgcagcaaaccgtggtgagaacatcactgttatcttcatcaacaatggtatttacggtatgacaggtggacagatggctcctactactctggttggtatgaaagcttccacagctccgaaaggacgtatcccggaagagcatggttacccgatgcatatgtgtgagattttagacaaacttacagctccggcttatctggtaagaacaagctgcaatactccgcagaatgttatcaaaaccaaaaatgcaatcaaaaaagcgttccagaatcagatcgacggaaaaggtttctctatggtagagatcgtaacaagctgcccgacaaactggggacttgagccgttagacgcattggatttcatcgagcagaaaatgcttccggaatatccgctgggcgtaatcagagataaataggaggaagacaatatggaaacaaatttatgtgttgccggattcggcggacagggtgtcatgactcttggtaaattccttgcatctgcaacctgtgattctacagataaaaacgttactttcttcccgtcctacggcgctgagcagcgtggtggtacagcgaactgtttcgttgtaatctccgacgagatggtaggtgcacctctgggtgatgttatggacgatctgatcgttatgaacggtccgtccctgcagaaattccttccgactctgaaacagggtggtacacttttcatcaacagctctatcgtaccggaagaggatatcgacagaactgatatcaaagtggtaaaagctccggttacagagatggctctggaaatgggaaatgcaaaagtattaaacgtaattatgcttggtgtatacgttggttatacagaggttgtatctccggaagttgtatggggaacaatcgagcataaacttgctaaaaaagctaaattacttccactgaacaaagaagctttcgagaaaggtcttgagatcggacgttctcagagatagtctttctttaaacatagcgggatccaaaatccatttaaaaaataaaaaaatgcgattgattcgtcaggtacgggtcagtcgctttttttcgtacagcgattcctgaatcatacaatacaggaagtaatgcaggtcaaatgagaagtgtgatggaaaattgtttttatgaaaaatttatgtttcggttagaaaaaactatgggaataaggacagaataatggtaaaataataagcataacagatttgtgattttatgaggagagacaaagagatggagaaaatttattttaaaatgaaacactccggaatactggggattatcgccggcgtgtgtgccatgattattggactgctggtcatgatttcaggaattgttttactgaaaaacaaatcggatattattttttaatccaattaagaaaatccctgttctaattgcgtgaagcaataagcgggggttttcttctatcagggagaaggagaaatgtatgatcacagtatttaacggggaaacaatttatgaggggacagatgtgacagagtacaatcgtatctgtgatatactttctgattataagattcggtataaagcacatacaacaggcacggatgagagcacaggagtacgacgtttctatggacatggagtgacgactgatgtagatacaaaggaactgtatcaatattctatccgtgtgcacagggaggatctggaaaaagcaaagcggcttgtagcaggaaaataaaatatagcaaattgaacaaaaattttcaaaaaagatagaaatgtttgctgtcaaactgtttgacagcaaacattttttgccttataataaacaatgttttgggaaggaggcgtgatatgcaaaaagatcacatcggcaacgatgtaaggatcctgtcgcaccagatccatcggtggatcgagaatgcaccgaacaagaagaaaatagacagtgtgacaggcgcaaatgcatggattattggatatatttcagataagacagataataacgaggatgtatttcagaaagatctggaaagctgtttcgagatcacccggtcaacggcttccaaggtggtaaacctgatggtggaaaaaggactgatcgagcggcagagcgtgccgtgggatgcgcgtctgaaaaagctggttttaaccgatcgggcaagagaagtgaataaactcatggtggaggatttcaccgaggtggaaaagatcctgtcaaaaggttttactgagcaggagatgaaacagttttttgactacatgcaccgcatgcagaaaaatatgaaagaggcaacagcacgatgaaataagaagaatcgtgttcaggaaaaattgttggatataaataattaaaaacaggaggaaagcaaatcgtgaaacttgtaaaaaagttaatggaatcgatacgggaatataaaaaggcgagtattcttactccgatttttgtaaccgtagaagttgtcatggaagtactgatcccatttgttatggcgagtttgatcgacaaaggaattgaagccggcagcatgtcggtaatctggaaatatggaatcttacttcttgttctggcaatgatctctctggcgtttggtacgctggcgggacaccaggcatcgatcgcatcctgcggtctgtcacaaaatttaagaaaggatatgtactaccggattcagaacttttctttttccaatattgataagttctcaacggcaagtattgtaacacgtctgaccacagatgtgaccaacgtacagaatgcctatcagatgctgatccgtgtggcagtccgtgcaccgatcatgatcatctttgcaatggtaatgtcctttagtatcaatgtgaaaatctctctgattttccttgcaaccattccggtgcttggatttattctgatctggctggctcagtatgtacatccgtattttgagcgtgtgttcaacacatatgaccgtctgaatgaagtcgtacaggagaacctgcatggtgtcagagttgtaaaatcctttatccgtgaggaatatgaggatgagaaatttggaaaaatctctcagaaaatctataaagactttgcaaaagcagagaaattgcttgcatttaactcacctgcgatgatgtctgccattaatgtctgcctgctggcagttgcatggatcggagcaaaagcgatcattgtcagcggtaacgtaaaaggcgtagccggtggtctgacaaccggtgagctgatgagtctgttcacttatgcgttacagatcctgatgtgtctgatgatgatctccatggtattcgttatgatcatcattgcgcgatcttctgcagagcgtatcgttgagattttaacagaggaaagcgatattcagaacaaaaagaatccagtaaccgaggttgctgacggttctatcgaatttgaaaatgtagaattttactatgcgaagaaagcagacaaaccggtattggataacattaatctgaaaattaattccggtgagaccatcggtatcatcggtggaaccggctctgcaaaatccagtctggttcagttgatcccgcgactgtatgacgttaccggtggtgatgtcaaagtcggtggcgtggatgttcgtgattatgaccttgagacgctgcgtgattctgtagcgatggtacttcagaaaaacgtgttattctccggtactattaaggagaacctgcgctggggtaatgagaaagcgacagatgaagaactgatccatgcatgtgaactggctcaggcagatgattttgtccagactttcccgcataaatatgatacttatatcgagcaggggggaaataacgtttccggtggacagaaacagcgtctgtgtatcgcccgtgcattactgaagaaaccgaagattctgatcctggatgactctaccagtgcggtagataccaagacagatgcactgatccgtaaggcttttctggaggagattccggataccaccaagatcatcattgcacagcgtatttcttctgttcaggatgcagatcatatcattgttatggatgatggaaaaatcagtgcttacggcacacatgatgaattattaaagagcagcgatatttatcgtgaagtatatgaatcacaggtgaaaggaggagatgacgatgagcagtaaagacaataaaaaacatatgtctgcagcgaaagatacaaaaggaaccgtaaaacgtttacttggttatctgggtgcatataaggtccgttttatttttgtaattatctgcatcgcgatttcttccggaactgttgcatattcagcactgtttattcagggattgatcgataattatattacaccgctgctgacacagtctcaggcagatttttcagggttgcttcattatctgatcaaagtagcgatcattctgtttgccggtgttattgcgtcttatctgtacaaccgttttatggttgtcatcggacagggcattttgaaaaaaatccgtgatgagatgttctcacacatgcagaaactgccgatccgatattttgatacacactctcatggtgatatcatgagtcactataccaatgataccgataccctgcgtcagatgatctctcagagtattccacagttactgaactctgtaatgaccatcgtggttgtatttatctccatgttgagtatcagtttctggctgacactgatcgttatcgctttcgtatttatcattctgaaagtcatcggttctgtggcaggacgaagcggaaaatactttatcaagcagcaggtttctctgggtgatgtcaacggttatgtagaggaaatgatcaacggacagaaagttgttaaagtattctgccatgaggagcaggcaaaagcaggatttgatgtgaaaaacggtgagctgtgtgcgaatgcaacaaaagcgaactcttatgcaaatattctgatgccgatcctgaacaacattggatttatcctttacgttgttgtagctatcgttggtggtgcgcttggtatcagcggcgtgacaaatatcagtctgacaggcgtcagcgtactgacacttggtgctatcgcatctttcctgcagttatcaagaagttttgtaaacccgatcagtcaggtttcccagcagttaaacttcgttgttatggcgattgccggtgcagagcgtatctttgaacttctggatgaagatgtggaagaagatgatggaaacatcactctggttcgtgcagagaaaaacggtgatgttctgacagagtgtacacagcgtaccggtcactgggcatggaaagtgccacaggcagacggcagcacagagctggtagagatgcttggacatgtggaattccacgatgtagatttcggctatgttccggagaaaacggttttacatgatattacactgtatgcggaaccgggacagaaagttgctttcgtgggtgcaaccggagcaggtaaaaccactattacaaacctgatcaaccgtttctatgatattcagaaaggtacgatcacttatgacggactggatatcggacgtatcaagaaagcagacctgcgtcgttctcttggcgtggttcttcaggatgtcaacctgtttaccggaacggtaatggagaacatccgttatggtaaactggatgcaacagatgaagagtgtatcgcagcagcaaaactggcaaatgcagacggatttatccgcatgctgccaaacggctatgatactgtgctttccggtgacggaagcggtctgtcccagggacagagacagctgatttccattgcccgtgcggcagttgcagatccgcctgttatgattctggatgaggcaacttcttccatcgatacaagaacagaagccatcgtacagcgtggcatggatgctctgatgaagggacgtaccgtatttgttatcgctcacagactttctacagtacagaactctgatgttatcatggttcttgagcagggacatatcattgagcgaggcagtcacgataagctgattgaagaaaaaggaaaatattatcagctgtatacgggtgcgtttgaactggagtaaagcatgtattttatgaatgtgatatttttggaaggttcgttcagaaatagaaacattcagcctactgaaataacataagaaaatgccgttggtcttttggactggcggcattttttattatcggttataataagcttatctggtaaaaattttgttattagacagaattacaattagacaaaaatcttagtaaaataaatgaagtttaaacaggagaagaatcttatgagatatccggaatttttaaaaaagaatggctgtatcggctttgtggcaccatcctttggctgcaacattgaaccgtacaaaacagcttttggacatgcattggataagtttgaaaaaatgggttaccgcacagaactgggcccaaattgctatgaaggatgcggtatcggcatcagtaatacgccggaaaaatgcggacaggagttgatggaatattactgcaatgataccagtgacgttctgatttcctgcggtggtggagaactgatgtgtgaagatttgccatatgtagactttgaaaaaatcaaagaggcaaaaccgaaatggtatcttggttattccgacaatacaaatatgacgtttctgttgaccacactttgtgatgtggcatctatttacggaccgtgcgcggcagcttttggtatggagccatggcatccggcgattcaggatgcatttgatgtattgacaggagaaaagttgaccatcgaaggctatgatctatatgaaaaagaaggattaaaggatgaagaaaatccattagtaccttataatgtgacagagccatgtatccgtaaaaaagtgccggatacagacatcaaaatggaaggtcgtctggttggcggctgcctggatgtattgacattgctccttggtacgaagtacgataaagtacaggaatttacagagcgttacaaagaggacggaatcatctggtttattgaagcctgtgatctgaatgttatgggaatccgccgtgcactgtggcaaatggaacaggcaggatggttcggacatgttaaaggctttttgattggccgcccatattgtaatggagaggaattcttaggtttggatcagtatgaggctgtgacaggaattcttggaaaatataacgtgccgatcattatggatctggatatcggacatattccaccggcgatgccgctgatctgtggaagttatgcgaaggtgacttctgtggggaatgatgtggaagtagagatggaattcaactaaaaagtgtgcaatcataggaaaaatttttattcggaaaaaaagactgaatggtagaaataccgtttggtcttttttaaaagagagttttggtgagtagtagaaaatagtatatgtaatgaatgtgattttggggtggaaaagtaaactttaatttcaatggtcttgcccaaaattaaaacggcggtgaagaaataaaaatgagagttgaccgccgctttaaaatattttaacatctaaaaaaggaatcaggctggagagtgaataaattccctcccagcctgattccttttttatcttactcggcttgtagcttagccaaagtatctcttgagtaatccttcgaatgcttttccgtgacgcgcctcgtctctagccatctcatgaacggtatcatggattgcgtcaaggtttgcagcttttgcacgttttgcaaggtcaaattttccttctgttgcgccgtgctcagcatctacacgcatctcaaggtttttctttgtgctgtctgttacaacttcaccaagtaactcagcgaattttgcagcatgctcagcttcttcgtaagctgctttctcccagtataaaccgatttccggataaccttctctgtgagcaactcttgccatagccagatacataccaacctcagagcactcgccttcgaagtttgctcttaagtctgcaaggatgtcctcgctgacgccctgtgcaacacctactacatgctcagcagcccatactttctcgccggtctgctctttgaatttctctgccggagctttacagattggacagacttccggagctttctcgccttcgtaaacataaccacatactgtacatacaaattttttcataataattcatttcctttctcttgaaattagttttaatatcatttttattaaatcagctgtctccaactggtttgttctgtttttatttttgttccttttcttttttcaaacattccaggcaaatgccgtagaataaaatggaatgtcccttgatcacaccgtcgaatgtctgggcggcgatctcatccacatgatcaatactgttcatttgtaaatctatcatgctgccacattcatcacaaagaaaatggttgtgaggttccggtctgccgtcgaagcggtcaggtccgtttccggtgggaattttctgaatgtttcccagttcggcaagcagcgatagattgcggtaaacagttgccaggctaagctttggatattcttcccggagattcatgtaaacagtctctgcggtgggatgatcatatctggtagccagaaattgttcgattgcatctcgttgtttgctgtgctttaacatttattttcctttcaaaaatgataatgattattgttgttgaaattaatatagcatgcagcgtctgatttgtcaacaaaattatgaggaatttttagaaaatttattcatacgttatataaagatgtacagggagtagaactgtgcccggatatcagagatttgtaacgtatatgtttcgatatgaaaatggtaaaaagatggaaaactgtggatttgccaaggtcgaagtgcggcagcaggagtgcaggattcagatacagctgaaaggaattacagcggataaaacggaagtctatcttctgaatgataatattgattttcccaaaggattgtttctgggttccatggcagtacacgatcatatggcggggaaggtgtttggatgcagtgcggatcatgtgaatggtacggaatatgcgattagtcagatccgtggaatttatattgtaacaggggaagatacctttgttgctagtcagtgggatgatcaggagacgaggtggaagaatttcagaccatgggaagctaagacagaggattcaaagacttctgaaggaaatacgttagaagaggtagagaatattgtgagttttacagaaaataaacaaaaagcagagaaggcgacaattttaacaggagataaacaaaaggcagagagtgtatcagttttaacagaaggcaaaccaaaggcagagaacgagatgaattcttcagaaaataaaaatgaggagtcaaaggaagatcgaatcaaaaatgagagagaggatatgccaaatgcaacatcggtagagccgaaagaactacaggcaactcagcagaccgcgacggtttcggaaaaaaacatttctgttactgtgggaatgggaaaactgctttcagcatgggaaaaccaatgggagcgttttacagcgacgcacacattgttctgcccgtttgatgaggatgacggagtgtatggtgtaaagcttcagttacaggactttaaagtgcttccgaagcagtatcattatctggcaaacaacagttttttgctgcatggatattataattatcagatgcttttgtttggatatatggaaggggaagcaagacagtggtttctggggattccgggggtgttttccaatcaggaacagttgttggcaggaattttcggatttccagaatttcggacaaaacaggtgacacggcagaaaacgggagagttcggatactggtatcggtatctggatatgagaaaataattcaagaaaaaccgatgttcccggtgtgagatatgcttcgtgcaaagtatggcatatttctacgcatctttgtaaattaaaagcccctgtctcacaaaatgaaacaggggttgatttatctcagtctgagttgagactcccacttctgcaagtggtgagtagtaacaagtatttctcagtgggagttcaatctccgactgagataaatgctccgcgaggatgtgcagtgattctgaaaagaagatgtcagcttgcgctgaccaaaatcacgcaccaagtctcacgtgcgttcgacttgaatatgttagaatacacgtcttgctcttacgacatgatatccaccgatatttacggaacggtaagtaacaccgcgtcccggccaggaatcatagatcattccatttccggcatagattgcaacgtggcagacactgcttttaccatttcttccatagaagaccagatctccacgctggagagaattggtatcaacagatcttcccagtctgttatctgcagccagattgatagaggtatattcatgaattgccagtgcatggtctacgatattggaagatggattaataccggcagcatacaggcactgataaatcagaccggagcagtcaacgtaagatcccggagttccagagcagccaactttatagccagtaccggcatttttataatcaatagcagtctggatcatggcattgatacgatcctgacggttgctggtatatgttactttcatcggagtgcggtaagttccaaggttgtaccagtcatattcggaatagcccattgctttccaggtagtcagatccacataaccggttacggataatttgtgtctggactggaaattgcggactgccctttctgtggcagatgtgtaacgctcactgctgtttccgcagactgcctgattgactttgataactttcaaaccgatatttgcggtagaaagattgtatccgccacttggaaggctgatgctgttttgcggcatatagtagttgcagccatttacttttccaccagaaacatagtagtcacggacgccaactttgtaggtgccgttgaaaccaaagtttactttaccgccgttgatcacccaccagccgtttctgttttgagcgacatcgttgtagctgaaatcaactttgccgccacgaagtacccaccatccattttcatttttctctacggagttgcagttgaaatcgactttaccgccgacaatgcgccaccaaccatttctgtttttggcaataccggtatagttaaaatcaactttaccgccacggatgtaccaccatccattttcattcttttctacggagttgcagccaaaatcgactttaccgccgacaatgcgccaccaaccatttacatttttggcgataccggtgtagttaaaatcaactttaccgccacggatataccaccagccgttttcgtttttctcaacggagttacaattgaagttaactttaccgttttcaatacgccaccagccgttctggtttttggcaattgtattatcgaaggttactttgccgttgcgtacatgccaccatgcatactgaccgttgacggtgccttttatcacatcgtttctgtcagaatcaactttaccgtcacgaatataccaccagccatcttcgttttgtgcaaaaccgttgtagttaaaatcaactttaccatttttgatgtaccaccaaccgttttcattctgtgcaacagttgtgccggaagctgggacaataccatttttgatataccaccattcatttccgacttttacaacatctgtgtaatcggtctggagctgtccgtctttcacataacaccagttttcggttgtatcatcgttccgtttcgcttggataaatccggaacgttccagatcaacggaaccgttttctacgtagtaccatgcggtgatagtgttgatcgtgccctcatagaatccggtaaaatcagactgaaggacatcgttttgatagagtgaccatgtctgagtggtctcatcatagaaaaatccatttttctgttcggcaggtgtttcaccattatcaggtgttttgccattacctggtgtctcaccatcacctggtgtttcgccatcgctggatgtttcgccttgtgtttcatctgatttttcagaagtctgcacagtggcattgttttcctgtgagttctcgttttgttcagacaattctgcttcaacggcaatggaattatctgccggtgcggctgacgctggagctgtcataccggcaatagcaagtcctgcagagaataatactgctgcaatctgtttgtttttcatagaattagtctccttgttaaaagctgatatttacatatagataaaaattaagggaaggttcggaaatatatgaggaacccgaacaattatatattagcaagttttgtttgagaggactacccttgaatggaagaaaaatgacgatttaaaataatcttaatattttttgcgttgtgaaaaaagctgttttttcagatgagcataaaaatcccggtatttcaaaaagaaacaccgggaaaaatatggttatgatgagatgaattacattaattaataaaaaactacacaattacccgaaattaaaagatgcagccatcatagtgtttcagcatattctgatccggacgctctaacaggcttgtgcacacgaagtctttcatcggctctacgaatgggaaggtatcgcgtgttgcccatgatggaacagtccatgccggcggattgttgataaacgcatttgtccatgcggagttgttctcaaaccagagttcgcatacacgatcccagcgatggaagaaaatgttgtcttcacttacatctacgaattccggagtgccatcaccttccggcagcggaatcggagaatactgtttgtcatatgctttgtgtgagaagaaacgaagcagtcccggcagtttgcatgcttccggtgcaaaatgatttaagaaccagtcttcgccttcttcgcgggaaacacccttcggataagacatcatgtatacaaaacggataaatgtcttgcctgcatggttcatggtctggccgaagaaatcctctgtcggttcagccgggatgtttgcgattgcaacggtcatggcattttcaaccggttccggtgtcataccgagaagtccgcgcaggcttcttctgccttctacgtcaagtccgagattttcatggacacgatagttgaagaatcccatggtttccatgccttttgcaggcggcatgacacggtacatgacgtaacgtgttagccatggttcctgtgccattacttccgggcaatggtggtgtacgaaccagcgctccatagccgggatattatcgatgtcgttgatgtggtggatgatcagtgttttgttcattactgccattgtaaatacctccataaatttgaataaatatgtgttgcctgatctgcaaaaacctatttatagcagacatacgcataaatgaaaatggatggtctgatataaaatgatttcttgcggaacatgtttatgtttgataaaattattgtaaaccttaccctaagggcagagtcaaggaaaaaggaaatgtatacaagataaaatgggcaggtacgattgtaagtttataagaggcttatgtatataagaaagaattttgagagcacataaataaaaagtatggaggcgcacatggacgggtatatgacaattggggaagtggcaagagtgaagcaggtttctattaaggctttgcgctattatgaaaaaataggaatcctgaaaccggcatactgcgacccggatacgggataccgttattacaaaaatgagcagatgctggctgtggatatgattaagtttttgcagattctggatattccgctgaaaaactggaatcagtatgtggagccgacaggagagtttgacctgaaagggttacttcgggatggtcagattcgtgcttatgaaaaaatcggtgaattgcagagctgtctgaaacgtttgcagctggcagaacggggcattcaggatacggaaaaataccgggattgtgaaggattttacaggagagagattccggagcggaatattttaagaagagaaattaaggaaggactgtcttcggtagaatttcataaaaagctgagtgaactgtttgagctggcgcagaagcatcagctgtcggcaaattatccttccgggatgatggcagatgtggaagatggacaggtaacgtattttgtatacgtggaagtgtttgaaaactgcgaggagctgtcggagtataagtgcatgccggcaggaatttatgaatgtttgcgctgtccgccgaaaagtattatgaaggcggacgagttatatccggaatattttgcgagtcatgcaaagtttacgatcgtggaatcggattgcatcacgtcgccggtttattttcaggagtatccggtggagttacaatttaaacaaattaaaaaagtttcctgtaatgattgtgaaaagcaataagcagggggactttcttatatcaggaggttatagttgactaatttgtgaaaaagcaagtacaataaatatactgatttaaaatattgtctctgattcatgcatttattttaaaaagtaaaatatttggtgaaaaagacgcaataggaaagcagaaagcaaagcgatcgtgaatgattgctttatggtacgcaggcagagcaacgagttggttatgaaaaatgtgtctatgatctggctgcaaaataaaataagaaaactctgacggcaaggaagatccgagcgggaatagttgttccatatcgtaaaattataaagtataatgttttggctgaaattcaacttgagctgaatgtacatgaagttttgcattcaattttggataatggcagtgaagtttggcatatatttcagtggaacatgtatttttattcaggttagttgtttgaatcagatagatgtgagacctgagaggactggatttatagaaccatttttccgacgaattgccgggaagatggttctttttgatttgtgaaatatatcagatgggagatgactcccacctctataggtggtgagaaacaagctagtatcagtggtgggagcc

SEQ ID NO: 13044 - DNA, 15948 bp, Unknown
  gut microbiota DNA sequence
tcccactgagaaatacttgttactactcaccacttgcagaagtgggagtctcaactcagactgagatgaaatcgatgactggatgatgcagtacagctgtctgctggaactgaccgcagaaatggaaccattatccgccaaagaaaaaaatgaacaaaataaaatctccggctgtcaggccgatctgtggatcatcctttcctgtgaaaacggaattgttcacgtccgtgctgacagtgattctctgatcgtgaaaggcattgtcgctgtcattgctgctctctttgacaaacgtaccccgcaggaaatctgcggggcacatattgattttcttgaaaaaactccgttaaaagaacagatctccacggaccgttttcacggaatgcagactgtgatccgtaaaatccaggattacagtacttctctgacgcaaatgtaaaccatataagctgcataaacagcaagcatactcacaccacctgcccgcgtcaaaagctgctttttccatacaagagccataatatataaactgacaatcaccaatatcacaatatcgatcagattgttcatattcattgcaatcgggctgatagcggatgcaagtccacctaccagcaaaatattgaaaatattggaaccaatgacatttccaagtgccattcccgcctgatttttctttgcagcaaccacagatgtcacaagttccggtaaagatgttccaatggaacagatagtcagcccgatcaatgtctcacttaatccaaatccgcgggcaatcgtttctgagcaattaacaaccatttgacctccaattacaatagcaaccaggccgccaccgataaacaccagacatttccagattggcaggtccttgatttcttctgcttcaacatcttctccggcctgcatggacttctttgcagaacgaaccatccagtacagaaacaaggcaaaaatcacaaccagaataattccatccatatgtccgaccatcattcctgccagtcccatcacgccaataatcactgctaccagtacagaaaatgggaattctttctttaatgtctctttcttgatcaccaatggctggaacaatgcacagacaccacaaaccacaagcaagttaaaaatattggaaccaattacgttactgatagccattccgttaatgccccgtaatgacgctgaaatacttaccgcacattccggtgcactggttcccatcgccacgatcgtcattccgatgataaataccggaatattaaacttttttgctacggagccacttccttctacaaagaaatctgcccctttaaccagcagtacaaatccaataatcacacctataattgccaaaatcatacttttcatcctttctcaataccatattttttctttattcacgaatatcacgcattcctgctgcaaattcataaataccccggcattcttgctgcgagatgcatgacatattcttctgctatttctatccgaaaatttcaagatgttcgattaaaattttcacaccgattccaatcaggataataccgcccagaatcgttgccttatccttaaatttgcttccaaatacatttccaatcagcacacctgcaattgaaaaacagaaagtaatgcatccgatgattgttaccgatgtgatcagtctcacctgcagaaaagcaaatgtaataccgattgccagtgcatcgatacttgtggcaattgccagcaggaaaatttctctcagattgattcgcaggctgtcatccggacagacttcttcattttctcctttttctttgatcacatccagaatcatttttccaccgatcagcacaagcagtataaatgcgatccaatgatcaatggctgtaatataagactgaaactgacttccaagaagccatcccaatgccggcatcaacgcctgaaatcctccaaaaaatactgccagcacaaacatatactttttatctacttttcgcatgctcaagcctttacagacagataccgcaaaggcatccatggaaagaccgacaccgatcagtgccagttccaagtaacccataattcaatttcctccataatgtatgatttaacagctcgcatcagggaatatcattgacaggaactttgatgcaattttctctcaagcgaaaaaagagacccaggcatgccataggatcaaataataatctttatgacatacatgagtctcattcattaagatttgccagattatcctaaaaatgataaacaggttgttgacaaatcacacaattcttactgtgcaaactactccctcacgaagttctttcaactatatcgtaatgtcggagatttgtcaatatttgaatacatatgatgcataaactgtaattcaaaaactgtccctccggacggattggatctgacggtaatactgccatcatgcacccgcacaatttcccggaccaacgcaagtccaagccctacaccgccaagttcccggcttctggatttatctacgcggaaaaacggttcaaacacacgctctttaagttcctccgggattccgctccctgtatcctccacggataaatgaacatggttttcctcctggtatgcagttactattacctgtccatcaacatgattatattttatggcattctcaacaagattgtataccatcctgtaaataagaatatcacttccccgcatcgttatatttttacagttttcaaccagtgttatattcttttcctgtgcaagcggttctaaatctgccaatacctcatcaacaagagcatccactgcaattacttcatcccgtcccacagtctgaagttcactcatgtcgagaagcgtctttaccattttgttgagtctgtcattctgttcggtaaccatttttatcgtttgcatagtatctgcatcattccccggatgccgggctgcattatatagatcaagctgtacctgtatcagagacaacggcgttctgagctcgtgcgctgcatttgcagtaaattgcctctgtacctcaaatgcatccgagaggcgcgtaagcatcctgttgtacgaaatactaagctggttaagttctttcactttgttttcttctatccgggaatctgccagattctgtgcctctacctcctcgattttatcagaaaactcgcggatcggtctgagtgcatgcccgcttataaaataagtcactaccccacccataagcgccagtacggctgagattataaaactgtttcttttatagtcagccttattactgtacacctgcaaagaaaagtcatttgcgaactcatcccacttatcctcaggaatgctgatatatatttcatccgaatcattttcattatcatcttcccgggcagcaacagtctcttgcagggagtcgatataatacacaccatttttataaacaaacattgtcagacagccacatatgactgcaatatataatgtaatgatacaggtcagtctccactgcagcgacatttttttcatcattcaaactcctctcgtattttgtaaccttcccccactttgttcaaaatcgggtcatattccagcacagccttaagctttcttctaagcgaagacatatgcacccggatggatccactaaaactgtctgcggttgcatcccagacatgctcgattagttcttcctggcttaccggtcggcccagattcagaagcaaatattccaaaataccactttcttttcttgtcagagagaccggttgcccttttgcatatgcctcacgttttaccgtgtcgaaccttatctcgccactttccagacatacattcttctgcacaaattttcttcttgtcaggcttctgatgcgtgcctcaagttcctgtaagtggaacggtttttccatgtaatcatttgctcctgcatccagtccttccactttatctgcgatctgtcctcttgctgataatatgagaacctttgtctcctcatttctctgtctgagttcctttaggatctccatcccatccatcccgggcagattcagatccagaacgatcagatcataattctccgccagaatacattcaaaagcatcttccccatcatagcaggtatccacttcatacccggcagcatacaggctttttgcaaccatatcacatatttgtttttcatcttcaactattaataatctcaaaatattttcacctgtttcttaacaaaaattttacaacagctattgtataatatcaaagtcagctggtcaataaatacaacgaacaaaggagcaaaaatatcttgaagagcaaaaaaataagtcaggcatttgtgcttatcgcagggatcactatggtgagctatggtgcgatccggggggaagcggctgtcgtgcttggaaaagcaataaaattatgtctggagtgtgtcggaattggataagaaaaataagaaaaagaaatcacgatcaaaaaaaacagccggaatacgtggatggatacaggcagccgccacgctgctcaccaatatccacatccccaatttatttaaaggtaaaatatatcaggggaacgcaaaagcagtatgtgtaccgggattaaactgttattcctgtcccgctgcaacgggagcatgtccgatcggtgcctttcaggcggtcgtcggatcatccagatttaaattttcctactacatcaccggtttttttattttactcggtgtaacacttggaagatttatatgtggttttttgtgtccctttggatggtttcaggatttacttcataaaatccccgggaaaaagttttcaacagcccgattgaaaccactcagatacctgaaatacatcatccttattgttttcgttatccttctgccgatgcttataacgaactcaatcggaatgggcgatccgttcttctgtaaatacatttgtccgcaaggtgttttagaaggggctatccctctttcacttggaaacgctgcgatacgatctgcactgggaactcttttttcctttaaatgtcttattttaattacggttgttgtgttaagtattttattttacagacccttctgtaaatggatctgtcctcttggcgcaatctactcattatttaataagataagctttctcaagatcaaagttgaggacagcaaatgtgtcggatgtaatcaatgtgtaaccgcatgtaaaatggatgtggatatatgtaagacgccggatcatccggaatgcataagatgcggagcctgcataaaggcttgtccgaaagatgccatccattatcagtttatgggaaaaccctgtcagaaaagaaagagcaacaaccggtaactatttattctttgcagaattactgcacatcatataattacgaaaaggagcaattactcatgaaaacaaaaagatctttattacttatttttacactctgcgcagcattatcgcttactgcatgtaacggaaaacaacctgcaaacacggaaaaaccgcaggatacacagacagaatccagcgcagcctcttctgatgattccagttctgaacttgatgatttatatcagcaggaaaaccagctttttgcagatcataaagatgtatgggataaggtatttggcatgatgaataaaagtactgctgacccgagtggaaattatgccgattatctggctggcactgtggaatcaaacaaagactccttcacagaggatgaactgaaaatacttaatgatgatattgaaacaatcagagaaattgaagaaaaaattactgcaatcgaaaagaaaaatgctgcatccgacagtaacagccagaaaaataattccgacgatgtatcgcctttcaaagatttttccgcaaaggatttcgatggcaattctgttgacgaaagcctgttttccaaaaatgccgtaactgttgttaatttctggtttaccggatgcaaaccttgtgttgctgaattatcgaaactgaatgaactgaacgatgccatcaaagcatctggtggtgaagtagtaggaatcaacacagaaaccttcgatggaaatgaaactgctataaaagaagctgcagatattctgaaaagccagggtgccaaatatcgcaatctttccgtcgattctacttccgatgcaggtaaatacgcctccaacattatggcatttcctacaacaatcctggtcgacagaaatggcaatattgtaggcgatcctatgcttggtggaattgataatcaggaaaactatgatgctttgatgaaacagattcagtctgtcattgatgcagacagtgcgaataaataatcctgttcattggttgcaaaaaaatatccttccaagaaaagaatctgtgatatttcaaaaaccgccacatctgtctatcgacaaatatgacggtttttctacctatcctaatatcttgacttttttataaaacgctgtactaatatttggcttaccttcttttataacatcccgttctcagtaaaattatttttagtgaaatctcggtggctgtacctgatatgtctcaatcggcacatcctctgtggagaatttcattgctccgttgtcgttctcacatacaatccatttcagccagttttcattatccatctgcggataatcctcacgcaggaaccatcctctggattcttttcgcatggatgcacctttaaactgcatttctgcggaaagaaccattgcctctgcctcgtggcaggaaagcagatcgtggaaatcttctgcttttaactgtgcaaccattggtttgatctgtgccagtttgcgcaagcatacatccagacggtgctgactcatgtatacactgttttcaaccgggcagacaagctgctggattttatcaatgacttcttttgctcttacaccttcttcacggaataacggtgcaaatgcatcttctttcaactgtgctacctgggcgtcatcaattggctgctgtgcatgatctgctgcataagctgctgcctgctgaccactgacaactcctgcaaatactgcgttcaggattcctgaaccacggttacgtcctggaggtgccggtactgcgccaggcgcacaggaaccatcgtaacatacatctcctgctgcatacattccaggaatggtagtagccatctgctcatctactttgaccggagactgctcaccgacaaatccaggctctacttcccatttctcatctccttcgaaaccatctacggaagaacctttttcgaaatcaattttccagaatggaagaccataaggacgatcccagatgtagaacatcatcgtatcatttttggttgtctcgctctccatcggatgcaggtaaaccggacctctgccggatgccatggtattgtaccactctgctacagcgctggaactgatatctgcttccgggaaacgacggaagttctttgtaatattttcaccataagcgtcatacatcacgttctcaccaaatacacactcacggttgctgtgtacacggtaaagctgtgcaaagttaccaaactccggatttcgcatctgtgcgccggcacggtaagctgctgcgataccgtcaccacgtccgttactccacatcggagccacacggtagttctgacttccggtacagaggatgacggattttccttcaaatacatagaaggtaccgtcaatgatgctgtatccgacagcaccggcgatctgtccgtctctggtcaaaaggtcagaaatggttgttttatcaataaattttacgcccagttttgtggcagttgctcgcattttcagtgtcagatccagatctacaccgatcatataagtcatcggaccggtcggaatacgtttttttgggatattgacaccccaggattccatcttgtccagaagctcattattcatagccacatattttttcagtaaattctggttggccagataaccgccaacagcatttgcatgatattcgttaaacatctccggtgtggttttctccagatcaaaatactgtaatacaccgccacctttatttgcttttccggaatatccggatgtctgtttttccactaccaggacactgatgtccggattttcttcttttacactgattgctgctgtcagaccggcaattccgccaccgatgatcaacacgtcagcagacattttttcctgtttgatttcctgtttttccattatgctctcctctctcagatacatacccaaatgcttttctgataaaattatttctgacaaaagccccgggcagatatcatattatgcttcggtctgtttttttgcgtaacagtcaaaggtctggcggaaactctggcttgcatagtcagggattaccttgatcgcacctttggcacattttacttcacaatagttacagtgttcgcagtcttccacatatttgaaaatcggacgtcttttttctgcatcccagcgaatgacatctacaaaacaggctttatagcagatctggcatccaacacatttgctttcatcaaattcgattttatggtttatataaatcatcgcttctacctccagttatctttctcttccgcatacagagacggaaggattgctgccagatttgtaaactcttttacgttatgtaaagccagtgacatggctgccatatccgggtaacgcataccgtccggaagcactttcacatcttttccgtttacataattccagcccatccagaaacgggaacgaagctcgataccgccctcgatctcacgtacaaaatgtgtcataaatgttggcggaacagcaaatggtggctgaccttttccgtatccttttccacagactaaggtcgcacaggcatcggtaccgatcagttctgccttgaatccacagtctcccgggtatttaaagttgattacgatctgatccggtcccattccggtatcttcggtaatttcatgtgtggtatcccataatttttcctgataggtcagatccggatctaacgcacgtacacggttctgtgtttctgccttgtaatgatcttccggattccagattttgtaacgcaggttgtcaagtccatgccatgcaaagaaccagtcaaacatctccggtgttactcccggcatctttgtcaggttcgccagatatccggttccatccggcagaatacaccagcctgcctctgcctccagatatcccggctcaaacagacgatttctgtctttgaactgcagtacctgatccgggcgaagcggtccgttcagcatttttgcatatgcttccggagccggctgcgccatatcctgctcgaaatatttatagtagcttttctgtttttcctcttccgttaccggaactcgtttttttgccatctgttccataggaaacctcctccattttcattgtctctatttttcacacttcagggatctcattttatgaggtaaatttggctttcggtatttttctgaagtattaaaattcgaactctgccatatggcttaaaatctcttttgcacctgcgattgcatcatcgataatctgtaatgccggtttttcttctgtgactaacggtacgatctgacctgccatgacagcaccgccaaccatatcgccttctgccattgcttttctcagagagctttctgcaaccgggcgaagcagttctgctgctttttcctttgtattgttatcttcaatatcgatcatctcgtccgccagtttgtttttgatctgacggcaaggctcatcggtgcagtatccggtaatgacagtagacatatctccggcagccagcacttctttctttacatttggatgcacggttgtctctgctgcagccataaatgcagttcccatctcaaaaccttctgctcccatggcaattcctgcagctacaccacggccatctgcaataccgccgctggcaacaaccggaatatccaacaggtctactgcctgtggaaccagaactgtggttgcctcaaaagtaacgtgtccgccgccttcccagccttttacgatcatgacatctgcgcctgcctctgctgcaattcttgcatcatcaataaaagatgcttttacaacgatcttgcagccaacactgtgccagatatcaaaatattttttacaaagttccagatccagacctgcgatggtatctgcatacatcactggtggtttctcatccagaacaatttttgtcacatgttccaaatttggtggaatcatgataacattcattccgaacggtttatctgtcagctttcttgtctctgcaatctgctctctgataaatggttccggtgcaaatccaacgcccaacacgccaagtccgcctgcatttgatactgccgcaaccagcggtgctgtggaaatccaggccatcggtccctgaatagccggtttttcgatatttaaaatctcacatactctgttcataccaaccttctcctttcgctctctgacgttctcccgaaatccgcttcctattttcaaaccattcaatacttgaagcattttccgtgatacatctcccttgttgagaaaattatataaataaaaaaggatgttttcatttccaatacatccaagtttgctatgtttttttacaaatacttttgtaacttcctacaaattttgatacaatcagaataagaaagtacggggggaatacaaatgaaagtcacattggaaatggtattaaccagattttttgcacaacacaaagaagcaaaccttttttcggaaatcacggatacgcaaatgcatcatgccctgcttggcatacagcttttaccaagacatatggaaaatctgtctgctgattatctgtatgtcacagatcagttctactattcggcacaaatatccagagactgccgtaaagtaaaaccagacaatgtctatccgccggatattgcagaaaccgatctttcttttattgtatttggctcggaggcacctgactctggagatttgagtcagaatgctatttttattcagactgatatggaactggccgaagggtttaatgctcttcagaatgtttatgccgaatttatcgaatggggacgtcagctggattttgcaattttccggaatgctgactttcaggaatttatcgacatcagcgaagaaatgattgcctgtccaatcctggtttatgatccggcgctgaagctgctggcctattcccgcatgtacccgggactggatgaccgcatttttcagactgccattgcaaacggatatctggatctggaaaccgtaaaatattttgaaaaagaacggatttttgcacagatggaccacaccggaagtgcagtcggcgaaccggacaatttccgtatgcatgcagactttgcccgtgccatcaatatccgcaacgagctggcagtctactgcattttgctctacaccagtgaatatccgcgcagctacatcaatgaactctaccagattttctgcaacagcattgagcatctgctggaaaaacagcatgcggatttcctgaaaaaccgttccgtcaccgattattttctgatggatcttctggataatccggaaacaccaccggagcagatcaaagaacgaatttactataatgatctggattatgagggcaactacatcgtaatatgcctccattccgacattaagcaaaagccttcggaaaattattttatccagctgctgcgcaacaacatgatcaactgcagaatttttgcgtaccacggtggaatcgtcattttgtatcatcttccaaaattccgggaaacagattacagagattatctccgtgaccagttgcatacaattttaaaggattttgctgatcgcagcattacgctttatttcagtaaaccttttacaacaatcggacagtttgcagaagcctaccagcaggcggaaagtttgcatcagatgaacctttccatgaacgataccatgtactgtttttatgaggatcactggctgaagtacctgattggcagtaccccgcagaaagagaaaagtttttccttctgtgaaccatcgcttcttcaaatgttacatgcagataccaaaaaatcccggcaacagctggaaatcctttatgaatatctccgctgcgaccggaagttaaccgatgttgcaggtaaactcggcatgcaccgcaacaatgtcatttatcatgtaaaacagatatccgaagagtttcatctgaatttcgatgatcccgatgtgcgcctgcgacttctgatgtcttttgaagtattgaaattcagcaaactttttatacgttgatttgacaagttctgatctgcaaaacaaacaggcaggaagttgatcaaacttcctgcctgtttcatatactatcgaattacttttcccggatttaaaatatgtttttcatcaaaggcatttttgattgcctgatacagtgcaatcatctgcggtcccataaatgtctccagtgcaccgacacgggcatgaccgattccgtgctcgccggatacctgaccacccatggttttcgcctgcgcatacaattcttccatcagcttcgggcaacgctcctcgaacagttttttgtccatatcgtcacgcatcagctgaatgtgcatgtttccgtccccggcatgaccctggatggagatgcggatgccggtctcttccatcttggtgtctgcgaatctggaaaaatctgcaattcggtttctcggaacaacgatatcgcactcatccatatctgtcgtagatgcttttaatgcctccagtgctgcgccacgcaccgtccataccgcttcttttcgctcgtcagtattgcacaggaacacatcctctgcgccattgtccagacagatctgtgcagcatcgtcacatctgcgctccacatcttccacgctgcttccgtcaaacatcagaatcagataggaatctgcggtacgatgcggcataattttgttcaaatattgcgccgcatcatccagcagagattttggcatatactcgatggccgtcggattcagatcggaattaatgaatttcggtacggttcccacgcactgctccagtgacggatacggtaccagaagggtgtaggataccttcggttgcggaatcacacgcatacgaagttttgttgcgatacataaggttccctcggaaccgattaccagatctttgatatcatatccggatgtatttttcgctacattactgccaaactgcatgatgtcaccatttggcataacgcattccatggaaaccacataatttctcgtcacaccatatcctaccgctttcataccaccggcatttgtcatgacgtttcctccaacggaagcggttttctcgcccggttccggcggatagaaaacacctttttcctgagcggcgtttgccagttccataaccagcacacccggctcaatgacaacggtcatcgtgtccagatcccactccaggattttgttcattttttccgtacaaagtaaaattccaccataaatcggcactgcgccaccggacagaccggttcctgctccacgcggagtcaccggaatgcagtgctcatacgcatagcgcatcactttggacacttcctcggtacttaatacttccaccagtacatccggtacatgagtaccaaagtccggcatctcatcatgcgcgtaatcatattcaatctcgtccccgtaaaagacacgatccggggctgtcacactttttaaatattccacaccttccggtgtaattacctgatattccattttcgacatccccctttactgctgttttgcctgtactgccgctgtcagagcaggtacggcactgtacagatcttctgtaatacaataatttgcaattttaaaaatcggtgcttctttatctgtgttgattgctacgatacactcagcgccatccatacctgccgcaaactgtaccgcaccggaaacaccgcaggtgatgatcagcttcggttttacagtacgtccggaaagtccgatctgttttgtcacatcattccatcctttttctaccagtggacgtgtggttgccaactgtccgcccagagcatctgccagttcctgcagcatcgccagatcttcctgttttttcacaccacgaccggcaacaaccagaacgtcttcctcttcgatgccttttgttttttccacaatctcagtgctgatcacttccataccggatttcagcatttcatctgtcactttacagttcacaacttcaccatttgatgctgtcttttctgccacattcatgactttataacgaacggttgcgaactgcggtctcgtatttgtcgtgataatctgtgccatgatattgccgccaaatgccggacgaatctgcaccagatcagtattctctttcatatcaagtacggtacagtctgcagtcagaccggtgcggaaacgtgtcgcacaggccggtgccagggaacggcccagagaagttgctcccaccaggacaaccgttggttttaccgtttcgatacaatcttccatgacattagtatacacatctccacggaaatgtgctaatttctcatctgcgtaaacaaatactttatccacaccgtattccagtaacgtgtgcgcctgttcatttgccttttctccgccgatcagcaccgcatataccggatgattgatcttggctgccaactctctggcttttccgatcagttcaaatgccaccggatgaataccgctctcttcctgctccacaaataccatgatgcctttccatgcatctttgtccacggtctttttcacttcatcctcaaccagtgaaactgcctgtaccggacatgatttcacacacagtttacacatcttgcaggatgcattaatttcgattttattatctttgatctccagtgctccaaagggacatttttccacacactgtccgcagaggatacactgatcctgattaaaatttaatgttgccatctgtctttcctccgaattgtctatctatcattcttacagctgtttttccatgtatttcataattgaatattctccactattcactcattttgaaatactacatatattttcgttccgcaaaaatatcggccagatcaccggcaatctgctctgctgatccatccatgaaaatctgtccatcatgactttccggtgggaaaatacgctctacagaagtagcagatcctttcagtccgtaatgtgtcacatcctgatccttgaattctgcaaatgtgatcatctctaccttgcggtctttggtcgctgctttcagacgataagacggaagacgtggcgtatagatgtctttttctaccgtaagcagacaaggaagtttcatttttgccagctgtctgacattgacaaaatcctgtccaaccgtcacgcttgcatcatctacatctgcaatttctcccacccatgctgcacacgggattcccaggtattccgccatggccggaccaacctgtgcggtatcaccatcggtggtctgtttaccacagatgataatgtcataatcacagatggatgtgatcccctgtgccaatgtataagaagtagccagtacatccgcccctgcaaaggtacggtctgtaaatacatatgcctgatctacccccatcatataagcttctttcatcattgcctcagcctgtggcggtcccatggtaactgccgttacggttcctccacaacgctctttcagacgcatcgcagtctccagcgcatacagatcatacggattgatcttggctgctgcaccatcacgttttaatacacctgtttccggatcgatctctacctgactggtacccggaacctgtttgatacatacaacgatcttcatgttcttctcctctcaaacaatcactcgaatttattgccagttcgcataccatgttgaatattcaagaatgctccggcattcttgttgcgaggtgcgcgtcatgcaattgcatgacatacttcaactgc

SEQ ID NO: 13045 - DNA, 3572 bp, Unknown
  gut microbiota DNA sequence
ctaatcgtttgagggcttgaccaaaaggttggattgattcggattctgtatgaagttttgaaggtatatatcgtataaataaaaagtgctgtattgacgaaattgccaatacagcacttttttatatcatcaaatctgttgtgataatcgaaatacatttttatgaaaatccagtatcccttcttctttcatttttccaagttctttagacaaagcacttcggtcaacattcaaataatctgcaagctgctgacgattaaatggaatttcaaacgtagaagatccttgtttgcggtattctgcagtcaaataagtcagtaaacgaccgcggatatttttcggtgtagtacagaaaatccgtgtagaaagcgtcagattttttcgcatggaaatctgtaagagattatcaatcagttttcgataccagtcagattgattacaagatgaatcctccataattcggcgaatatttaaaaataaaatctggctgttttcagcagtaacgacttccacaagcagtggttcctttacaagggcatatgtctctgcgaatacacctccggcagagatgttgcttaaaattgtggaattacctaagaaatcagtgttgataatatttacacttcccgttagtaaaataccaatttcatcaacttttgtgtccatatgatagatgatttcgtttttttcatattctttttgacgcaggtatcctgcggtgttcatctgctccagttccatttctgtaattccgcgaaagagcggtgagataatttttttgatgctatccatattaaaaattcctttacgtaaagtagtatatattaacttttttaaaaatattattccatatctgttttgatataacaagtgaaaaaatagttattttacagaatcaaggagatagaataaaatgaaattatttacagagtagaataaatataaaggatttatttgacttctgaaagagaaggaggaaatgtatatgggaaaaagtattcatcagagaaaagaatgcctgatgaaaaacatggaatttgtaggttttgatgacctcaatggaaaacctggatttcagatggcaatgcagaaagcaaatggacattattatctgtacgcaaccagttttcgctggaacggaattaatattctggatgtgacagatccgaaaaatccaagaaaaatcaaatggatggaaggtttctgggcagatgacagcattcatgatggtcagagtacaccaaagattcagattgcagacggattgttgattctggcgcatggtggaactatggatgttctgcatggaacaccgaagggaaataccttaccgtattggggtggaatttctatctgggatgtggaaacagatccggagaatccaaaattgttatcaaaattccattgtggaggtggaccgggtgtacatcgcttcttttataatggtggcgattatgtgtatgttaccggttcctgtgagggatacgcattttttatcctgagaattgcagaagatgttctggtggatgattgcggatatatttattttgatacagcaaatgatggtttgtatattgtaaaatgtaccgtgtagataaaatttcataaggataaaaacgtcgcattgtttggtgcggcgtttttttgatcaaaattaagggtatgatatcttgatgaaaagcatagaaaatgtaaagatgaaaagtgtcaaaattttttatgcgaaaggaaagaacttgctaggaacagaaaaattcgctatggtataaaagatagaactgacaggtcaagaaggtaggtgagcgcagatgccgaaagtgataagtataggaaatcagggctttgaggatatccgaaaagaaaatcgtttttatgtggataaaacggaatttatcagggagtggtgggaatccggagacaatatcacgcttattatgcgtccacgccggtttggtaagacgttaaatatggatatgctcaaatgctttttctcaaatcagtatgcagatcgtgaggatttatttgagggacttactatatggaaggatgaaaaatatcgcagtattcagggaacgtatcctgtgatttacctgtcttttgcggatgtgaagcagacaaattatgcagatgcagtgaaaaaaataaaaaggattttgtcggatttataccagcaatatgtatttttgttacaggaaaattgcatgacagaaatgcaaaaaaggcagttttcggaagtatctccgcagatggatgatgtgacagcacaatgtgcactgcaagacctagctcattatctgtatcgattttatgggaaaaaagtaattcttttgctggatgaatatgatacgccaatgcaggaagcttatgtatacggttactggaaagaatttacatcttttatccgaagcatgtttaattctgcatttaagacaaatccgtacttggaacgtgcagttatgacgggaattacaagagtatccaaggaatctgttttttctgatctgaataatctgaatgtggttactacaacataggaggagtatgaaacctgctttggttttacagagcaagaagtatttgcatcgctagatacgtttggggtgaatgaatataaaaatcaggtgaaggaatggtacgatggatttgtatttggaaaaaggagagatatttataatccatggtctattacaaattttcttgataaaaagaaatttgatgcctactgggcagcgacgagttccaacagtctggtaagcaggttgattcagaccgcatcgtcggagataaaggaacagatggaactgctgcttcaaaataaagaaattgtggttcactttgatgaacagattatttttgaacagttggatcaaaatgaaaatgccatctggagtcttttactggcgagtggttatctgaaagcggtagaggttgaatatcggggattgttgagagaaaaatggtatcaccttcagattacaaatctggaaaccatgggaatgtttatgatgatgtttcgtgggtggtttgatgtgtcaaattccgtatataatcggtttgtaaatgcattgttgggtggaaatgttcgggaaatgaatgcttatatgaatgaggttgcgttggctacgttcagtaattttgacagtggaacacatccgtcatcaaaatcacaaccggaacgtttttatcatggatttatgttaggacttctggtagaattgcgtgatagatatcaggtgaaatccaaccgagaaagtggttatggacgttacgatgtgatgctgatactgcggaatgttgcagaaaatgcgatgattctggaatttaaagtatttgatgtggaagaagaatattcgttacaggataccgtaaaatctgcattgcgtcagatagaagaaaagcagtacgatacaaaacttctggaagcagggatttccaaaaatcggattcatcattatggatttgcaaaagttctgatagatggacaataataaaaatagatagataaaaagcgaggaaaacagatatgaaacagtgtatggatgcagataatttacaccgcagactgccagagt

SEQ ID NO: 13046 - DNA, 9670 bp, Unknown
  gut microbiota DNA sequence
cacttcatttttgcgggctgctgtaatcagcaaatgtggaagaatggataaggccatatctttgaatgcaatggttgcgccatggaacagctccagataataagcaccatctgcttctactaacggtgcgatttccggtgtgtcaaatttggaatcataagcacgatcgatacagtttttcagttcttcctctgtaaaatctgtcaggaatcggctcataacttcgtatgcagtctcctgataactcatttttgccagttcctctaccggaatatccagtttcgggatttctgtcggcacatacaatcctccatgctttgccagtccgtttaaaattgcctgggaggcagttactttctctgatgcatctctggtatttgcatataaaattgccataatttcttcctttctgtctgctgtctcgctttttctactctcacataaaattttcatccggtatttccacaattttctcctgatcatacgcagaagctattgttctggaaaacacctgacagatcacaattattttcgtttgctgttaatataatttaccagaccttcactgtcaatgattttctgcataaatggtggaaaagcctgtccctgatactcggttccttttgtacggtcatagattttaccactgtcgaaatcgatttctaccgcatcaccttcctcgatctcacgggatgcttccggacactcaatgatcggaagtccgatattgatagagttgcggtaaaaaatacgtgcaaatgtctctgcaatgatacagctgacacctgctgtctttaagcataatggtgcatgctctctggaagaaccgcatccgaagttctttcttgccacgatgatgtcccccggctgtacacgctgtgtaaaagtcggatcgatgtcaaccattgcatgagttgccagttcctgagcatcaaatgaattcagatatcttgccggaatgattacgtcagtatctacgttgtcaccatatttaaatacatgtccttttgctgctttcattatttgtcacctactttctcaggatttgcaatataacctgcaatcgcactagctgctgccacttccggggatgccagatagatcagggactctacatctcccattcttccgacaaagttacggtttgtggtagatacacatttctcacccggagccataacacccatatgaccgcccatacatggtccgcaacttggtgtattaaatgcacagcctgcatcgataaagatatcaacaagaccttctttgatacattctttgtatacttcctgtgtagcaggaacaaccataacacgtacatccggatgaacggtatgtccttttaaaattgctgccgcctttctcatatcggaaatacgtccgtttgtacatgatccgatcactacctgatcgatcttgatcggctccatagcctctacttcatcaattgtctttgcattgcccggaagatgtggaaatgcaacggttggacggacttcagacagatcaatctcaacgacctgatcatactgtgcatcttcatccggctcataagtggtatactgtttatccgaatgagcgtccatgtaagctctggtctggtcatctacgataaagataccgtttttagcacctgcttcaatggccatgtttgccatagtgaaacggtcatccatggtcaggtttgcgataccatcgccgacaaactccatagatttgtataatgcgccatctacaccgatcttgccgatgatgtggataataacatcttttccactgacatacggacccggttttccagtcagtacgaatttaatcgcggacggaaccttgaaccagagttctccggttgccatacctgttgcgatatcagtagttcctacaccggtggaaaatgcaccaagtgcaccatatgtacaggtatgagaatctgcaccgatgatacattcaccggctacaacgattccatactccggtaaaattgcatgctctacaccacattttccttgtaccagataccatttcagtccctgctcttttgcaaaatcctgaatagatctggagttgattgcggatttgatatccttattcggtgtaaaatggtccggtacgagtactactttatccttatcaaatactttgtctgccatctgtcgaaaaatcggcagcgccatcggaccagtaatatcattagccataacaacgtccagttttgcttcaattaactgaccggctgttacagaatcaagtcctgcatgggcagcaagaattttctgtgtcatagtcattcccattgtatgttcctccttatgtttcacagtaaaatatattttatcactttactgtagtaaatcaactcattaaacaatattttatcatacacattttcagaatacaagagtcaagcggatattcgcaatccgcttacgctacttgctcataaccaaatagctgctatgccgcttatcagaaggttatacattccctcctgataaagagaagccctgccctgcttattgctttacgcaatcaaagcaggaggacttccttcatttagttaaaaaagagggctgcgcatgcgcaacccccgtcttgtatttctgattagttattgattaacttatcttcgccattccagctgtaaagtttacggatttcagcaccaacagcctcagactgatgctctgctgctaatttacgcatagctttgaagtgaacctgacgtcctgccggagacatatccagtaaaaactcttttgcaaatgtaccatcctgaatatcggaaaggattttcttcattgctttctttgtatcttctgtaacgatcttcggtcctgtgatgtaatcaccatactcagctgtattggaaatagaatatctcattccagcgaaacctgactggtagattaagtctacgatcagtttcatctcatggatacactcgaagtaagcgtttctcggatcatatccagcctcaaccagagtctcaaaaccagcctgcattaatgcacaaacaccaccgcaaagtactgcctgctcaccgaagaggtctgtctctgtctctgtacggaatgttgtctcaagaacaccggctcttgctccaccgatagccagtgagtaagcaagtgcaagatccatagcttttcctgttgcatcctgctctacagctaccagacacggtacacctttgcctgcctgatactcgcttcttactgtatgacccggtcctttcggagcgatcattgttacatcaacgtctgctggcggtttgatacatccgaaatgaatattgaaaccatgagcgaacatcagcatattacctgcctcaaggttcggctcaatgtcttttttgtacatatctgcctgaagctcatcattgatcaggatcatgatgatatcagctttttttgcagcttctgctgctgtatatacttcgaagccctgtgcttctgcttttgcccaggatttgcttcctttgtaaagaccaatgatgacattacatccggactcctttgcatttaatgcatgtgcatgtccctggctaccatagccaatcactgcgattgttttaccttctaaaagagaaaggttacaatcttcctggtaataaatctttgcgtttgccattgtcttatcctccatttgcaaatgattatttaatctataatagtaacattcgaagaacctctgctcagtccggtaattccggtacgagccaattcaagaatgtcatatcctctcaacaaatccaaaaaagcatcaagcttactttggccaccggtcaattcaatcaccatggagtcattagagacatccacgatctttgcccggaaaatattagcaacagaaagtactgcctgacgctgtgtatcattgatctttatctttacaaggatcagttcacggcatacggactctccatcctgaagttttttaatgtcaattacatcttccagtttcgccagctgtttctcaatctgttccagaatctgttcatctccactggaaactactgtaattctggtaaatctcggatctgctgtcacgcctgcggaaaaactgtctatattatatccacgtcggctgaacagtccggaaatatggcttaaaacaccggaagtattctcaactaacagagataacacttgttttctcatgtgaaaaccacctttctacgttactgcacattctagcaacatctattttctttgtcaagggtatggtttacccgattttgtctattttgcgaatattttttcactttttcaatatatttataagttccccaaaagtatccagctttcggtacagtaaccgagaaagttccgcatccggctgtgacagatccgggatcataatggtacggcatccggctgcatgtgccgacatcacaccatttggggaatcctccaccgcatagcagttttccggctgaacccctaatacctcgcaggcatgcagatacacatccggcgccggttttccgcgttttaccatagatgcactgatcacatggtcaaaaaacggaagtaaccctgccagtttcagattgctgactgcctgttcctgtgccgtcgctgtaacaactgccatcgaatatcccatctggcgcaatttttccagtgtctgtggcacctgcggcttcaacggaatttcatgtgccagcatatctttcatcagatctactctctcctgacggatcgcacgataatcgacctcttctccaaaccactcctgaaactgggcaacattatacggggcaccaaggcttcgtaatttcagcacctctgacgcatccagttcatatccggcatccgcgattgccttgcgccacgcccactgataatgtttttccgtatcaaataaagttccatccatatcaaacaaaatcgtattcatacttttcctcacttttgcacacagtccacagatgttgcttctactatttatatttgctttttactcactgattttttcgatctccatatttttcggcaggattaggctcagaatgatcgctaccacaaatacaactgccacgcagtttgcggaaaatacgtctttgacgatctgcgggaaaatattccagatctccacttcactggtggatgtaaatccgataccaatggcaagggataatgccgcgatcgttacatttctctgagaaaaacctgtctttgccagcatctggataccactgatcatgatcgtaccaaacatcataatggtacatccgcccaacacggactgcggcagacttgcaaaaaaattaccgattggcggaaacagacctgcaaggatcataaatacagcacctgtcataatggtaaaacggttgactacttttgtcatattgaccagaccgacgttctgactgaaggaagtaaccggcggacatccaaataatccggaaatggaacttgcgaaaccgtcacatgccagtgctccggaaatctctttctctgtaatctcacgaccaagtccaccggaaacaagtgcggtggaatcaccaatcgtttctgctgcggataccataaaaataatggcaacggaaatgatcgcactcagattaaattccgggcgatacggaagcaggtgcggcaaagagatcagaccgccatccagcataccggacagatcgacctgtcccatgcataatgcaataatataacctacaatcagtccgaccagcacggacaactgttttaaatatccttttgccacggcattgaagatcaggcagactgccagtgtcaccagaccaagcaccagattctgtacggaaccgaaatcatcggtatagccgccgccaaaagaacgggcacctacggtaaacagggaataaccaatggctgtaacaacggatgcggaaaccaccggtgtgataaaccgcttccagtattttgcgaacagaccaaggacaccctcacagacaccgccgaccaaaacggcaccgatcatcgtcggatatccatacgtgccacccacgtaacttaagatcgttacaaaagtaaaacttacacccataacgatcggcagttttgcaccgactttccataccggatacagctggatcaatgttgcgatacctgcaacaaacatagcattctgtaacaaaaccgccagttccttaccgcttaaaccggaagccagaccgatcatggtgattggtgtcagattcgatacaaacattgcaagcacatgctgcaggccgaagggaattgccttcagcaacggcacacgcccattcaaccggtaaatatttccgatcgttgcattctcttttgatttcattttcatacctcttattttcttttttacatgctgtctttcgacagacacaaaacactctcatcataacatctatagttttgtattgcaatgacagtctgtactttcttgccaattctttgccactgtgctatgataaattgtaataattcagaaccaacacatcgatatgtttctgaatgatcacacaatttttgaattaataacggaggttttttatgatagaaaaatgggatatcactattccggaactcaccggagacgaagtgcgaagtgcatacatctgtctgccaggggcatacacattcgacaccaaccagcggtttccggtactgtacatgtttgacgggcataacctcttttttgacactcatgccacctacggaaaatcctggggactgaaagaatatatggaatacacccataccccgctgatcatcgttggcatcgaatgcaaccacagcccggatcacggacggttgcaggaatattccccttatgactttactttaccaaaggaaggcaaaataaccggtaagggcaagatcaccatggactggctgacccgcaccttcaaaccatacattgatacacattaccgaacgcttccggatcgggagcacacctttatcgcaggaagttccatggggggactgatgagtatttacgcacttttgcactacaatcagtttttttcccgcgcagcggcactctccccgtccctgtggattgcgccaaacgactttatgcagatgatccggcgttcccgcccgctttctggaagcattttatacatggactatggaagccgtgaaatgaaacagcatcgaaaaatggaccagtcttttggtcaggcggctaatcttcttctggagaaaaacatttatctggactgccgcatcgtaccgaacggcgaacattgtgaggcaagctgggaaaaacagattccgttttttatgaatacactgatgtatgatctgtaataaaatttcttacgatcatcagttataataacatgaatacaatttcatgatacctgtacatacatgcaatctgttcacacaaacgcttaaataatatagaagaaacacaaattctacccactgtgtcctaatcacttttatgattgtccgatacttattggaaggagtatttttccacatgaacatacaatattttaaaaattacagtcccgcacttggccgggatatggaatgcaaactgtacggtcagggcggacagccgatcctttttattccctgccaggacggacgctttttcgactttgaaaacttccagatgacgaatgtatgggcaccatggatcgactccggggaagtcaccatttttacggtggataccattgatacagagacctggtccaatacaaacggtgacccgcgctggcgcatctgccgtcatgaagactggttccgctatctcaccgatgagatggttccttttatccatacaaaaatgaaggaataccaatctgattacatcaataagggaatcattgcttttggatgcagtcttggtgctacccatgcggccaacctgtatttccgtcgcccggatctttttaacggattgctggccttaagcggtatttacgatgcgtcctacggatttggttcttatatggatgatctggtttatatgaactcaccagttcattatctgccaaatttaccggcagatcatccttacatggagctataccgccaccgcaaggcaatcatctgtgttgggcagggtccatgggaagaacctgtcagcacctatcagcttcgggatattcttcagcagaaacaaattccggcatgggtggacttctggggatatgactgtgcgcatgactgggactggtggtataagcaggtgacttattttgtaccacatttgctgtacgatccggtgtagctaaaagtttttgaacattttacggattttatatttttaggatatcgatttgcacttattaatgatattttattgaatacaaaattgtaacttttgctacaaataataaataaaaaattagaacacaacagatagagagtgaataactatgaaaaatgtgatttttatttctccgaattttccggagaattactggcacttctgccatgaattaaaagaaaatggcatgaatgttctgggtatcggcgactgcccttatgacgacctgcgtccggagcttcaggaaagcctgcaggaatattataaagtagacagcctcgaaaactacgatgaagtctatggtgctgtcggctactttatctggcattacggccggattgactggttagaatccaacaatgaatactggctggagcaggatgcccgtctgcgtacggatttcaatattccaagcggttttcacaatgaggacatgccgcgtatcaagtacaaatcccgtatgaaagaatattatcagcgtgtcggtattccggtggcccgttatcacatggtagacaactatgagggctgtctgaatttcattcatgaagttggatatcctgttgttgcgaaaccaaataacggtgtcggagcctcccatacgttcaaaatttcttctgatgaagaacttggcaatttcttcgccaacaaatgggatgataccgtttatatcatggaagaatttatcaacgctgagatcaattcctacgatgcgatcatcgactctcacggcaatccgatttttgaagcaggaaatgttacaccgatgtctatcatggatatcgtaaacaacgccgacaacgcgcttttctacattgtgaaagatctggcagatgacacccgccatctcggcagagaaaccgtaaaaagttttggtgtgcgcagccggttcgtgcattttgaattttttcgcctgctctctgaccatgaagggctcggcaaaaagggcgatctgatggcactggaagtcaatatgcgtccttccggcggatttaccccggatatgatcaattttgcccgtgaaaccgatgtgtataaaatctgggcagacatggttgcctatgattctacacaaaaaacagtcggtgctcaccacttctgtgcctttgcaggattgcgggatggcaaggattttgctatgacaccggatgctattatcgaaaaatacacggagcaactcaagatggtagaacgtatgccggatgcattgtcagatgccatgggaaatcagatgtatctggctacttttgataccgaagaagcactcaatgcgttctttgcggatgtaaccagattgaaagaggttgatacttctgaagaatctgaaacagcagaaactattgtagttcaagtcgaacgcacgtgagacttggtgcgtgattctggtcagcgaaagctgacatattcttctcagaat

SEQ ID NO: 13047 - DNA, 1688 bp, Unknown
  gut microbiota DNA sequence
tttatattatataaagaaaggacatgtttcctatgaataaaccaattgatttacatgtacactctactgcttctgacggtactttcaccccaacggaactcgttgcagaagcaaaacgatgtggactctccgcatttgcattaactgatcacgataccgttgacggtgtttccgaagcacttgctgccggcaaagcatccgatcttgaagtcattccgggtgtggaactttctacagaatatcacggaacagaaatccacgtcgtaggactcttcattgatcctgcaaataccgaacttcaggcagaactggcaaaattccgcgataaccgcgacaaccgcaatctgaaaatggtagaaaaacttcaggaagaaggttttcagatcactgcagaagacttgtatcgtctgaatccagataccgtagtcgcacgtccgcacattgccagatatctggtggattccggacaggtgaaagatctgaaaaccgtttttgacaaatatatcggtgacggatgtaaatgctatgtagaccgttataagatcactccaatgcagtcggtggctctgatccatcaagcaggcgggcttgcaattctcgcgcacccatgtctctataaaatgaaacgtgcagaactgaccgccatgattgaagaacttgtgaacgcaggtttgaacggcattgaagcggtatattcctgcaatcagggttctgatgaaaaggatttccgggaaatggcagaaaaatatcagttgctactctccggtggttctgattttcatggtgctaataagccgtatattcatcttggcactggaaagggaaatatggctgtgccgtatgaatttctggaagccatgaaaatttcctcatcattttaaatagtgaaggtgccaaatttatttttgtcttcccggctaacaatttttcttcatcattttatatagtgaaggcgccaaatttattttctcttcccggctaacaatcgcctggtaagaggaaataaatttgacgccatttacactgtgatatctctctttattcttttacattcttcagttagaccgctgcgccaacaatttcttactgtccatcgtagattgttgcactataaccttgtttctttttgctctgatacatcgcgtggtcggcatttctatacagctgatcgaatgaaacgaattctgatccgtcatagaaacatgcacccaaacttatttcgacatgttttccctgcatttcttcaatggcaatctcgccaacgttttcaaaaagtctgtcaaagaatttctctgctgacttttgttctaacagacccggcataaatatcgcgaactcatccccgccaagacgcaggagcacatcgttctcccgacatgatttctgtaaactttctgcaacggcgatgatcactttatcgcctaccgaatgcccatatgtatcgtttactgccttgaatttatcacagtcaagcaggcaaagtaatccacccgttctttcctgtaaaagctcattgattcttcgctctccgcttccgcggttacataatcctgtcatcagatcggtctgcgccagataaagcagacggttctctcgttttttctcctcatcgatagactcaatacagtaaatcacatgtaaaagtctgccatcttcatcataatctaccggaataaatctgctgcgac

SEQ ID NO: 13048 - DNA, 9333 bp, Unknown
  gut microbiota DNA sequence
acgttgaataatacttaatgatacctgatgatccttatttcatcagaccgtatttgatcatttcctgacgaagaatctctttgtgtgcatcctccagctcagacaacggtgctctgagcggtccagcctgcataccaagcatattcatggcagcttttaccggaatcgggtttacctcgctgaataatgcattgatcagtgggatagcatctaactgtaattttgcagcttttttgtagtcaccctctaagaactccataacaatattgtgcgcctgacgtggtgcaatattggataatacagagataacaccaagtccgccaatagataacagcggaactacctgatcatcatttccggaatacagttccaaattaccgtcacacaggttcatcatctgtgctgcctgagacagatcaccggttgcatctttgatggcaacgatattgtctacattttttaccaggtgtgcaaccgttgccggctgcagattacatccggttctggaaggtacgttatacatgatcaccggcactttgatggattctgcaacgctggtgtaatgtccgatcagacctttctgtgttgctttgttgtaataaggagtaacgatcagaacggcatctactccgtctgcatcagcttcctgagaaagctcgatggctgtctgtgtgctgttagaaccagtacctgcgataaccggtacacgatgttttgtaaactcaaccgctgcttttacaacttttttatgctcttcctcagataaagttgcactttcaccggtggtacctgcgataacaatcgcatcggtaccattgtcgatctgataattaatattggtctccagtgcatcataatctacttccagattgtctttcataggtgtaacgattgcgacacctgctcctttaaaaattggcattttctatgtcctccctgtctttttttacaattctcaacaaacaaattttacataaaataagaaccagcgtgcgcactcgctggttcctgaaaatctttcttaattccaaaagagttgattcctttattccagtgatagcgccccatcgtttccgatgacagtcacagtgttcttcacactgtgcccaagtaacacacagccgctcctgtatatcctttcggcatgatttccttttgactgccctcatctgtgatacggtacatacggcagtttactcataaatcatgcaacctctatctcactactgtctcatttgtgttcaatatagcactttcctataagaatgtcaacctttatgatttttatttatatcctttttatgatatgacgggattctgtcacttatccttcttttttaatacagatttcgtacacatcatcagcctgttccatgatcccgtcactgatcacctgaccggtcatgatcatatgcatgtcatctgatttcattgccatcaactgaagaatctcttcctccggcacaatgttctgatccagaagtcccaacacttcatccaggatcaggatatcacactcacctgtctgcaacacctttctagcataactaatgccatttttcatattcatctgctcttccaactgttcttctgctggcaattctctgtaaaacttctccgatttctgaaaacgaaacagacgaatttccggctccagccgtcccagaaaactgatctcatcctcatctttttgttttaaaaactgaataacgatcacggactcacctttactggcttcatgaatggcatatcccagtgctgcggaggtttttccccgtccttcaccataatatacctgtatttttcctgtactcatagtctcctcctttgaagtcacatacgaacacactacgtgaactctccgtttcactcatccgatcccaacggatttcatgaactgtgaactaagatagcacatttgttaggaaaatgcaactatcgtatgaaccagatctgttgcttgagccgaatgcaccgtacgagccggatagtacgctagtcattctccagcagatctactttgctcacggatacctcataagctacccggtgctctacattttcctcatcaatccgttttacatattcccggctctgtacacgtcccacgatctgaatatggcttcctaccgtaaacccagaagcaaagcgggcatttctgccccagcagatacagggtatgtagtctgattttccataagaacggttgaccgcaagcaacacatccgcgatttcacgtcccaacggtgttttccggtaaatcggctccttgcagatgtatccatccagaaaaatctgattcgttttctcattttcatcaatctcatccaaaaattcaagttccctcacaaacaccgacagaacaaggcggttctttttctcttcatggcgattataggaacggaactgtcccgatacccgaatcagctgtccggtgtaatcctgctctgtatcgatcagtcgttctgatatcatcagcggaatgtaatccgaatagttactcagacggttcactgccagttctaccatataaaatccttctccaaacacctcatgactgaactgaaactccgaaacaatttctcccatcatcgacacctgattgttctcaaataatttatctgtcatctttgtaagctcccttcttcacatgtactttctttgtgctttcaatttattccagtttttcatttttagaactcaaaaccacttttttctgccggcaaatacaatctaacatgaaaaacttgcgattttacgaaaaaaatgtcgacaaccttttcattcttcctcttgccaaatctgaattttgtgataaaataaattggttgcactaatgaatactatatattttctatcatttagataggaaagacttaacaactgatctattcagaaggaaggatacatgtaatgaaaacaaagagagaggacattagaaatattgccatcatcgctcacgtagaccacggtaaaacaacactggttgatgagctgctgaaacagtccggcgtcttccgtcagaatcaggaagtgcaggaacgtgtcatggattccaatgacatcgagcgtgaaagaggaatcacgattctgtcaaaaaatactgcagtattttacaaagatacaaaaatcaatattatcgacacaccaggtcatgccgatttcggtggcgaggttgagcgtgtactgaaaatggtaaacggcgttatccttgtggttgacgcatttgagggcgctatgccacagacaaaattcgttctgatgaaagcattagagctgaatctgccggttatcgtctgcatcaacaagatcgaccgtccggaagcaagaccggatgaggttatcgacgaagttctggaactgtttatggatctggatgcttccgatgagcagcttgactgcccgttcgtttacgcatctgcaaagaacggttacgcaacattagatctgaacgacgagccaaaagacatgatgccactgtttgagaccatcttaaactacattccggctccggaaggtgatccggatgcaaacacacaggttctgatcagtaccattgattacaatgagtacgttggacgtatcggtgtcggcaaagtcgacaacggatgcctgcgtgtcaaccaggatgccatcatgctgaacgcacatgatcctgagaaacagaaaaaagtccgcatcagcaaactgtatgagtttgacggattaaataaagtagaagtaaaagaggcaaagatcggttctatcgtagcaatctccggtattgctgatatccatatcggtgatacgatctgtgatccggaaaatccggtagcgatcccgttccagaagatctctgagccgaccatctccatgaacttcatcgtaaacgacagcccgctggcaggtcaggaaggtaaatacgttacttcccgtcacatccgtgaccgtcttttcaaagagctgaacaccgacgtttctctccgcgtagaggaaacagacagtgccgacagcttcaaagtatccggtcgtggtgaactgcatctgtccgtcctgatcgagaacatgcgtcgtgaaggttacgagtttgcagtaagtaaagcagaagttctgtaccataccgatgaaaatggtaaaaaaacagagcctatggaaatggcttacgttgatgtaccggatgaatttaccggtgttgttatcgaaaaactgagtcagcgtaaaggtgagctgcagaacatgggaagcatcagcggcggttatacccgtcttgaattcaagatcccgtcccgtggtctcatcggttatcgtggcgactttatgacagatacaaaaggtaacggtatcatcaataccatcttctgtggttatgagccgtaccgtggagatatccagtatcgtaaacttggttccctgatcgcatttgaatccggtgaatccgtagcatacggtctgttctccgcacaggagcgtggttccctgtttatcggacctggcgagaaagtatattccggaatggttatcggacagtgctcccgtgcagaagatattgagttaaatgtctgcaagaagaaacatctgacaaatacacgttcttcttctgctgatgaggcgctgacactgacaccgccgagagtactcagcttggagcaggcactggatttcatcgatacagatgagctgctggaggtaactccggagagcctgagaatccgtaagaagattctggatccgactttaagaaaacgcgcgtctttcaaaaagtagaattattttgataacgcgacaggtagtgaacaaaaaagagcaaaaaagcatccgacagcctgagacggcttgccggatgtctttttgctcttttttgaatttacgttaattataatgctttgattctctccagggcagcaagtgtattttcatatgttccaaatgctgtcagtctgaagtatccttctccactcggtccaaatcctgatcccggtgtacctacaacgtttgctttctcaagcaggtaatcgaagaattcccaggatgtcatctgatccggtgtttttaaccagatgtacggtgcatttacgccgccgaatacttcaaatcctgcgtcctgcagtccgcctttgatggctgctgcatttttcatgtagtaagcaacctgctcttttaactgtgctttaccagcctcgctgtaaactgcttcgccggcacgctgtacgatgtacggagcaccgttgaattttgttccgtgacgtcttgcccacatctgatgtaaggaaacatctccgcatttcaggtctttcggaacaactgcgtatcccagacgaacaccggtaaatccagcgttcttggaaaagctctttaactcgatcgcacaagttcttgcgccttcacactcataaatggaatgtgctacattgtcctcggaaatatatgcttcatatgcgccatcataaatgatcactgcaccaatcttgtttgcgtagtttacccactcctgcagctgatcttttgtgatcgttgttcctgtcgggttgttcggcagacacagataaatgatgtctggattctccttcgggaactccggtacgaaattgttttcttttgtacacggcatgtagatgacattgctccacatctctgtcttcggatcgtatgtaccggttctgccagccataacgttggaatccacataaactgggtaaaccggatcacatacagcgatgcggttatctacagagaagatctcctgaatgtttccggaatcgctttttgcgccgtcggatacaaaaatttcatccgcgctgatgtcacatcctcttgctttataatcgttgtctgcaatggctgtacgcaggaactcatatcccagatccggtgcataaccatggaatgtctcagcatttcccatctctgttacagcattgtgcattgcatcaataattgccggtgccagtggctgtgttacatcaccgataccaagacggatcagtgttttctccggatttacagcctgaaatgcacttacttttttcgcgattgtgctgaacagatagctgcccggaagtttctggtaattgtcgtttactttaaacatatttacaactcctcactaaaatgtatctcatgttgcaagattccactcagcgtatgttgagattctcattgctacataaatgtagtatagatgagataatgaatcttgttttacctgtaaaatcgttcctagtataacataactaacacagaaaaatcaaccgcctgacacttttctgttgtaaattgtcaccgtaacataaacaaacggaaactttctctgaaaatctgcatatttttccaaaggaacgttcttttgcaggcatactcatcatcctattttcacttccccggaaaaaatttcttctgccggtccggtcagatacaaatgcctgcttctggttccataagtcacccgcagttctccacccggaagtaccacaacaactgacatggcacattttcgcatcctcattgccgcggctaccactgcacaggccccggttccgcaggcttttgtttccccgcatccacgctcccagacacgcacaaaaatatgtcctgcatcctgtatccatgcaaattccacatttgttccatttggaaatgccggatgatgctccatttccgttccatacacttccattggaatctgatccagttcctctttcttattcaaaaaaatgacacaatgcggatttcccatagaaacaccggtataagaaaaacgggcagatatgtgctccggcacaaattcaggtgtgcccatatccacccgaactgctgttacagccactctgtccgttcctttatctaaacgcaactgacgcacaccggcgtccgtttcgattctaagattctcctgttctgtttttccatggtcagatacatattttccgatacatcgaataccatttccgcacatctgcgcccggcttccatccgcattacagatcagcatccgaaaatctgccacctttgatggcagcacacagatcactccatccgctccgatcccataatgacggtcacaaagcttctgtacccgttctgcattcggccatactggagcgtgttcactgtccccattttcaagacaatcaaagatcagaaaatcatttccaagaccatgcattttaacaaatttcatagaacctctcccggaatacatgcctgtatgccaatgatcaaagtccatacaggctctttctctcaactatatgttattctgcgaaaaaggttcctgatcactccccgcctatcgcaccgggagtcttctcatctctatatgtattatcacttttttacgccatcaaagctgttactgatccagcataccaagaatcatctgtgccgtttctgtaaaactggttccattgtccatactggtcttttgcaggtaacgatgtgcttcgtcttccgtcatctgatttcgttccatcagaatcgcctttgcccgatccaccagttcctgttcttctttcgttcgttttcgtggagcctgacggcgcttccgccgtttccgttccagattgtacgaaaccatttctaccgtagataacagttcgtggattttcaacggaactgccagcccaacaattcccggtgtcccgttttccacccactgatccttcgtggagatcacgatcgtatcaaatcccggtggcagacattccaccagttcctgatagatcatatcggaaagcttgtaagtacagacgacaatgccatcctgcagaccatttgcttcctggatcacctgcgcaccattcgtacagacacacacaacctgatagccgtttctgaccagtacattcttaatgttttttccgttttctgctttcggaaatgcaacaattatccttgtcaaaactcaaccatccaccttttagaatttgtccagatactcatctacttcccactgtgtcacagctctgcaataccgatcccactcatctttcttggaattgatatatacgttactgatatgttctccaagcacatcctgaataaatgcatcctgttccatcgcctctactgcatcactcagatttgtcggcagtgatttgatatttctctctgctttttcttcctcagacatgctgaaaatattcttctgaatattctccggcggagtaattttattcttcattccgtccagacctgctgccagacacagcgcaatcgtcagatacggatttgccgcacagtccgggcttcgaagctcaatacgtgtgccgccgcccactgcagacggaatacggatcaacggacttctgtttctcacagaccacgtaatatgaagcggagcctcaaatccggaaaccagacgtttgtaagaatttaccagcggatttgtgatcgctgtcatttcataaacatgtttcatcagaccaccaataaaataataagcgtcctggctcagtccaaatttatcattctcatcagcaaaaatatttttgccgtcttttctcagagacatattgatatgcattccggaaccgctgacaccactctttggctttggcataaatgttgcatgcataccatgacgtttcgcaatggttttgactgccagcttaaatgtcataatgttatctgccgcatgcatcgccggctcatatctgaaatcaatctcatgctgtcccggagatgcctcatggtgggatgcctcaatctcaaatcccatatcttccagcgtcagaaccatatcacgtctggcattttcgccatgatcgtttggtcccatctcaaaataacctgctttttctgttgtgtctgttgtcggacagccgttatcgtccgtattaaacaggaaaaattcacattccggtcccacatcaaacacatatcccatatcttctgcttgtttgatcactttctgcaaaacataacgtggatctccctcaaacggtgtaccgtccgggcggtaaatatcacagatgatacgtgctaccttgccctgctgcggtctccatgggaaaatggtaaatgtatccagatccggatgcagatacatatcggattcttcgattcttacaaatccctcaatggatgaaccgtcgaacatgcaacggttatccaacgctttttccaactggctgcttgtaatggcaacatttttcatattgccaaaaatatcggtaaactgcagacggataaattcgacatcttcatcttccaccatctgcataatgtcattctttgtatacatggcgttcctcctgtcattttatcaaaactctaattcaaagccagtatttaatacttcttcaggttttattcgatactttttcgctctgaattattaggttcattatactgatt

SEQ ID NO: 13049 - DNA, 8288 bp, Unknown
  gut microbiota DNA sequence
atcctcgcggagcatttatctcagtcggagattgaactcccactgagaaatacttgttactactcaccacttacagaagtgggagtctcaactcagactgagataaatcttctctacgtataaaaagaaatcgggaactcttttcctggcaggcgattgttagccgccgggacaagagttcccgatttcgtatcataacctaaattttattaacttaagaagctataaagttcaaactagaacattaagattccaccgatagataagaataacggtgcgaatactaaggacacgattgtcatcagtttgatcaggatgttgatagacggacctgatgtatccttgaacggatcacctacagtatcaccaacaacggctgctttgtgcggctcgcttccttttccaccatgatgtccaccctcaatgtatttcttagcgttatcccaagcaccacctgcgtttgccatgaagatagccatcataacaccagtagcaagtgcgccggcaagaagtccaccaagagcatccggtcctaacaggataccaacaacgatcggaactacgatagcgatgatacccggaagaagcatctcttttaatgctgcctgtgtagaaatacctacgcaggatttgtaatcaggtctgcttgttccttccaaaattcctttatcagctttgaactgacgacgaacttcctcgatcatcttgtaagctgctttggaaacagcttccattgtgatagcggagaacaggaacggaagcattgcaccgattaacagaccgatgataacggtcggaaccagtaagtcgatcttgcttaagtttacagcctctgcgtaagatacgaacagagataatgctgtcagagctgcagaaccgatagcgaaacctttaccgatagctgctgttgtgttacctacagaatcaagagagtctgtgatctcacgaacgctctcatccaatccggacatctctgcgataccacctgcgttatctgcaatcggaccgtaagcatcaacggcaactgtactacctgttgtagcaagcatacctactgctgcaagtgcgataccgtagataccagcgaactgatatgctgcgaagataccaactgcgatcaggatgatcgggattgtacaggagtgcatacctactgcaagaccgctgatgatgtttgtagcggcacctgtctcagactgctcagcgattttctgaacatgtttgtagttatcagatgtataatgctctgtaactgtaccgatcagtacaccaacaatcaggccagcgatgatagcgccacatggaaggaaagatccaagcagcggtttggaaagaatgattgcaacaataactgtgatcacgtttgcaatgttctcaccaaatttcagtgctttatgaggatcagaaccgtctttaccacgtactaagaatacgctgatgatggatgcaatgataccaactgctgcaatcagaagcggatacagtgcaccaacgatcgggttagctgcggatttgtaagccagcagaccaagtgtaattgcagatacgatagaaccaacataagactcgaaaaggtcagctcccataccagcaacgtcacctacgttatcacctacgttatcagcgataacagccgggttacgaggatcatcctccggaataccagcctcaactttacctaccaggtcagctcctacatcagcagcttttgtatagataccaccacctacacgtgcgaataaagctacggaagaagcaccaaggctgaatccgaacagaatagaatcattttttgtaacaagataaatgatactgacaccaaacagtccaagacctactacgcaaagtcccataactgcgccaccgcggaatgcgatcggcagtgctgcggacatacctttttctcttgctgcattagcagttctaacgtttgctcttgtagcaacattcataccgcagtaacctgcgatgattgagaagaatgctccgatgatgaagcagatagctgttgtccagctgattgcgaatccaactgcgacaaatacaactacgataaaaataacgaggattttgtactcagacatcaggaatgcctgtgcaccctcatggattgctgctgcaatttctttcatacggtctgtaccttcagactgtttttttacgttggcagctaatccggcggcaaccaataatgcgatgatgccgatgattggaataataaaagcccaagtcatgatgtattaactctcccttcaatgattcgaagtatgtatttcgatctcccatacttcattttgcatcaacaaactctgcataattcataaattgccacatttttcatataaaaattctaaaaatgatggcgcacttataaacgcctgcaaaattgtctaggcactatactagcataccaaaaataaatttgtcaacgattgttatctttttatcagtgtaaatgtgcaaattcaactatttctttttcatttttttcttcgttttgttcaatattccgatgcttttttccatgtttttcaatttttctcttgcatttacacgtttttacaggataacgctttttcgttaaccagaaaaaaattggtatttcagtgccgtgcatgatacaatatgcaaagacttttgtccctattcttcgggataaaaaatgatcatttactcagaggagaatatttatgaatcagaacattgcaacagaacttactcagtttatcaaagaaagtccttctgcatttcatgcggttgcgactatgaaaaaagaatttcttaaccacggatttacacagttacaggaaaacgaaagatggaatctgaacgccggcagcagctattttgtcacccgcaacgattcttccattatcgcattcaccattccggaaaatagctttgacggcatgcgtatcatggcaagccacagcgactctccttcctttaaaatcaaggaaaatccggagatggaagtggaaaaacagtatattaaactcaatgtagaacgctatggcggaatgattttctcaccatggtttgaccgtccgctctccgtggccggacgcgtaatcatcaaaaatccttccaccggaaaactggaaagcagactggtaaatgtggatcgtgatctggtgatgattccaaatcttgccatccatatgaaccgcgaagtaaacaacggttacaaatacaatgcgcagaaagatatgcttccactttacggcatgagcaccgcaaaagatacttttatgcagaccatcgctgaagcagctggtgtatccgttgatgacattctcggacatgatctgttcttatacaacagagagcgcgccagcatctggggtgcttctgaagaatttgtttccgctccacagctggacgatttgcaatgtgcattttcgtccatgaaaggtttcttgtcctcagaaaaaaacaattatctggctctgcattgtgtatttgataacgaagaagtcggaagcagtacaaaacagggcgctgcttccacatttttgcgtgatacactgcagcgcattcatgaagtacttggctacgatcgggaagattaccgtattcatctggcaaacagtttgatgctctccgctgacaatgcacatgcagttcatccaaatcataccgatatggcagatccgacaaaccgtccttacctgaatggcggtattgtgatcaaattcaatgcgaatcagaaatattgtactgatgcagtatctgctgccatgttccgcgatatctgcaaacaggcaaatgtgccggtgcagacgttcacaaaccgttccgatattgcaggcggttccacacttggaaatatttccaatacgcaggtggcactcaataccgtagatattggattgccgcagctggcaatgcattcaccgtatgagacagccggcgtgaaagataccgaatatcttgtacgcgcggctcgtgcatttttctcataaattcttgtttgtcgtttaaggaacaagatgaaaaaactccaatgccggcacgacagatttcctatcttcgctgcgccgcctatctccgaccgctcccgcgaactcaccaacagcaaaaacggctgttggctcaaacacactcccgcggtcgggctatgctcgctccgataacggaaatccgtctatcgccttgcattggagttttttcatctttgttccatttacacgatggcaccgcgtgccacgcatgcatataatttcttgaaagaataaatgccgtgttgcatgcgcagattaacatatcgaaagatgacttgcatgtaagcgcttggccgccagaacaaacaattacaaactgatgtcaagcaattataaatctgtacaatacgttttttaaactgtttttagattttgagccagaggtaagagcaaagccaccgcaacgcggttcccttgaccatataccaaaagaactgctacactgttgtcagcgacggaaaaatgaaactgtttttgagtttctcgccgtcggtaatcgacgtatagcagttcttttgtatattgtcaagggtggcgtaaatagccaatgcctttcacttttcttttctctgtgtaaatctgcgcatgcaacacaacagttattttgccattagcttatatgcatgcgtggcacgcggtgccgtcgtgtaaatggaacaaaataaaaaataactccaaaagaggataattgtaaaattttcgttgtgactgctgcatctagcccgtccgcgagagtgtgtctgaacccgctgtttttgcgggtgagttcgcggaagcggacggaaataagcgatgcagtggtcacagaaaatttttcatatcctcgttggagttagtttttatttgttccttaaatgacaaacaagaatttattttttgaccccacgggtatcgcgttttgccgtcctcagccgattcagatgaaccgccttttcttttaccataatgatctgttccgtttcaccatccaactgccatacatctgtcagcaattctccatcaccaagtcgcatacctcgcacaccaaccgctccttttttcttctccggaacatcttcggttgcaaaacgcaggaaatagtttttctgtgactggagtaccagtgttgtctccggttctgccactgccatgtacaagattttgtctccctcctgtagttttgttgcagcggtagttcgtttggacacatcaaattcactgcctgccacctgtttacacatggactgttctgtcacgaacagcagcttcttgtccataatattttccagtgcagtaatgtatacaatattttcagcgctactgtcatagttactgatattatccaccggaattcctttatcacgaaattttccatatggaatatcagcaacttttaccagatgcatctgaccattatccgtaaacagacagatttttccgtcactcatgcacggaacaatctgtttattctcactgtctgctgcttccttgtttcgctcatatacagaattgtccacagttttcacataaccgaagcgatccatcaacaatacaaccggcaccgcttctgcctctttttctttgtatacagcagcttttccgttttcgatcacagtcagtcgtggatgggaaaattcttttttcagtgctttcaactctttgatgatgacttttgccattgccgcgcggcttccaaggatttcctgatacagtgcaatgtttttcagtgtctcctcatgttctgccatcagggcttcgatctccagtccaatcagcttgtacagacgcatttccaaaatggcagtcgcctgacgctcggaaaaatgaagcatggaagctgtcttttcggaaagtttagatttgaatttgattccttccgtctctccggtgatcaggcattttttcgcctgtttgatatttttgcttccgcgcaggatttcgatgatcagatcaatgacatcacaggccttgatcagaccttcctgaatctcacacttgtcctgttcttttttcaacagtgttgtatacttgcgggttgcaagctcatactgaaactgtacgttgtgacggatcacggacaccagtcccatggtctccggtttgccatttgctacggccaacatgtttacgccaaaagtatcttccagtcgtgtcttcttatataaaaggttgcacaggttctgcgcatcggctccttttttcagatcaatgacgatacggatacctgccttggaagactggttggaaatatccacaatatcggatgtttttttcgtctcaaccagactgtatacatcattcaggaatttaccgatatttgcgccgatcatggtgtatgggatctcggtaataacgatacgctcttttcctccttttatcggctcgatctctacttttccacgcagtttgattttgccgtttccggattcataaatagaaaccagttcgtctttgttgatgacgattccgcctgtcgggaaatccggtcccggaatgtactccatcatttcttctgtggtgatatccggatttttcatatatgcgatcacgccgtcaatgatttcacccagattgtgcggcggaatgctggtcgccatacctaccgcaatgccctctgcaccgttgatcagaatgtttggcacttttaccggaagtacggaaggttccttctctgtcgcatcaaagttcgggataaaatctaccacatctttgtctaaatctgccagatacgcctgctgcgtgattttctgcagacgtgcctcggtataacgcattgctgcggcgccatcaccttcgatggagccaaagtttccgtgtccatccaccaacggcataccatatttgaagtcctgcgccataacgaccagagctccataaatagaactgtcaccatgcggatgatatttacccatggtatcgccgactatacgcgcacacttacgatacgggcggtcatagcggatgcccagctcgtgcatatcatacagcgttctgcgctgtaccggctttaatccgtcccgcacatccggcagggcacgggcaataataacactcattgcatagtcgatatatgatttttgcatgatctccgaatactcagtcctgataatctgctctctgttttctgccatgtttctctcctacaatcactattcagggttcacctgcgaatcctgatccggatcagacaaatattcttttttgtttctgatctggatttttctactctattcgtttatcggatcattacatcatccgcttacattactttattagatatccggttctacatcgttcattttcagactaattatcctacttatttcattttcattcattagatatctaattctgcatcgttagcatgctcataaataaatgcttttcgtggcggtacatccgtacccatcagcatttctgtcacatccgatgccatacgtccatcctcaatctctacttttttcagcatacgtgtctccgggtccagtgtggtctcccagagctgttctgcatccatctcacccagacctttgtaacgctgcaatgtgaaacttccggtgtgcgtcttgcggtaacgctccagtgccgcatcatcataaagatattcttcttttccctttgacggaataactttataaagtggcggcatcgcaatgtatacatgcccctcaaaaatcagttccggcataaagcgatagaacagggtcagaagcaatgtggaaatatgcgcaccatccacgtcggcatctgccataataacgatcttgtcataacgcagtttggaaatatcaaaatcgttgccgtatccttcggaaaaaccgcatccgaacgcattgatcatcgtcttgatctccgcatttgccagtactttgtcgatacttgctttttctacattcagtatctttccacgaattggaaggatagcctggaaattacggtcgcgggctgtctttgccgaaccaccggcagaatctccctcaacaatgaaaatctcacatttggaagcatctctgctctcacagtttgccagctttccgttggaatcaaaggaaaatttctgcttggtcagcaggttcgtctttgctttctcctctgtcttacggatttttgccgctttttccgcacaggataataccgttttcagtgtttccagatttttgtcaaaaaacagctggatctcgtcaccggttaccttcgccgtaatacgggaggcatcctgattatccagttttgtcttggtctgtccctcaaaacgcggatccggatgtttgatggaaatgaccgccgtcataccgttacgcacat

SEQ ID NO: 13050 - DNA, 9924 bp, Unknown
  gut microbiota DNA sequence
ctgcccaatctgctgcagcacttcctgctccgccgacacggtatttcctgtcacgcccactccgtcagacatcagatccacatccggatcaacctgcagccgcgcatgttttttcgcataagcaaaatactgatttttcgcaatggcgcacagccacgttgtgatcttgcagctttcatcaaaacggtcaatacttcgtaccgtctgataaaacgtttcctgcgtcagttcttccgccagatccgcatcatgcgtcaatgacatcagatatttaaacaccgtctgcgcatgctgacggtatacagcatccatatcctgcacctgcgtttcccctcctttccgccaacgttattttgtttcttaaatgcactccatatcttaaccgtttcaaccagcatgaaaaaaacttacttaaacaacctgtatttttgttgttctatctattaatagccgttttctcactttcgttacagcatatttccgtttttctaattgtattttacagattattaaatgtccgttcaacctgtaaaccataaaaatgccgcgtggctttctattaaaggaaaaccatgcggcacttatttttgcttcttcctgtttggaagggattgtattacctgatatggagaaatctccatttccagtaatcagtttttttcattatgtacttacgctgcttatgcaagacctgggaaaattgtcaggatcaatgcaacaaccagagcagtaattgttgtatttaatacagttgtgataaatacatatttgtaagaatctttgatctcaacttctgcaatacctgtagcgatgatatatcccgggtttgtcggtaatgtatcaagtgtctgagatgcaaatacggatacacggtgcagagcactcatgttgatacccatgcttgcgaatgtctctgacatgtacggtaatgtagcggacagacctgcaggacctgatccggatgcaccagtcagtaatgcgattgcaagtactaccttgaataatgccggaccacccatgtttaataatccgtttgtcagtaccgggaatgccggagatgctgctacgacaccaccgatagctccaagtaaaccaacctgaagaaccagcatagttgtctgctctccaaccggtttgatcagttctttcagtcctgagaattttccataatatgggaagaagaaaatcagggaaagaatgatgttgagcatcatacttactaaaatgttccatccaagtccgttaaagcagatcagtgttactgcgatcgggataatggaaagtaaccagtgcggtgttttctgtccctccggacgttttggtgtgtttggtgcaacgtcgtatacgtgtccttttgcgatttcttttttagagataatgttcatcataacgatgttcaggatcaggacaactgcgccaccgataaatccaggaactgctgctgccatcggagatgtaccaagcatctgtacagcgataacgttctggtcggatgtagtacccggcatagagcatgctgcagttgcaagtgctcctaaaacaacaccagggcccatagctcttggcatttttgctttttcaaacaagtccatagcgatcggaaataaaatgaacatcaatacaaccgggttcattccactgtaagcaagtacagtaccgattacataaattgtaaggatagcaagaatcggtttcataacaacctgctgacctgcggcagcctgttttcttgctttgattgtgaataaatcatataatgcgtttgcgatggataatgcagcaccacttgcgttatataatgcagcgataacacatcccatcaataccggaccaagcattgctgtaacatagttacatacgcttggcagcatagtgtctgtaaatgttgtcaacaggttcattccgttgaacaacgcgatcagcagtgcacataacggtgcaagaataattgtgctgattcctttgtatgcgccgtagatcaaaacagcgacaccaacaataatgcctataatacctaatgcagccatttctcattctcctcctttgtctgagtatttttatgactatacttattataaaatataaaaattctataatcaaatactaaaaattttattaaatcatatcaattttgatatacaacatttctgtacattcctcacatgcagaacattttcttgaaatcatcacgctcacagggaaacagcatatttttctacaaatctacacgattactacctgctgctccggttcaccggcgtcttcccatcaaacacgaaaaactggtaatccgtcactttctgtccctcctgccactggtaagagctctgaatacctttcaactgcttggaattataaaaccagtcaaccacttcctgattgccaataaactccttataattctcactggtaatgccaaactcctcataacactgacagatcgccattaccgaatcataataatctgccaccggattcgacacctgctccgttccatgacgggcgatccgataatcctgcagcaattgctgccagtcttttccctgataaaccggatcaaatttattccagatagaaatgccatccagcatatttcctgccacatcaaacaattcactgccatacgcggaaaaagaagtagaaatctgccgaccttcctccactccatgacttctgagtttcaacagaatatttccggtttccttgccacgcaccagaaaaatatatccgtccgccccctgattcaatgcctgaatggcataataggcataatcctcatcactggctccctgcctgatatccacgatcttcaaaagatgcagtcccatatcctccagacgatcctgcaaaagttccgtcgtattttcctgagactcatcctccgacatggtaaaaagcaccacatttttgatatccggatttgcctgtgaccatacccgcacttcctccagatcgcctgcctccgaatcgctcatataagagattccatacggtgccatggtatttctggattccgcaaaagaatatgccgcaatattaatagtctgattacgctccacattttttgcaatatacgcggtctccggcgcatccattggtccaagaaccagaaaagaagcccggcttgcaccctgaaaaagactcagcgctttacttttctctgaattggtattttccgaaatgatctggaccttacagccattcacgcctccattttcattcactttatctgccgcatattctgctgcccacaaggcagattttcccagagaacggtactctccgctctcctgagacagaaccaccaccggcagatacccgttttccagagactgattaattttttcttcaaaggcacttgcctgcagatcgcgctgcagggcggtacgtgataataccaccagaaacacgatcacaacaattgcctgccacactctatttttcatcgtacgcctccagcataaaccagaaacaggttcctttattcggcgtgctctccgcaccaaacggcgcatgatgcagtttcaggatctcacttgcaatattcaagcccacacccatgccgcatttttcccgttcattcggttttacctgataaaaccggttccagatatacggaagtttgtccggttcgattccgattccataatcaatgacttccacccggacgctgccctgataccgccggatcagaattcgtgcctcctttttatctccggaatattttaccgcattggaagcaaaattgtagatcacccggtagatcagacgacgatccgcctgcacctgcacatcctccatgcattccagtttaaaatgaaactccggtcggtttgcacagacactggataacacttcctctgccacgccgcgaatcgaaaataccgtttcttccatttccatcgttccggactgcaattttgccagatccaaagtatcactgataaagtttgtcagtcgatccgtctcatccagaatcatccgcacatgctcttcccttttctccggaatttccccggaaaaggcttccagcatttccgcatacatgcgaattactgttaatggtgttttcatatcatgactgacatttgccacaaaatcccgtcgcagggattccgttttgttaaattcctgttccgcctgttccagtgtatctgcaagctgtctggcttccaccggaccttcccggacaaacacagttttataatcacctgctgccatctgttgtgcactcttattcagatgctgaaatggtcgtgaaaaatgtattgccagacagatagacagaatcgatgccagaatcagcaccgtcactgtcaccagcaaataccgactggtcagaagccgcatcagtgcatccacatctgccagtgatttgcttaccaccagcacttctctggcgccgtcaatatttgccagcaccactgcctgaaccacccaattcgatatcctgacatcatcttttacataatactgacagattccatccgactcatccaaccgctgaaacagcgtctcatctacaatatcatcctgctgcggcgccgcattttctccctgattgtttaccgacagcaacacctgcatatctttttccgatacaatctgaacaaaataatcattcgtcttcgccaaaaaagcgatatttgcctcaaaatcttcctgatcgtacatatcccagatagactgtgccgccgccttcaggtcattttctgcctgttcctgatattttccctgtaccgaaaaatgtaacaccatccagaacatgatcgccattgcgcctgcaagtcccataaatccaacccacagaccaaacatcatcttatgtttctttctgatcagcttcaaatttatatcctgcccctctgtatgttacaatgtaggtgcgatgttcccctaaggcatgccgcagcatcttgatctgtgcatccaccgtccggtcatctcccatgaaatcaaatccccacactttttccagtaacgcgtctctggaaaaaacaatgcctctgtttctcaccaggaaaaacagcagatcatactccttggggcgtagttccacacgcacaccatccacaaaaacttcccgcgcagacacattgacagaaagtccctcaaattcgtatttttctacttcctgatatgtgccttccgtttctgttttctttttatttttctgattccgctgcaagatcacaccgatccgcgccatcagttcacgaatcgaaaatggtttcaccacgtaatcatcaattccaagttcaaatccctgtagcttatcatattcctctccttttgcggaaagcatcagcgcaggaatatctttgatctcccggatttttttatatgcttcgtatccgcccatctccggcatcataatatccatgataatgacgtcaaaatccttctgccggcaacgttccaccgcttcttttccgttggcagcttcctctacttcatatccctgatattctgcaaattcccggattcccatacggatcgatacttcatcatccaccactaaaattttcgccattgtcccacccccatgatactttgtatcataacttttatgcgataattttgcaacttgtagatgcttctcctgttatcatagccagcaaaatattgagtaccgactgctcctccggttgtttccatgccgccgcgatctgtacggaatgttccaacggacagcactgaaatccctgtgtatacacatttctcacccatgaattgcagacagtcaccccaagaccattttccacattcatcagaatcgattccatactgtttacgctgcagaaattcggcacaaatccatacttacttccaattgtccggatatactccgcctgcatatcttcccggtcatctgccagcacaaaaaatgtttccttccgaaaatcctccggcttccagttcttctttttattccgaaacagcgtattcgaaaacaagatcacttccggtgccgtatcgatcacaaatgtttgtgcatcataaatcttagccgcacgttcttctaatgtaataatcagatccagctgacctatctgaaaacgtgcagacagctcctgaagattataagcttccagagacaccttaactcccggatattccagacgcagtttttttaaaatcggttgaatataacttccgatattccatccgttgacataaccgatgcggatcatgcccatttccagtgcttccagacgctctacccgctcttttgcatctgccatgcactgttccactttctgaaatacattctgataaatccgtcccgcctctgtcagcgcaatatgttttccacttctgtcaaaaagctgcacattcagttctttttccagacgcgcgatgtttctgctcaaatttggctgagaaatataaattttctctgccgctttacaaaaactgccttctgctgccaccgataaaaaactttgtactaacgtgtcgttcatcatatttccccccatgcgtttttcgaacattttaagcccgtaaaatttactgttttcaccataaatctttccgtcaacttttgatgctcccatcatagcagagaattatgatagctaaatgaattttgaaaaatttttattccccatcattaccatagtcagaaaaagctcctgcaaacgtccacgtttttccctgatcctcagtcgtaaaacagattccttcctgctcgcccacctgattgatcagcttaattttatacgtgtcaccatctttttccggcatcatcatatactgatagtcgcttgcggaaaaatgcagttccgacgcatatggagataactccgttgccgaatccagcggcaatgtcaccggctcaaaagtcgcaccaccgttgtaagtcacataaatctgcgaatgtgccccggaagcgcctgccagtcccgcaaatccaaactgactgtcgaaaaactccagaccttctgccacacccattgtcccatcaaacggatcttcatttatttttgtccatgttttaccgccatctgtcgtctgattcagatcataaaacctgctgcctgcagccgcatcgacgatttccaatcgccagcccagatttttttccacataaaattccacagaaccattattctgatccacatgccatccatccgacaactgcgcctccagcgactgttctgcctcatgttcctccgacagttcactcaatggtgtatactgaggctccatcatataacgcaccggtgtgatcgtatcctccattcccggaatatagagagacacttcgtacccgctcatctctccgcctgcatccaatgcagaaaaatctgtctctccactgacgacactgtcaccatccacatctcccggcagatactccaatccatcactggttgtaaaggaacgaacaccataatataacacaccataggtcacagtttttcccgatgtcgcattaattgctttctgccaccgactgacatatttctgacaatctgcaaaactcaaaatacggatcatcggttgcaacaaatgatcagaatcataagatccactggtatagccatccagatcaactctgattttgtcactcttggttgcgtcataagaaatcagaaatgttctgtctttgtcattcttatctcttccatataaaaaggtattcaccttctgcacggttccacgttcattaaaaataatttttacgccatcaccggcaacgtataattccttcggcagatcaatcttcttgccaatatcatccagcaatccctgcacaccattgttgaaaaaattatcatgatcataagaaacatactgaaccgtctgcttttcctgcagcttttctgccagccgtccatgtcccggaatcgcagaataaatcacacctccgacagcacagccgcttccgatcagaatgattaacagtgagatccagaaagaaaatcctctttcctgtgtcagacttccatttttcttcaaataagcagtcagcacgctccatatgatgatactacagatcaaagccgctccgattgctccgataatgatcacactgagccgtctgccgccatactgacatacatgccagacctgaaatagcagtaacaggtagcatacaatgttcaattttccacaaatttttcttattgcactcacttcaaaatcacactcctgcttttcaaaatcccaaaaatatctctgttttctatcctactaataaatcaacatattttttaattatatattactttttgatagcaggaatcgcaatctcactttttgtattattcaaaatatcatcacactcaaatacgccacgctgaccacttactataatgattttccataaaccatttatagtaagatactctccatcttcacatatatttttcttagaaaatttttattcctctgtcgtattctccgtccaattcggattgtaaatagaataaccgtttcgaccgcctctctttgtctcatacagtgcctgatccgcatgtcgatacagctcaataaacgtatttccgttatccggtgccaatgccacaccaacactgatcgtaatactgcggttatccatttcctcaatcttcatttccggaagattcttcaacagattatgaattctctgctctgccttgtcccgatcagaaatattgcgcattaaaatgacaaactcatcgccaccgatacgtcctacaatatcatcttcccggaactggccctgcaaaaattttccaagcatacttaagactttgtcacctacaagatgaccgtaactgtcattcacgctcttaaaataatctacatccagaatcacaaaaccatgctgtccagattcctgctgtaagattcgttcgataaatttctgtgtgtagtctttgttatacaatcccgtcaaagcatcacgctgtgctactgccagtaattttaccttttcccgattatttttacgtgcaatataaataactaaaatacctactaacacgcaaaataccaacatgaagatcatttcatattcctgaataaaagcataggatttctgcgctgctttgaccggaacaatataacaaagcatccagtcattcattccgattggcatataagtcatatagtagtcctgtgcacttgtattatccaaacctaagcgaataaaaccagattcacttgcaataaaatcatcctgcacctgtgccagtgtatcttcctgatttttatttttctctgtgtaatatgtaaataaattatcaccatattcaatctgttttttattaccatttccatcttcataggtaataatttttcccgtatgattaacgatcaatgtatcgccttcaccatcaaatagatcatcaaacagcatatgacttaacattgttacattgtaagaaccgcctaaaataccgattatctgctgatttttatcatataccggcaccccaagaaccactcttgtttcctgatcaacactactctccagcggatcacttaaggtctgctgtccattaattgcttctttgaaataccgtctgtgagaaacattttttacaacaccattgtcataatatgccgttccatccggttcaatcaatgccgtccgctccagatctgttgattcataaatattgatcaacttatccaaatgctcctgagtaatcagctcctcatcctgccccatttcttttgccaacccattcaaatactgataatgaattgctaaaatagagcgcaaatgttcactctgacgttttacattattcatcattgttctctgtgaatttttctccacagaatgctgtactccggcaaaaaatactaaaatgccaattaccaccgcaataatgaaaacaccagttgccacaatataattttttaactgcgatgtcttttttctcatatgtttatcctcacatctttggtcttattaattcctat

SEQ ID NO: 13051 - DNA, 3213 bp, Unknown
  gut microbiota DNA sequence
tctccaaaggagaactttcctataaagtaaaaaaaagactgaacagcaaaaatccattcactctctcgtacgttcaaattttatttacaccacaaatttacaaattaatcccaaaacagacatcccgtttctttcgaactcagaatgtctgtttcaacttttatcttattaacaattacaatgcattatgcctctaacagtttttccacacttgcaagttttgcacaaacgataaatacctcgcaggcctctttcagttcttccattggcggaagtgtcggagcgatacggatcacggaatccttcggatcctttttgtatgggtatggtgcgcctgcacctgtcagtacaacaccagcctcttttgcttttgcaacgatgttctttgcacatccttcatttgccttgaaggtgatgaaatatccaccattcggacgaatccagcttcctgcgccaagacctttcagttcttcctcaaaacgatccaggatcatctcaaatttcggacggatgattgctgcatgttttgccatatgtgcttttacgccatcaatatcttttaaaaattttacgtggcgaagctggttgatcttgtcaaatccgatagtctgaatggtcagacgtttcaggatgtctgctttgttctcaagacttgtgatcagtccggatacacctgcgcctgagaatgtgatcttggatgtggagcagaactcgatcggaaggttcgggtttccggctttctcacactcgccaaggatctcaaggatctgatctgctttgtcctcatacagatcatgtacacagtaagcgttatcccagtaaatacggaaatcttctgctgccggttttaaacgtgccagtctgcggacggtctcatcggagtaagatgttcccatcgggttggagtatttcggtacacaccagatacctttgatgctgtcatcttcgctgactaatttttctaccatatccatgtccggaccatcttcgtaaagcggtacgttgatcatctcgatgccaaagcactctgtgatggcaaaatgacgatcatatcccggaactggacagagccattttactttgtcaagtttgcaccatggcgtgcttccgtttacaccaaacagcatggaacgtgcaatgcagtcatacatgatgttcagacttgcatttccgtaaacaatgacattgtcatatgcttccgggccaagtccaactaaacttgcgatgaattcctgtccctctgtaataccatcgatcacaccgtagttacggatatctgtaccggctctgctgactaacggagtctggctggtcagaacgtccatcatcggcatggacagctcaagctgctctttggatggttttcctctggacatatccagcttcaagccttttttgcagatttctttgtactgctgttccaggctctctttttcttttaataattcctctctgctcatttcctgataagactgcattgatttttcctcctgctgtgtattattaaatcattttttacaacttctttttattttatattcaaaaggagatttgacaaaaatttactcctgtttgatttttttaaaatattcccgaatggtctgctcatagccgttttctgtcggctcatagaatttcatatctttgtatgcatccggcagatactgctgctccacgtagtgattcggataatcgtgggcatatttgtatccaagcccacgtccaagttttgcagcacctttgtaatgggcatcgcagagatacgttggaaccggtgcggttctcgactcccgaacaacggaaagtgctttgtccactgccaggtaagccgcattgctctttggtgcgcttgccacataagtgactgcctgtgccagcacaatccgtgcctccggcattccaagccgttctacagcctgggctgcgctgaccgccacagtcagggcgttcgggtctgcatttcccacatcttctgatgcacagatcataattctccgggcaataaatgtcacatcttccccggcgtacagcatttttgccagatagtagaccgctgcgtccggatcagacccccgcatacttttgataaatgcggaaatattatcataatggctgtcgccatttttatcatacttgatcacgcgcttctggatacattcggaagccacatccagcgtgatatggatgagcccgtctgcactgcgttctgtggtaaggattcccagttctatggcatttaatgcgctgcgggcatctccgtttgacacatctgccagaaattccagtgcatcttcatccgccaccgcacgataagctcccatgcctttttccatgtcctctaaggcacggtgcagcagcgttttgatatcctctttatccaacggctttaattcaaaaataatggatcgagaaatcagcgctccgtttacctcaaaatacggattctccgtagtggcaccgatcagtgtcaccgtaccgtcctccacaaacggaagcagataatcctgctgacctttgttaaaacggtgaatctcatcgataaacagaatcgtacgttttccgtacatgccctgcagctgttttgccttttcaatcacagcttccatatccttttttccggcggaagtcgcattgatctgcataaattctgcgctggtcgttttcgcaatgactttcgccagtgtggtttttccggttcccggaggtccgtaaaaaataaccgactgcagtttgtccgctttaatggcacgatacagcaatttgtctttgccgataatgtgctgctgaccaaccacttcttccagcttcgttggtcgcaatctggatgccagcggtgattctttttccttattttgttctctcatgtaatcaaacaaatccattttctgatctccatttcacgtttcatccttcaaaaatgaatccttttcatgatataaaattcatttttaactgttttcatcctgtaaaatacatggattttaaatgtttttgcatgataccgatgtgatatctttcatatccatgctatacaatacattaaatttaccggtctgacaagttatttttttgtcaaagttgcaatttctccaatttttccataatataggaagatttgtatttctgttttctacattgtgccgaagattttttccctgttttccacttataatatcaatttgaaatcacaaatcatatcataattacattact

SEQ ID NO: 13052 - DNA, 716 bp, Unknown
  gut microbiota DNA sequence
atggccgtaaaccgaatcccgggtgaaaagatgtatatcgactgggtcggtgatcagccggaactgttaacagataccgaaacgggcgagatcaaaaaagtccatatctttgcgaccactcttggagtcagcagtctgatctatgcagaagcttttccaaatgagaagctcccatgttttatagaaggctgtgcccatgctgtttcattttatggtgctgttacgaaatactttgtgcccgataacctgcgaactgctgtaaccaagcacacaaaggatgaacttatcctgcagtctacatttgcagatctggaagatttctatgaaactatagttcttccaccacccgctagaaagccgaaaggcaagcctacagttgaaaatcatgtacgttatcttgaaatacacctggttgagaaactgaaagaaaagatatatgtatcatttgaagacctaaatgctgaaataaaaaaatagtagcagtcctcaataaacgatcttttcaaggcaaggacttctcaagacaggatgctttcgaaaagtatgacaaaccatgtatgaaaccactgccaggcggatgttacacggcttgcgactataaagcggtcctaaaagttcccaacaactaccacatcgagtatgacggccactactactccgtattgtactcttactgtggcaagcctgcaatcctgaaggcaaccgcttcagagatc

SEQ ID NO: 13053 - DNA, 2692 bp, Unknown
  gut microbiota DNA sequence
gtgccatgccttgtaattccgctgacggatgaagtagaagtgaacggcattcatgtacacttgaaagatgaagaagtattaaaggcattagaacaaagtgcagaggaagagtaattttgagaagaatatgtccgcttacgctgaccagaatcacgcaccagatttcacgtgcgttcgacttgaatttgatacaacagtgaggttgaactggtactcatcataaattaggattacagaaatcaccttggctggataatagatgtccattttaggacaatggttttcttttcatagaaaaatatttactgtaagattatatgtataagacaataaatcatttaagacgaagaacaaaatgttgcattgtattgatgtgtagaaatgcaggaataaatctgtgaaagcggacatgcagggcgaaacggtagagcaattttcgttatcggagcgagcataatgttgcctccgggagtgtgtctgagcccacagctgatgttgctgtgggtgagttcgcggaaggaggcaacaatagatggcgcagcgcagatagaaaattgttcgtgtgagcctgcatgccgctttacagattaaaattccgcatttcgaccgtctgtcaacaccaaaaaaggagggcattttcatgaacaaattactgtatggggtagcgtattattatgagtatcttccgtatgaccgtttagaggaagatatcaaaatgatgaaagcagcgggtattaacgtagtccgtatcgcagaatctacctggagcacttacgaaaagcaggaaggtcagtttgatttttccacggtgaccaaggtgctggacgccatggaagaagcaggcattgacgttatcatcggtacaccgacttatgcggttccgtcctggctggtaaaaatggatccgacggttctggcagtgacacatcagggcgaaggtgtgtacggcgcacgtcagatcatggatatcacaaacccgaactatctgaaatacggtgagcgcgtgattcgtaaattgctggaagtctgccagggacgcaaatgcatcatcggtttccagctggataatgagacaaaatattatgataccgcaggtccgaacgtacaggcggcgtttgtagagtatctgaaggaaaaatttgacggaagcaccgatgccatgaatgcggcttttggtctggattactggagcaaccgtgtggataactgggaagatttcccggatgtgcgtggaaccatcaacggaagtcttggcgctgaatttgacaagttccgccgtggactggttaccgagtttttgacctggcagtccaatattgtaaaagaatatgcccgtccggatcagtttatcacacacaatctggattttgagtggcgcggatattcttacggcgttcagccggcaaacaatcattttgagattgcaagagaagcgttgaccgtggcaggatgcgatatttaccatccgacacaggatgaactgaccggcgctgagatcgccttcggtggtgatatgacacgttctctgaaacagaacaactactttgttcttgagaccgaggcgcagggttatccatgctggactccgttcccgggacagcttcgtcagcaggccttcagtcatgtagcatcaggtgcggctatggttgagtactggcactggcattccatccataactcctttgagacatattggcgtggtctgctgagtcatgatttcaaggaaaatcatgtatattgtgaggcaaaaaccatcggtcgtgatttcgcggcattgagcccggctctctgcaatctgaaaaaagagaataaagtggcaatggttgtcagcaacgatgcactgtcagcacttgactggttccgtattgatactacggcagaaggtccgggaaaaactgcttataatgatgtagttcgctggatgtatgatgccctttacaagatgaatgtggaagttgatttcattgagccgtcctgcaaagagatggatcgttatcagatggtgatcgttccggctctgtatgcggcttgcgaggcagatctgcagcgcatgaaacagtatgtggcagatggcggatacctgatcacaacattcaaaaccgcttatacggacgaaaatgtaaaagtataccacgatgcattcccgcatgtgttaaacgaatgccttggtatttcttacagcaatttcactttcccgaaagatgtgaaactgagcggtacagaggacgagcaggcagaacttttcatggaacttgtgaaaccggaaggcgcagaagtgctggcatcttacgatcactatgcatggaaagattatgcggcagtaaccagaaatcattacggaaaaggtacggcacagtatcttggatgcaagacttctgaaaaatatctgcagaagctgctggcagatgccatgaaggaagctggtattgcggatgcagtacagaacgcagaatttcctgttattgtgcgccgcatgaaagatgaaaacggaaaaacagtgtggttctattttaactattcccatacaccggcagaaactgtttatgccggagcagatggtgagtatctgatgaaggagaaccagacattcccgggagttgatgttgcagcaggggaaaaacttgcacttggcagctgggatgtacagatcatcagagaaaaataaaaatatgaaatgaggtaatgcaggatg

SEQ ID NO: 13054 - DNA, 454 bp, Unknown
  gut microbiota DNA sequence
atagcaaaatttgatattttgtgatattgagggtatggggaatcgtaatctccattaagttcgtcagagaattataatccagaaatgggattttgagttactctaggcgatacttgctttagaaaatgatttgccataatgagttagaatatgggaggaggaagcgttaaaaaaagagagagccataagcaactctctctgtgataaaatcaaaaagttatagtatcagtgattcggtaagattacaaaaatccttaacaggaatattttctttaagtggtaaagctgtctctaaaaaggtttcgtctgcaaatctttcgagttcagaatcaaaatatataattgaagcatttgtatttaattggtatggtggaattgtaacaaaataatcataatcttcgtaagaaggagtggcgcaagaaactttgatttttccgcccaatttcaattttgc

SEQ ID NO: 13055 - DNA, 195 bp, Unknown
  gut microbiota DNA sequence
gcaagtggtgagtaataacaagtctttctcagtgggagtacaatctccgactgagataaacgctccgcgggggcgcacattgtctgggagacaatggttttgcgccgaccggaacgaagtgtagatgtgcagtgattctgagaagaatatgtcagctttcgctgaccagaatcacgcaccaagtctcacgtgcgt

SEQ ID NO: 13056 - DNA, 1458 bp, Unknown
  gut microbiota DNA sequence
tacttcatcgcatgcggcaagacggactttgtttataaaggtgtggccgactttcgcaagttgcttgacgacaatggttataagtacgagtatcttgaaacgggcgagggacatatctggaggaactggcgaatctatctgacggagttcgcgccgaagttgttcaaataagaggatttggtataactaatttaataacaaaataacatacgtatcatgaaaagaatttctattttgtcagctctgttgctgatgtgtgcgatgactttcgcgcaacaagctctctggggcggtgcccccgtggtatcacctgagatacacgacaacaatacggtaactttccgcctaaaagcgccgaaagccgtaaaggtgcaagtgaccggcgacttcctgcccacgcagaaaatcaagactcccttcggcgagttcgacggaccgggtgtggccgacttgaaagagaacaaggacggtgtgtgggaattcactactcccgaaccgctgaaaccggaactctatagctacactttcctggtagatggcctgaaaatcaacgacccctccaacgtttatatgattcgcgacgtggcaagcgtgacgaacgtgttcatcatcggcggtgacgagcgcatcgacctctacaaggtgaataaggttccccacggaacggtatctaaggtatggtacaacagccccacgctgggtatggaccgccgcctgactgtctatacgcctgccggatatgagacaagcggcaagcgctaccccgtcttctacctgctgcacggcatgggtggcgacgagaacgcatggagcgaactgggacgtacggcacagattctggataacctcatcgcccaaggcaaggccaagccgatgattgtagtaatgaccaacggcaacgccgcattggaagcagctccgggtgaatcttcactgggctttgccgctcccaacatgaatctgcccaagacgatggaaggctctttcgagaccgctttccccgacgtggtgaaattcatcgacaagacttaccgcacacaggccaataagaaggggcgtgccattgccggtctctctatgggtggttaccactccatgcacatctccaagcaatatccggatatgttcgactatgtagggctgttctccgctgccatcatgcccaacaaggatgtgaagtctccgatttacgacaacctcgaagctaaactgaaaacccagtttgccaagaagccggcactctattatatcgccatcggtgacaaagacttcttgttccaagccaacaacgagtatcgcaagatgctggacgagaagggttacaagtatgaatattatgaaacaggagaaggtcacatctggaagaactggcgtatctatctgacagaattcgcaccgaagatatttaaataagattatgaagaagaatatcatatccatggcagcagcaatggctgt

SEQ ID NO: 13057 - DNA, 1484 bp, Unknown
  gut microbiota DNA sequence
aaaaggcgatgagatcatcgttcatgccggaaatgtgatcccgtttgacggtgtggtaacaggcggagacgccaccgtaaatcaggcttctctgacaggtgaatccgtaccggttgcaaaaacaatagattcctatgtttatgccggtactgttctggaagaaggtgagctgatcatccgtgtagaagcaaccggaggtgccacaaaatacgagaagatcgttaccatgatcgaggattccgaaaaactgaaatccaatctggaaggaaaagcagagcatctggcagacaagctggttccgtatacattaggtggtacgttactgacttggttactcacaagaaatgccacaaaagcattgtctatcctgatggtagacttctcctgtgcgctgaagctggcaatgccgatttccgtgctttctgcaatccgtgaggcacagcagtgtgacattaccgtcaaaggcggaaaatatctggaggccgttgccgaggcaacaaccatcgtatttgataaaactggtacactgacaaaggcaaaaccgacggtgatcgatgtcattccgttcaacgattcggagccggatgagctgcttcgtatcgcagcctgcttagaagaacattttccacattctatggcaaaagccgttgtgacagctgcaaaacagaaaaagctggagcacgaggaaatgcattctaaagtggaatacatagtagcacatggtatttcttctttcatcgaagaaaaacgtgtggtgatcggaagctatcattttgtatttgaagatgaacagtgccagattccggaaggaaaagaagctgtatttgataacctgccggaagagtgttcctgcctgtacatggctgttaatcagcagcttgcagccgttatctgtatcgaagatcctgtacgtgaggaagcaatggatgtcattcaggatctgcgtgacaatggtatccaaaaaattgttatgatgactggagacagcgagcgtactgcagcagcaattgcacgcaaagtcggtgtagatgagtattattctgaagttctgccggaagataaagcaaacttcgtagaacaggagaaagcacttggtcataaagttatcatgatcggtgacggaatcaacgattcaccggctctgtctgccgcagatgcaggtgtagccatcagtgatggtgcagctattgcccgcgagatcgcagacattactatcgcagcagacgatctgcatgagatcgtgacattgaagaagatcagcaacagactgatgcaacgtatccaccgcaattatcgctttatcgtagcgtttaatgcaggattgatcgcacttggtgttggcggaatcattcagccgaccacatcttctctgttacataacacttcaacactgtatatcggtttgaagagtatggaaaatctgctggatgagcaggagaaaaataaataaaagcgcatcgagataaaagcgcgattggatttac

SEQ ID NO: 13058 - DNA, 254 bp, Unknown
  gut microbiota DNA sequence
ggtcttctttttgatgctgttcaaagtgttattttccgggctttctataaagataataagtctgaatgttttactcccggatttattcttgttctccacacttttggtcgtgacttaaaatggaatcctcacatccattgtcttgtctccgaaggtggtattggcaactccggtctctggcgctccaaaaagcatttcaactatacctttcttcgtaatgcatttcgtaccgcacttcttgatcttatggaaaa

SEQ ID NO: 13059 - DNA, 265 bp, Unknown
  gut microbiota DNA sequence
ctccaaaaagcatttcaactatacctttcttcgtaatgcatttcgtaccgcacttcttgatcttatggaaaaggaacttggtgtttccttcaagaaagtgaaagcgcgttgttaccaggaacacaaacatggcttctatgtctatgccaaaccaaacaaatgcaaccctaaaatcgtcaccaaatacattggccgttatcttggtcgtccagtcatcgcaacctcacgtatagatcattacgatggtgaaactgtcacctttcac

SEQ ID NO: 13060 - DNA, 1617 bp, Unknown
  gut microbiota DNA sequence
tgcgaattacttcgctgttctcaatgaatctttcaaggttatttcactgttcagttatcaaagttctttgttttgttgccgcttagcaacttttatatcttatcagatgtttaagtgcttgtcaacaacttttttaacttttttcaaagctatttgtttttgttgtgtcactcacgcgacagcttgtatatattatcataagcacttgcgcttgtcaacaacttttttcttttattttcaactttatttctcagccctgtttttagagcaaaaaaataacggagaaagagggatttgaaccctcgcgccgcgcgaacgacctacacccttagcaggggcgcctcttcagcctcttgagtatttctccatatttttttataaaattgatgcgccgtaacgctttatctactatacaagacctttgcctttttgtcaatagctttttttaacttttttgagaatcctgcaacttcttctattacatacttttactacgaattttgcgaccaacttttaatcatattgaaaaccttatgtttcacataaacgctccttcaaaaaagtgttccgcttcgtaacagtcacattcctgaccgcataggacaatgcctttctggttcctactattaccagaaccttttttgcacgggtgatgccggtgtaaatcagatttcgctgcaacatcacatagtggttcatcaaaacaggcattaccacgatcgggtattccgatccctgcgctttatgaatggttgtggcataagcatgcaccagttcatccagctccgatgcttcatattctatgatatgctggtcaaaatttactttcagcatccgttcctgcagatccactgactccacggttccaatatccccgttgaaaatctctttttcatagttattgcgaatctgcatgaccttatccccggcacggaacagatatccgccccggcgcagaccgtctccctgaggattcaacgcttcctgcaaagccagattcaaatttgccgctccgacaatacctttctgcattggtgtcagcacctgaatatgattccacggtgttttgtaatagcgcggaaggttattttttaccagtcggacgatctcctgaactgcttcctccgggtcttctttttctatatagaagaaatccgtatttttgccattggaaatatccgggaatttgccttcattgatggcatgtgcattcatgatgatcctgctgctctgtgcctgtctaaaaatccgggtcagacgaaccaccggaaacacaccggaatcaataatgtcgcgcaatacattacctgcgccaacagatgggagctgatcgatatcccccaccagtatcagacgcattccctccggaattgctttgagcagcgcgttcatcagtatcatgtcaatcatagaacactcatcaatgatcagcacatctccctccagcgggttatcctcatttttctgatatccttccggcggtttgcactccaacagacgatggattgtctttgcctctaatccggttgcttctgtcatacgcttggccgcgcgcccggtgggagctgccagcaagattttcaatccaaacgcacggtatgcagtgataattccctg

SEQ ID NO: 13061 - DNA, 7897 bp, Unknown
  gut microbiota DNA sequence
ttctgaaaagaagatgtcagcttgcgctgaccagaatcacgcaccaagtctcacgtgcgttcgacttgaacttctacctggcatacgtcgccttataaatctcctgacaatcctcaaaggtcggcgccttccgtgtatttcccggacttccgctatccagcgcatcctgcgccatcttcggaatcgccgcatagaactcctctcgcggaattccatacttctctaacgtcggcacttcacacacctcacaaatatgctcgatcgcttttaggaactgctctgctgccgcgatatcgcccatttgagcatctgccacaccaattgcccttgcaaggtctgcaaaccgctcatacgtcccttctaatgcgaaggaaaagcatgccttcagcaccatggcattggaaataccatgcgccacatgaaacagtgctccgattgggcggctcagtccatgcaccagtgtcacactggaattgttgatgcagattccttcctctaatgccgccagtgccatctgatgtctggcttcgcgattttttccatcacgataagcaatcggcaaacatctccgatttcaccacatacggtcccgtcaccagcagcgcctttttcccgcattgtttcagatatccgaccgcctcagagaggcagtcccttccggtaaaaatatgttccggggtcagatagtgagccatgaatccacctccgttaatacttcatctacttttaccatttcctcacgcagctgctcctcggtaatgatcaacgccgggttgacaaaaatcatattttcgtgggaataggtcataaatttctttgcctttaacataccgatgatcttgcccatggttccttccggatctttgccatatggtactaacggttcttttgtttctctgtctttgacaagctcaatggatgagaaaagaccgatgtaacgaacatcaccgatacacggatgtttctctttttcttcctgtatacatacgggcgatttttaccgcattttcattggcatccgcaccggcatttgtgaaaaatactttgccgaaattatccggaagccgatcaatgattatttttccaagagttgctctgctttctgccgcataagccggtcccacaaaacagaatttatctacctgtgccttgatggcatctccgattgctttatttccaaatcccacattcaggtttacaagctgagaggacatattgggtttaaaaaaggagcccgcaccatattcggtgttggctcctttgcgctacctttatgtcttttggttagcgccattttaatttgttttttcggtggatacaaggattctaagcctaagtttttctgtgcttaagcacacataatgcaaagatagttttttatattcattctgcaaactgcgtgccatatgacatttccataatcattctgcacatctcaaccgtcttatcttttcttcctgcttcttctcaccctgaacttcgggcattccaccacctgacagcgaaaactctgcttgcaatcctgcctgcaatcctgacacatttcattgtactggatttcctgcgcctcgttcagcataaaatctgcttcgcccatgggcataccatagatcagctccgacagatctaactgttcatatgtctccgcattttctccatttgaaaatgcttcttccgtcagcagattactcttgctcatcgcctgctgcctctgtcgcagtctctgcttcgatacctttggcatcctctgcaacttcttcaccttctaaagtctcatcttctttgactttggtgatacttgctactttcacatcatcttccatgttgatcagtttcacgcctgatgtgacacgaccaaggatagaaatatcactgactttcatacggatgataatgccctcagtgttgatgatcatgatctcgttatcatcatttacagccttcacgccaaccagatttccggtcttctctgtgatcttgtagcattttacacctttaccgccacggttctgagcagtaaattcatcaatggaagtacgttttccaagtccacgctcagatacgatcagcagatgctcaccctgagtgttgagctgcatgccgactacttcatcaccgtctgtcagactcataccgataacccccatggatacacgaccggtgcttcttacatcagtctcatggaaacggatacactgaccgtattttgtcacaaggaaaatatcctgtgaatcatcggtaaatttaacctcgatcagttcatcatcttctcgtaacgtaatcgctgccagacctgtctttctgacatttgcataatcggtgattgatgttttcttaacaataccgttcttggttgccataaacagataccagccctctttgtactccttgatcggaataacagctgtgatcttctcacccggtgccagctgcaacaggttgataatagcagttccgcgggcggttctgcttgcctccggaatctcgtaagccttcatacggtatacttttccggtattggtaaagaacatcagataatggtgggaagttgtcataaacagctcctcaatataatcatcatcgatggtctccatacctttgataccacgaccgccacgatgctgtgcacggaaattatcagcgctcatacgtttgatatagccaagttttgtcattgcaatgacagtatttgtcactggaatcaggtcttccatggaaatatcgtactcatcgtatccgatggatgtacgtctgtcatcgccatatttagcactgatcaccatgatttcttctttgataacaccaagcagttttttctcatctgccaggattgctttcaactcagcgatacgtgccatcagctctttgtactcagcttccagcttctcgcgttccagaccggtcagagatctcagtcgcatatctacgattgcctgagactgtgcatcggtcagaccaaaacgctccattaatcttgtttttgcttcctgtgtcgtacggctgccacggatgatggagattacttcatcaatgttatccagcgcgatcagtaagccctgtaaaatatgggcacgttcttctgctttgtttaattcaaattttgtacgtcttgttacaacgtcttcctgatgtttcaggtaatatttcagcatatcaagcaggtttaataccttcggctcattattgaccagagccagcatgataacaccaaatgtatcctgaagctgtgtatgtttaaataactgatttaagataacgttcgggtttacgtcttttctcaactcgatacatacacgcataccctgacggtcagactcatcacggagatctgtgataccgtccacacgtttatcttttaccaattcagcaattttctcaatgagacgggctttatttaccatgtatggaagttctgtaacaacgatacggtttttgccatttggcatcggctcgatatctgtcacggcacgcacacgaatcttgccacgtccggtacgatatgcttcctcaatacctgcggtaccaagaatcatgcctccggtcgggaaatccggacctttgacaacatccaaaatttcctcaatggttgtgtctctgtcttcttctacacggttatcaatgatttttacaacagcaccgatgacttcacgcaggttgtgtggcggaatgtttgtcgccatacctacggcgatacctgtggttccgtttaccagaaggttcgggtatctggaaggaagcactaccggctctttctctgtctcatcgaagtttggctgaaaatcaacggtatttttgttgatgtcagccagcatttccatggaaatccggctcagacgcgcctcagtgtaacgcatggcggctgcaccgtcaccatctacagaaccaaagtttccgtgaccatccaccagtggataacgtgtagaccattcctgtgccatgtttaccagagcaccatagatagagctgtctccgtgtggatgatatttacccattgtatcaccgacaatacgcgcacatttacgatgcggtttgtccggtccgttgttcaattcgatcatggagtagagaacacggcgctgtaccggttttaatccatctctgacatccggaagagctctggatgcgattacgctcatggcataatcgatgtaggatttctccatggttttcttcaggtccacgtcgtggatctgatcaaatatcttgtcgtccatttatattcctctctttgatgcgggaaaaatgtgttttattttttacgaaactgttgtgaaaaaccacacgcagacacggacgattttctatcttcgttgcgccgcttatttccgcctccttccgcgaactcgcttgcaagatcagcaagctcaaacacactcacggaggcgggctatgctcactccgataacgaaaatcgccctaccgtctcgctttgtggtttttcacttccagtttctgtataaatttcaatattctatttttcccttattacgtttcgtctgtcactacatcatgtataatgtatagcaaatcagacattacaatgtctgattcatccattcgcaatccacttcgcttcttgctcatagatgttacgttcgtcaaatacatacctttttttatgccagcataacgcatgtatgtattttcctcacttgctatacatctaagttctctacgtatttcgcattggcttcgatgaagtcacgacgcggctctactttgtctcccatcagggttgtgaatgtaagatcaatctctgcagttgcagcttcgtccatggtgacacggcgcaggattcgtttttccggatccatggttgtctcccagagctgttctgcatccatctcgcccagtcctttgtatcgctggatcttgttgctggagtcacgtcctacttctgccagaatggcatttaactgctcatcactgtatgcgtaccatacttttttgtttttctccagtttgtacagtggcggctgtgccagatatacataaccctgtttgatcagttccggcatgaaacgatacaggaaggtcagcagtaaggtactgatatgagcaccatccacatcggcatcggtcataatgatgatcttgtgataacgcagttttgtaatatcaaaatcctcatggataccggttccgaaagcagtgatcatggctttgatctcggcatttccataaatcttatccagtcttgctttctctacgttcaggatttttccacgcagcggaagaattgcctgtgttgcacggcttcttgctgtctttgcggaaccaccggcggaatcaccctctacaatgtagatctcgcagtttttcggatctttatcggaacagtctgccagttttcccggaagggacattccctccagagcggtttttcttctggtcagatcacgggctttacgggctgcctcacgggcacgctgtgccagcagggatttctcgcagattgtctttgcaaccgtcggattctgctctaagaaataagtaagttgctcacttaccacgctgtctaccgcaccgcgggcttcgctgtttccaagtttctgttttgtctgtccctcaaactgaggctcagagattttaacactgatgatagcggtcagaccctcacggatatcctcgccggaaagtgctgcttcgttttctttcaccagtttgtttgcctttgcataagagttaaatgtctttgtcagggcatttctgaatccggccagatgggttccaccttccggagtcgtgatattgtttacaaaactgaaggttgattcgttgtaggagtcattgtgctgcattgcaacctctacatagacaccatcgcgctcgccctcacagtaaatgacattgtcatacagagcttctttgctcttgttcagatactgaacgaactctttgataccaccctcgtaatggaaggtttctgtgcgctcctgtcccggtctcttgtctgtcagaacgatgcgcaggtttttggtcaggaatgccatctctcgcagacgctgacgcagtacatcgtagtcatatactgtatcctcaaaaatgcttccatccggggagaaagttacttttgtaccggtctgctctgccgggcaatcaccaacgactttcaacggatacatcgtttttccacgctcatagcgctgctgataaatgtgtccgtctctgcatacctgaacttccagccagttggaaagagcgtttactacggaagcacctacaccgtgcagtccgccggatactttgtaccctccaccgccaaattttccgcctgcatgcagaatggtaaatacaacctctactgccggttttccggctttgtgattgatgtctaccgggattccacgtccgttatcggtaacggtaatggtatcgccttcgttgatcgctacatttatctccgagcaaaatcctgcaagcgcctcatccacggcattatccacaatctcgtatacaagatggtgaagtccgcgggaagaagtacttccgatatacatacccggtctttttcgtactgcttcgagaccttccaaaatctgaatctgatctccaccgtattctatactcattcctgtcctcctactgttctgctatcgtgccttccctgacgaaaaacactttatttatgtgaaatctatttttaacaaattcatccagacccgtacatgtgataatggtctgaatatcatggatgctgttcagcagataattctgccggttgctgtcaagctctgacaacacatcatccagaagtaacactggcgtatcgtggatcagctgttttaccaactcgatctccgccagttttaacgaaagtgcagatgtcctctgctgcccctgggaaccatatttgcggatatccgtctcattgatcaggaaagaaatatcatccctgtgtggtccgtaagacgtcattcccattttcagatccttcatgcgggattcctccatgcgcgccgccagctcctctgccgtggcagacggttcatacacaagttgcagcgtttccttatttccggaaatattctgatggattccccggaccatttcattcagttcctgcaaaaattcctgcctgcgctgaatgatctttgttccatagagcaccagctgctcatcccacaccggaagcgtcgcttccagatccggccggaaatggatatctttcagcagtttgttgcgctgctgcaggatcttgtgatatttcgtcagattgtgcagataaatactgtctagctgacttaattccatatccataaatctgcggcgccccgccggtccgtctttgataatattcaaatcttccggagaaaaaacaaccagattcaggattccaaacagttctccggctttccggatcggaatgccgttgactgcaattcccttggcactatttttcttcagatgaatatcgatcctgttttccacaccgtttttttccacaatggtgcggatatgtgcctcgtccgcgtcaaatcggatcatttctttgtccttgctgcctttatgggactttgtcgtcccgctgacatacagggattccagcacatttgtctttccctgggcattatctccgtacaagatattggttccggcatcaaaggcgatgccgagagcctgatagttgcgaaaattctttaattccagtgattttataatcatttgccgatctgaacactctctccgttaaatgtaatgacatctccttcgtggagctttttgccgcgctggtattctacttctccgttgacctctacctgtccgtcctggatcagcattttggcatctacaccggagccaaccataccggcaagcttcattgcctggccaagtttgataaaatcatctctgatgataactttttccatatgtctctcccatctgtctcttaatt

SEQ ID NO: 13062 - DNA, 1797 bp, Unknown
  gut microbiota DNA sequence
aagtcctgtaaaagctgatgcagttctttttcattatagtttaatttcatagtaaaattcctttattttatttgtttctataatacatgaaaaaagtgctgtttgcgatacgattttacagtttttgggaagaaaatcactattttttcaaaatggtatgagatacaatacaagcatggttaagaagtgccatgaaataagttgagcaaaatcgtggatctggtttcatgttcatttaaccaaattaaggaaattctctgcttcaattgtgtaaatgtgggggaattgcctatatcagtttgactttgaagattatttgagatgtaagcataaaaagtgggaattgaaaggggaagagacgagtatgaaaaaagaagttatggtggatatgacttccggacgtattgcaccgcagattttgaagtttgcgatgccggtattgctgggattgatttttcagagaatctataatttcgcagattcgtatattgtgggtcactttttgggggacaatgcgctggcggcggtcagtgtggcgggcgttggcatgtatctgatgttttcgctgatcatcggtctgaccactggtgtgacggtggttatgtcgcagtattacggtgctaaggaagcggataacgtagtaaaaacatttttttcttccatatatattgcgttggggatgacgatcatcgtgacggtggttggtctgatcgtgacaaaaccgctgctgatcgtgctgcagacaccggatgaggtgttggatcaggcggtattgtatctgcgactgatctgtgcgggatgtatcggaacaatgttgtacaactggatttctgcggtattgcggtctctgggaaattcggtggttccgctggtgttccttggaatttccagtttgctgaatattgtatttgatgtattatttgtggctgtgcttccgttgggcgttggcggtgcggcatttgcaacggtgctggcgcagattgtttcaggtgtggcgtgtctgctttatgcatggaaaattctgccgatgctacggattcgcagggataaattgaaactggatacatttattggaaaaaagatgcttgtatatggtctgccggcagctttgcagatgagtattatttccatttcggatatgactttacaggcggttgtaaatacatacggaacgacgctggttgtagcctacggtgtctgtgtaaaagtggaaggtcttggtatgcaggtaggagatgcactgggaaccgctcttggaacttttgcgggacaaaacaccggtgcaaaaaatatttcacgaattaaagccggttttcgcacaacatttgcgttgaatgccattggttatgcgattgtgtcaccgttgatttttatcctggctccgctgttgatgcgtttgtttaccgataatcaggcgtctatcggttgtggtgtggagtatatgcatatttttgcaccatttttaatcggtgttggaacactgaatctgttccacaatctgcttcgtgcagttggtgatgttaagatcacaatctggatgggcatcagtgaggttattacgcgaatcggttttgcatttttgttctcttatctgtggggctatcatggactttggtgggtatcaccgcttacatggtggtgcgcagcaggtgtcggcggcttaagatacctgagcggtgtttggaaaaagaagatcgaaaaggcgattccctcataaaagtgtgattatatcagatgggagatgactcccacctctataggtggtgagaaacaagctagtatcagtggtgggagcca

SEQ ID NO: 13063 - DNA, 16519 bp, Unknown
  gut microbiota DNA sequence
ccagtgcacacgcatactgtgcttcccagtcaagtttctggcgcgcctctgccatcttgtcatcgatatcacgggctcccggaacaccttttgcaatgtcagcggcatgcgctgcgatcttggatgcgatgattccctgttttacatcttctacgtttggaagtgccagatgctctgccggtgtgacataacaaagaaatgctgctccactcattgctgcaactgctccaccgatggcacttgtaatatggtcatatcccggtgcgatatctgttacgatcggtcccagtacatagaacggtgcgcccatgcagatactctgctgtactttcatatttgcagctacctgatcaagcggcacgtgacccggaccttctaccataacctgtacgttgtgatcccatgctctcttggtcagctctccaagtcttaccagctcctcgatctgacatacatctgtggcatctgccagacaacccggtctgcaggcatcacctaatgaaatggtcacatcatattcttcacagatatcgagaatctcgtcgtagtactcgtagaaaggattttcctctccggtcatgctcatccatgcaaataccagacttccgccacggcttacgatattcattttacgtttgtgtttcttaatctgttcaatggtctttcttgtgattccacagtggagtgtgacaaaatccactccatcttcggcatgcatccgaatcacatcaacgaaatctttggcagtcaatgttgccagatctctctgatagtggatgacgctgtcgtataccggaaccgtaccgatcattgccggacattcacttgtcagctttcttctgaatggctgtgtatttccgtggctggacagatccatgatcgcctcagcgcccagatttaccgcgctcattactttctgcatctcgatatcataatctttacagtctctggatacccccagatttacgttgatcttggtacgcagcatgctgccgactccctccggattcaagcaggtatgattcctgtttgcgcagatggctactttaccctctgctaccagcttcatcagcgcctcggacgtcatatgttctttcttcgcaactgcctcgatttccggtgttacgattccttttcttgctgcgtccatctgtgttgtgtaatttctcattttttctccttctttcatgaataactgtttatgcccacaacatttttcttatgcgacaaaaggtggtgcccccaatttgccgccatgcattacctactaatacatcatgattttttcaaaaccgatgtacgttccggccgtatctgactgatcacgccgcctttttgcagcgcgcctaccagaaaataagcaagaatacttcctacaactgtggaaacaagaaatggcacaatgtatacaaacaaaccgcccggattcagtcccataaacagttttgcaaccggataagcagcaagtccgccaaggattcctgttccggatgcctctgcgatacaggtcagccacagttttcggaatgccatgtaagccagaccgcagcataacgcgccgatcatacttcccggaaatgccatcaggcttcccagtcccagaagattacggatcagacttgcacaaaatgcaataccaacgccccatcccggaccaagtacaaccgctgccagaatatttaccatatgctgtaccggtgcacatttgcttccaaaaatcggaaaactgagcagactgccgacaacagcaactgctgtcagaacccccgccatcgcaagttttttcactgtgtcactctgtttcatttactctcaacctccttttttctttttcctgtttttacgaatcttttgtccgttaataagttttctttcgtaaaagaatctcatactgacctgaatcgtatcttaagtctcacctatgtttgactctatttttctgtggatttctcacccacaactttgccgacgatcacgcagatcacgatcgtgatcaccatgtccggcaatgtatttccaaccggcagatccacccgcatgagcagtcggtaaagaacgaaaccgatcacccagatgataagattgcgccagtcaaaagcatttttacgtctgtccctgtgcaacaggaagaaatctgcgatctgaattgcgatcatcggtgcaaataccgatccgatcagatacagaaaatctgtaatatcgtccatcgggaacaaaatcgctcccacagttccaatgatcgtcaccacaatagcggcgtattttcctttgattttactgaaaatggattcgctggaaatcccggcagaatacgcatccagaaacgtggtagttacggtagaaaaaacaatgatcagcagaccggcaatactgagtcccgctttcagtaaaatctgtgcaatgtcagattctccggtaaacagcgctgctcccattccgatgacatacatccagcagcttacaatgccgtatacaatggcactgactgccgttgcttttaccggtttttccgcttctcttgtataatcgctgatcagtggaagccaggaaagcggcattgccacagcaagttccaccgctgctccaaaggaaagactgtcgtctgcggtactttgaatgacatttccgtcaaaaaaaattactttgcacaaaaccaatgtcagaataaaaagcagtaccatcgctgcggtattgatttttccaagatttgtaatgccgatcaaaatccacacaacgatcagtgcgccaatgatcagacaccagagccatcttccggtcgaaaccatgccgtctactgccaaagctccatcatagatcatgatagcggtccatcctaccagctgaaggacatttaaaatggcaaaaaactgaccacctttatttccgaagctactttttacagtctccatggcactgagacggctttttccaccgatcacacctgccagaaacagcatgacacaaccaatgacatgtccgatcaaaatcgctgccagacctttttgaaatcctaaagaagaaaaataggttcctgtcagaatttcagcaatggatacgcccgcgccaaaccagatcagtccgttttccaaaagggaagttctcttttccatcacttactccccctgttctttcgtaaattcattttcaatggcaaatccgtgatccatcggtccgcttcctgcccccagatccaacattgctgccagtgcgccggaaatatattcctttgcacgctctaccgccgtttgcagatcataaccttttgccagattggatgcgatcgcggaagaaagtgtgcatcccgttccgtgggtattcggattatcgatacgtttgcctttgaaccagtgatagctgccgttggcaaaaagcaggtcgttggcatcatttaactgatggcctcccttacaaagcacggcacagtcatattcctttgaaatctgctctgctgctttgatcatgtcttcggcacttttgattttcatccccgtcaacacttctgcctccggaatgttcggtgtcaaaacagtggcaagcggaaataatttctgttttaaggtatcaatagcatcctcactgatgaggcgcgctccactggtcgccaccatcaccggatccaccacgatatttttcgcctgataatgctttaatttctctgcaatcacgcagatcagttctttttcagaaaccattccaattttgactgcatccggaaaaatatctgtaaaaatgcaatcaagttcctgccctaaaaactccggcgttgcgtttaagattcctgtgacaccggtcgtgttctgggcggtcagggcagtgatcgcgctcatggcatatacgccatttgccatcattgtcttgatatccgcctggataccggcgcctccgctggaatcgcttccggcgatcgttactgctgttctcataaacttaatctcctctcatttgtctcttatttgttcagcatacgttttctaatgcgacaggaagtggtgcccccgacctatcgcagatatttactaatttgtccaatattgctcaaactctgataaccgctttaaatataattcccctgtctggcgcacaccctcctgatccgtctctccgtcagcatcatatacgccgattgcccgaaagcctgcctttttagcagttttcagtgcatacagagaatcttcaaaaaccagtgtttcttccggttttgtgccaaggctttctgctgccagttgatagatcagcggagaatgtttgctttctcccacttctccggtggtatatatctgctccagataatcaaacaaaccgattcgctgcaatgccttcgtcacatgctcccgtggactggaagttgccgtgatcatttttacattttgcttctgtaaaaactgtaatagctcttttgcgccttcttttggctgcacttcgtaaaaatagaaatcctgaatcatctgctcgatgccgtttaaaatttcctgcggtgtatctggcaaatggtactgctcctttaaataatctgcaccctgctccatgctcatagagaacaggatctgacccagtccatcttccggctcaatgccacgttttttcagataccgcactccaagatcgttccaaactgacatagaatctaataacactccatccaaatcgaaaattgctccacgaataccatttttttgtgcttcatctttcttgcacatattctcttgaactacatctgtctgcactgtatctttctgaaacgcattctcccgcatcacatctgtctgcatagtatctttctgaaacacattctcctgcatcacatttttctgactcatgctttcaccatcttctcggttgcagctttcagattttctgctgccttcttgatatccggctgtgcataaatcgcactgatcacagcgataccgcaaataccgcttccagcaagtgtgtatacattctcctgtgtgattccaccaatggcaatgaccggaatggataccgcttcacagattgcttttaacgtctcatgcggcacttctgtcgcatcatccttagaaccggtcgggaataccgcgccgacgcccagataatctgcgccgtgtttttctgctaaaatcgcctgctctacggtctgtgctgacacaccgataattttgtccggtcctaattttgcacggacatctccggcttccatgtcgctctgtcccacatgcacgccgtctgcatccatcgccagtgcgatatccacattgtcattaatgataaatggtacgttatattcacggcaaagcgcctgcaaatcttttgcttcttccataaaatgcgcttcatccagctgtttttctcttaactgtacaaaggtcactccgccatccagactctcctttacaacagaatgcaaggttctgccgtttaaccagtggcggtctgtgactgcatataaaagtaactgatcctttgtcaatgtatttctatcgaatttcatattttgccccctgcgctaatgtttccgcgttcatattgtaaatggcatcaataatacggttgcgataagtggaattgccatcgccttcctgcatgttgcgccaaccgatctcaccggcaagtcccatcacacagactgccgccgctgctgcttccagtttattatccggatttgcggtaatatatgctgtcatcacaccggataactgacaaccggttccggtaatttttcccatctccggtctgccgttgcggatgacataacatttctctccatcgctcaccagatcaatcgcgccggtaattgccacgatagaaccactctgctttgcaaaatttttcacaaaggcaactgcctgatccaaagtgtcctctgtcacagcgtctgccacatctgcatctacaccttttgtagtaccgctgccggatgccagtgtcttgatctcggaaatatttccacggatcacggttggatgtaaggtatccatcagttcaatggcagtgttggtacgaagtgcggacgcgcctgcgccaaccggatcaagtaaaaccgggtgtcccagctcatttgcacgttttcctgcaagtaacattcccgcgatcgtgcgtttatttaaggtaccgatgttgatattcaaaccaccacaaattgtagtgatatcttctacttcttctgcttcatctgccatgatcgggcttccaccacaggctaataatacgtttgccacatcgttgacggtgacataatttgtaatgttgtgtaccagaggtacctgtgttcttacgttttccagacatgttcctaacatttctcttttctccttaaaaaacaatctattctcaagaaatacatagttgtatgattttataatcatctttttaaaacatacttctctataacaactaaaatttcaaaatgtactactttgcgattcacactcacgcttttcaagggcacatccttttacaacaataaagcggatacaccaaaatcggtatatccgctttataaacaatacaaaaaatactgcatccgctatatccctacgttggcattatccaaatcaggttacgggtccagaccacttagtccgctctcagcctgctgtcggcaagctcccctttttcttattctcttatcgtgttttacagatgaacttctgcaaaattccaacccagcaattatctgacgtttttcaacatcacgcccttgttgattgacgatattatagcactgcaccactttaattgcaataagtataagcatttttcttataccatcttaaagatatcattttcagcacaattctttattttttcttttttctaatatgaatctccgggatcgccacagattcataagtgatggaatcctgttcttcttcgccctcttcatcttccacttccggttcagtatgtacctccggaactgccagattttcatattttacatcataggattcgtgtgttgttttcttaccgtcctgttgttttttctttttccaaaacatagagtttcctccaaagtaatatgtttgtgtttattataagttaaagttacagcaaattgataaagaatgtaatgatcagactgttcaaaaagtctgcgaaaagacttccgatcagcggaatgatcagataagcctttacggatggtgcataacggtcgcagattgcctgcatgtttgccatggcattcggtgtcgcacccataccaaatccgcaggttccggctgcaagtactgccgcatcgtaatcacgtcccataacgttgaatacaatgaatctggcaaagataaacatcaaaagtacctgaacggacagcaggattaccaacggcaatgccagtgctgccagctgccacagtttcagtgtaatcatggcaataccaaggaacagggacagacagataccaccgatatcgttaatctcacccatgtaaattgtaaacttaccggaatattctccaatatttctaaacaacgctgccgcaatcatagctccaatataaatcgggaatgtcatacctgtttttgtcaaaagccatgagaaaattgttcccagaccaatagcaaggatcagctgaaatacagctgccgcatacatggaagtatgacgggtatgttttttctcatcctctaccagaaggctgtcatcctctgctactgcggtggtgatcaggttctttttctccaccagagatttaccgatcggaccaccgatcagacttccggtgatcagaccgaaagttgccgctgctgtacacaatgtcgttgcaccggagacattaaaatcttccagaaccggtccgaaagcacccgcggtaccatgtcctccaaccatcgggatagaaccggtacacagaccaatcaacggatccaggttcaggacttttgacattcctactgccaggaagttctgacacaggatcagtcctacaaccagtcctaagaacacgatcagcgatttaccaccgctttttaaaactttaaggtttgcctgaaatcctacagaagtaaagaaaaataccatgcagacttctcgcaacgtatcatcaaaggaaacttctgcgattccggttccatatagtacgcaggtcaggattgcaaaaagcaaaccaccaacgaccggcgccggaatacagaatttttccagaaaattaatttttttcttcaaaaatctaccaagtaacagaaccagtaccgcaatggcaagggtctgatacatatctaaatgtagttccataaaaatcctttcaaacttatcaacaagtaccttttttactcattcacagtgattccatgtttttcgtaataagccgcagctccgtcatggaatggaattgtcacattttccgtcgcactggtttcatccaactgaagatccagcggcagggaatactgaatatcctgcttgcggctgaataactgttcggtcagagtttccactgttttatcactcagctcatcactgacaagcagaagtgattgcacaccaacggttgttgcctcctcagactgtccgctgtatgtatacaccggaattgtatacggtgtatagaaatcatacgctgccatcagtttctgaatatgtgtctcatcaagtgacagcagacggatgccgcgctgacgggtcagctcctcgataacggttgtctgtacaccggcagtacagaacatggcatcgattttttcagaaacaagtgcctctgctgcctgggtgtaatccagattttcacagtctaccagttcatcagaaagaccataagcctcaaggatctgttttgcatttcgctcagttccggactcttcctcaccgatacttatttttttgccaagcagatcatccacactgtggatgtcagaatccgcacggacaacgatctggcaggcttcggtatacaaagctgctaccgcactgtaaccgtgcagtggttttttgttaaaatctccggttccgtggtacgcatcgtcagtcagatccgcctgtgcgatcgccatctgaatgtaaccgtcagaaagcagacggatatttgctgctgatcccgcggttgcacgcacggaaaactgcagactgtcatcatcctgagcaactacctgtgtgtacgcatttgcaaacgcagaatacataccgcccacggcagcggagccaaaacggatggatgttgtggatgtgcttccacagcccacagcgaaaaccagagagagacttaagaatagtgctattatttttttcatgaagtttctccttgtaaatttactatcagtacagtacattcctctccattcagattacttttcatgcaaggcaagcattatcactttctgaatgcatgcaaggagcacactgtaacttacaaaaagcagagcgaacatagaaattattatgctggctctgcctgtctgttactataatctgatcttatttttcaaatcttactcaaaaataattttgcggtagttctttttaccacggcgtaatacaaagtcttctttgttgatgtcttccggtttgtaggaagcttcgatagaagcaactttctcgccgtttacggcaactccgccctgctgtactgcacgacgtgcctcggaacgggatgcgcataatccggaagcaaccagcagacccatgatgtcaatctcgccgtcacgcagattttcttctgtgatcgttgcagtcggcatatttgctgcgtttccgccggagaacagtgcgcgtgcgctctcctgtgcttttgtagcttcttcctcgccgtgaaccagttttgtcagctcaaatgcaaggatctcttttgcagtatttaactggcttccttcccatttatccatctcatcgatctgctctaacggaaggaaggtcagcatacgcaggcattttaatacatcggcatcgccaacgtttctccagtactggtagaactcgaatggagatgttttctccgggtcaagccatacagcgccggactgggttttacccatttttttgccttcagaattcagaagcagtgtaatggtcattgcgcatgcgtttttaccaagtttacgacggatcagctctgtaccaccaagcatgttggaccactgatcgtcaccaccaaactgcatgttgcagccgtatctctggaataactcatagaaatcgtagctctgcatgatcatgtagttgaactctaagaagcttaatccacgctccatacgctgtttgtagcactcagcagaaagcatacggtttacggagaaatgcggtccgatatcgcgcagaacttctacataatttaagccaagcagccagtctgcattgtttaccattaatgcttttccatcggaaaaatcaataaaacgggacatctgttttttgaaacactcacagttgtggttgatggtctcttttgtcatcatctgacgcatgtcagtacggccggacggatcaccgatcatagctgtaccgccgccgatcagggcgatcggtttgttgcctgccatctgcagtctcttcatcagacacagagccatgaaatgtcctacatgaaggctgtctgctgtcgggtcaaatccgatgtaaaatgttgcttttccgttattgattaattctttgatctcttcttcatctgtaacctgggcgatcagaccacgggctactaactcgtcataaactgtcataatgtactctcctttttatccatgtttaaaatagttttcttatacactttgtaattattcaaaaatcagtctcaggctttttatgtcttataattacaaaacccgccctcacgcactgtacatgcataaggacgggataaaatctcgtgttaccaccttaattcacagaccgctcacacgatccgcctcaccaagtatctgacaatacttctgcaatataacggttgctcccggcacagcctactgatcatcaaaacttttcttccatatttcatgactcaaaatatctttaaaaatctatttttccgtccggttctgataacgttcaatgcgcagcttgtgaatgtattcggtatcagttttccatgcgcctctcaccatccggcagctctctgtatgttccgctcatacttacttgtttcagtcattgctgtttttgtctgcaattattttttacacgctcattattataaaagttgcgtttggaaatgtcaatgtaaagtttgcgctttctacaacatccgcctgccggaggctatatgggggattttcatgtccagaaagattatttagatcagtccatgctctttcagtttttcgtaaagaaccgttcttgaaattcccatcattttcgcagcctgctgtttatttccatgcgttgtctgtaatacttcctgaataatattcttttcaaactccattctcaacagccgcagattataagtagtcttcggtgctgatgagtaacgactgaccagggttttgaaagactctgaatggataaaatctgcctgtgtcaaaattggtgaagttgcattgttcattgcaacctccacataattttgcagttcacgaatatttcccggccagtcatatttcatgaggaaattcagtgcttccggctcaattccctgtacaaatgtccccatctcccgattcagtttttcaatcatattctcaaccaataacggaatatcctgtttatgtgttctcaacgccggagcctgtatgcgaatgacattcaatcggaaatataaatccattcgaaacgcacctttttctaccagatcaagcagcgatttatttgttgccgcaatcacacgaatatcaattggtacactatctgcacttcccaccggtgtcacttcatgttcctgaagaacgcgaagaaatttcggctgcattgtaaccggaagcagatttacttcatccaaaaaaatggatccatgattggcaaccagaaaacgtccttttttgccatcttttaatgccccggtaaatgctcccgacgtataaccaaagaattcagattccatcagatcttccggaattgccgaacagttaacgcggacaaaatcggaagtagctcttggactcagcgtatgaatggaatgtgcaatcaactctttacccgttcctgtttccccctcaataagaacggttgacgatgatgctgccgcctgacggatctgatttttcaaatgcaaaatctccggactttctcctataatattttccagagaatacttcgctccatgctctctgctcaggcgcttctgatagtactccactttttcagacaaggcctgaagctgcttttccaattgcattgcttctctcgcaccatgaacaatcgtgtataaaaaacaccctaccacctttttatccgcagaaaaccgtggaatataatttgtaaacattgttacatcattcaggacaaccggatgaccaaacactggctgaccggtctcatatacctgatgtgccagtgtatccggtacaatgtcttctactctgcgccccaacgcattttcctctgtgcagtttgtcatccggcaccagttttcgctgacatatgtataacgtccatttgcatccagaatagcaaatgaatttaatgcattcataaactctctggcatccttcattgataattgtgccatatccccacctctttctttcgaaatattttatcatgtttagcacttttattcaactttcccttgtatttcagcaactattttattcattttgcataattactgtcagtttttccttacatgtcattaaaaccatacatgcatagaaaacgtattatctgcaatcttttaaaaaaaaatcaatcatttatgtacggatatcctgacactgtatattttctgaaatccgccaaaacagcggatttctgctctggcatgtttcttgctgtttgttaagaggtaacaaaaatgggggacaggaaactgtcaatgttcattctgtgttttgtcctttaaatatcagaatgtgcagaaaaatgttaggaggtttaggtatgaaaatcaaaaaaattgtagacatcagcatggttcttgaagaagatctgccaagtgatccggaaattcaaattccgcatatccagagaagaaaccataaagatactgcaccggagatgggcaattattttccgggtgcaacaatcgatgatctgccggaaggaaacggatgggcgatcgattttgcccagttatgtacccattccggtactcatctggatgccccatggcattattatccaaccatgaacaatggggaaaaagcatggaccattgatgaagttcctttagagtggtgtgtcggaaacggcgtaaaagtagacatgagagacaaaccggacggatacagactgatgccggaagattttgaagaatattttaaaaaagtcggttatgaacttcagccgggagatatccttttgctgaacacaggtgcagacaaacgttggggtaccaaagaatacctggtagccggctgtggtgtcagcaaagcagctaccttatggatgatcgataaaggagtgcatgtctgtggtacagacggatggagttgggatgtcccgcttccatatgaagcaaaaatgttccaggaaaccggagatgcttccgtactctgggaaggtcatcgtgccggtgccgaaaaagcatactgccatatcgaaaaactgaccaacctggaagcactcccactgaccggatataccgtatgtgcattcccgatcaaaatcaaaggtgcaagcgcaggctggagccgtgtcgttgccatttttgaagaataacggtttcccataaatactttagtatgataaaaatccgacaattatatttatcttctaaaggaagaaattactgacatgaaaggagaagcatatggctactcaaaatatcgttttcttagtaatatttattatctttttagcatttctgttcatatccagttttgtcgcaaagaactgggtcaaggaaaccgatgattacgttctggccggtcgtcagatttctaccggaatgaacatcttcggtgttatcgcaatcggatttgccggaactaccatggctctggctcccggctttgccattcagtttggttttaaaggatctttcctctggagtgcaatctacagcttctgcggacttgcattttacggcttactttattctaactttgttcgccgctgtggtgctcagacacttccggagttcctggaaatgcgttatgacggcaaaacacgttccgttatcgctattacatctgttgtaggtatgctcggtatcatggcaaacaacattgtatccgccatcacaaatatctgtgcatacacaggctggaataaagctgttgttactgctgttattttcgcagttatcattgcttttacatacatttcaggtatgtgggctatttccatgactgacctggtacaggttatcatgggtattatcatcgttccgcttgttatggtacttgttatcaaacagtatggtccgctcagcggtctcgcaagtgcatggccaaatggcaacccgatgggtgaaggtttcatgggaaccatcccgaacgcaggactgacttatccgtccgttatcaactttgtaattctgtttgcatccgctctggtttggggaaataactactactggatgaagattgcaaactgccgttctgaaaaagttgcacgtaaatccttcgtatggtctgcatttttactgctgatcatcttctgtgtaccgcttggtatcgttggtctgtacgcaggtgctttccatccggaagtatttacatttaatggcggtactgtaatgccgacaggtgcttacggatttatcgcttccaccttgattccgttattcggttcactggccgttatcggtgctgtagcagcttctgtttctacatctgctacctcagcacttggtgcttctgccgttatgacacgtgatatttatcagcgtctcatcgacaagagcggagatccgaaaaagagacttcgtgcttctaaatggatcctcatcattgttggtgctgtaacatttatcctctgccagttcccgggtggtcctacttacctgtttgcatttgcaaactgctggctcgttccaccatccgtattattattacttggtatggtttggaaaaaattcaactccaccggtgctttctggggcgcattatgtggaatggttgtcatggcagtattcgaattactggaattaaccggtgtattcgttgtcggcagctacatttaccttgctactcttggtctgatcgtatcctttgtggcagctatcattgccagcctgttcggcaaaccgaaatacttcggtgagtctgactgggaactggttccaaacgatcacaaccgtgaaaatatcacattagatgctactgataaagaagctcttcgtctgatctgtgtaggtcacaaatacatggctgacatcacagattacatgggtctggattccaaagttacagatgcagcgattgaacatctggaccgtggcggttacatccagagagcaggtctgaacatgtccaaactgtacaccttctctgctacagataaaggccgcgcagtgatcggtctctccggaaatgatgcaaaactcgcttccgttggtctgacaccggattatgtagagttcctgaaactggtaaaaaccggcgatgcacacaaacagaatgaatggatcgcagcaaagaagattcgttccatgcagatggctgctatctcctctcacctgacccgtgaaggatatatcaaagaaaaaggcttaatgcgtcgtaaatatgaaattaccgaaaaaggccttgcagcaatcaaataatatctaaccataaacaatcataacttctgaacaattccgaacgccgacatcacgatcggtcgttcggaatcgttctcaaaaggggaaaataatttatgaatacagagaaaaaaaatccaagagatgccgttattgttgccgcaggccgttctgccatggcaaaagcattcaagggttcctttgcagaaactcatccaattgaatatggtgcacaggtcttaaaaggtgttctggccaaactggatcattttgatcctgcactgatcgatgacgtcatcgtcggctgtgcctttccggaaaagagaatgggatacaatgccgcaaaactgatcgtacagcgtgcagggcttcccgattccgtctgcgcacagaccatcaatcgtttctgttcttccggtctgcagagtatcgccaccgctgccaatgccatcaaagccggcgatatggatatcattgtagcaggtggctgtgaacagatgacaggcatgaatatggtcaatcccgatatcgaaattgacgaaaaattgatggaagaaaatcctgatgcctatatcatcatgggcgaaaccgctgaacttgtcgctgaaaaatataatatttcccgcgaagatatggaagaaatggctgtccgaagccataaactggcggctcaagcacaggcggccggcaaatttgatgaagaaatcattcctgtcaccactactttccagggcaaagagattactgtcacaaaagatgagggcatcc

SEQ ID NO: 13064 - DNA, 1222 bp, Unknown
  gut microbiota DNA sequence
actcccactgagaaagacttgttattactcaccacttgcagaagtgggagtcttctcgactgagataaaatagattttttgcgatgttattgtacttattttaatacaaaaaaatgatgtttgtaaagatagtttctgatatggatacggaagtcggagaaatcggcggtaaactttccggtggcgaacgccagagaattgccattgcaagaacgatcatgaaaaatccggatgtattatatggaaagaagaataacgattacggacagggcttttactgctcagaatctgcggaacttgccagggaatgggcttgtcctcgggaaaaagatggtattttgaaccgttattgtctggagacggatggaatgcgtgtgtttcatttaaaaggagaaatggaggaagcactgctaatctggatcagtgtgttgttatcgaacagaaaattgaatctggatacagaggaagccagaacaggtgctcattttttacagagccgctatctgatgagcctggagactgcggatctggtgatcggatatcgtgcagatgattcttatttctcctttgtgaaggattttttgaataataggatttcgctggcgcagttacagcaggcactgaagctgggaaccgtgggagaacagattgtgatcaaaagccagcgggcagctttcgccctggaatttcagggatatgaggttgtagattggaaagaatattatatgaagcggctgcagcgggatcaagcattgcggaatatgtatcaggaactgcggcagaagccggatgtttcaggaagatatatgagggacattgtgcgtgagcgaaataatagcggaaaataaaggattgagaaaattttagtattggttgttaatgatattgtgatagaagtaggaacagcaattcagataaaaggaattactgtgtttgatctgggaaaaatatgggaggaaaagaaaacgtgagagaacaaaatgcttatagcgaactgtatatagaagacgctatgtgcaatatggcaaatctggtggattatgtagtaaatgatctgcatcgggatccggatgagttttttaagctgtttgaagccagtggcattgcccgggagttcagtcatggaaatccaaagtatgtgtcggctataccggaaagcattttttatttgagatgtataaataagagatacagtttgagtgaaaaagtatcaaaaaacatg

SEQ ID NO: 13065 - DNA, 2851 bp, Unknown
  gut microbiota DNA sequence
caggcatttaaatatacgggcaagtatatattagtgtctgtccttttttgctgaaaagataatcttagtagaggtagaaacacatgtgttggaattgagtacaatttatgtacagggaatatttgaaaaaattatataagtgtaaagaaaaaatacttgacagggtaaaacaactgtgataatctagcaaaggtgattgacatggagaaaattggacgtcaggtctttttgtatgatttttatggagaattgctcacggagcatcagaaacatgtatatgaagatgttgtgctgaacgatatgtccttaagcgagattgctgaggaattgggaatcagtcgtcagggggtacatgatctggtaaaaagatgtgataagatccttgccggttatgaagaaaagcttcatctggtagagcggttctggaagacaaaagaagatgtttccaagattcgtgatctttcgcttcattataaagaggactgtattgcacagacaatggaggagatcaatcagatctccggacggattttggaggaattataagtatggcatttgacagcttatccgaaaaactgcaaaacgtatttaagaacctgcgaagcaaaggtcgcctgacagaagcagatgtaaaggctgcactgaaggaagttaagatggctttgctggaagcggatgtaaactttaaagtggtaaagcagtttgtgaaatctgtacaggaacgtgcgattggtgcagatgtaatgaatggtctgaatccgggacagatggtaatcaagatcgttaacgaggaaatggttaacttgatgggttcagagacaacggagatcaaacttcgtccgggacaggcgacaacgatcattatgatggttggtcttcagggtgccggtaaaacaacgacaactgcaaaacttgcaggaaagttcaaactcaaaggaaagaaaccacttctggttgcctgcgacgtttatcgtccggctgcgatccagcagttacaggtcaacggtgaaaaacagggcgtggaagtatttaccatgggtgacggacacaagccggtcaacattgcaaaagcagcggtagagcatgcggcaaagaacggcaacaacatcatcatccttgatacagccggccgacttcatgtagatgaagatatgatggacgagctgatcgagctcaaagaaaatgtggatgtcgcacagaccattttggtggtagatgccatgaccggtcaggatgcagtcaatgtggcaagcacctttgatgaaaaaatcggaatcgacggtgtgatcctgacaaaattagatggtgatacccgaggcggtgcagcactttccattcgtgccgtaaccggaaaaccaatcctgtacgcaggtatgggtgagaaactttcagatttggaacagttttacccggatcgaatggcttcccgaatccttggtatgggagatgtgcttactctgatcgagaaagcgcaggcggagatcgatgatgagaaagctgctgatatggaaaaacgtttccggaaagcagagttcacatttaacgattatctggattccatgagccagatgaagaaaatgggtggtttcgcaaatgtcttaagcatgatgccgggcattggcggcgcacagatgaaacagattgaagatgcgatggatgagaagaagatggcgcgaattgaagcaatcatttattccatgactccggcggagcgtggggatccaaacctgatcaatccaagcagaaaacgtcgtattgcggctggtgccggtgtggatatcagcgaagtcaaccgactggtaaaacagtttgagcaggcacgcaagatgatgaaacagatgcctaacatgatgggcaaaggtaaacgtggcggtaaatttggaaatttcaagtttcctttttaaccatatagcgcgtatgcgcagtgaagtagaaatttgaggaggtgaaacacatggcagttaaaatcagattaagaagaatgggacagaaaaaagctcctttctatagaatcgtagtagcagattccagaagcccgagagatggtagattcatcgaggagatcggatattatgatccgactaaagagccgtctgagatccgcgtagacgaggaagcagctaaaaaatggttagcaaacggagcacagcctacacagacagttgagaaaattttaaaaacagctggtatcgagaaataatagattagtgagggaaacgtgatgaaagaattagtagaagtaattgcaaaatcactagtcgacaatcctgaggaagttactgtaacagagacagagaaagaccgggcaaccgttctggaactgcatgttgcacaggccgacatgggaaaagtgatcggtaagcagggcagaattgcgaaagcaatccgttctgttgtgaaagctgccgcatctcgcgaggaaaaaaaagttatcgtagagatcgtacagtaaaaaggcgacaagggacatggtgttaagctatgtcccttttttgaaagggagaacatggaagaatttttacaggtaggtgtgatttcaagcacacatggaatcgccggggaggtcaaagtatttcctaccacggatgatgtaaaacgttttaaaaaactgaaagaggtcattttagacaccggaaaagaacggatgacacttcatatctgccaggtgaaattttttaaacagatggtaattctgaagttcaaggagtttcagaacatcaatgaagtggagcgttttcgcggaaaaagtctgtatgtgacacgggaaaatgcggtgaaactgcagaaagatgaatattttatcgcggatatgatcggtatacgcgtggtttccacagagggcgaggaactt

SEQ ID NO: 13066 - DNA, 12417 bp, Unknown
  gut microbiota DNA sequence
catgaatcagtttggtgcttttgagatgaaggcgacgaaagttggaaaagacagttccattcagcgaatgatccaactggtacagtccgcagatgcaggaaaaaccaaaattgtgggtatcgcagaccgatgagcaacctggatcgtggtgatcgcactttccgcagcaacatttactggtatcatttcaggagaactgatccgtgcggtaacgattctggttgtattttgtccgtgtgcgctggtacttgcgacaccgacggcaatcatggcagcgattggaaatgcaacaaagcacggttttctggtcagagcatccattgggaaaagcagtagtaagttgttacaaagagtcctgtcagaaaaatctgccgacagcagaaacgtttgaaatgcttccgggacgcggtgtcagcgcagtgctcaacggaaaaatgctcttggcaggaaatgaagaactgatgcaggaatccggtgtggaagaaattgcacttatgacaatgtgcgcggaggcaaaggagtatttacagcagggatgtaccataatttatattgcagtagatcagaaagcagcaggttatattgctttgtcggataccattcgtgaagaaagtacggcaatgatcgatcagttgacagctcttggggttcaaccggtattgctgacaggtgatcatgagaatgcggcaaaaagcattgcagatcaactgcatatctcagaggttcatgcaggttgtttgccagaggataaactgaactggattgcagattatcagaaaaaagaagaagcagtctgcatgattggtgatggcgtcaatgctgcgcctgccctgaaacgtgcagatgtcggaattgccatgggtggtgttggaagtgacattgcagtggatgcagcggatattgcgctggtacataatgccggatcggtgctggttattatcaattctgcattgctgctgaattggaagcgaaaataaataaaaaacttgttgacatacagcgacactaatgttatattacagatagaacaaagaaaaccgggaaaaccggtagagaatgattcagataacgatgtttccccgggagtttcccggggaattattatatccaatgagagtttctattttatatggaaaattttacaagaaagttcacagaataatgaacgataaagaaaaatagaagcagaaatctactggatcatacatagtaaataacagaaatggatggtgatttgtatggcagcaaaacaggattattatgaattacttggcgttgcaaaaaatgcagatgccacagcaataaagaaagcatatcgaaaacttgcaaaaaaatatcatccggatacaaatgccggtgatccgactgcagaacagaaatttaaggaggtaacggaagcgtattcaatcttaagtgatccggaaaagagaaaactgtatgatcagttcggtcatgcggcttttgacggaagcatgccggaaggtggcgcttacggatatggcaatgcaggcggcgcacagaatggcggttatcaggaattccattttaacggacaggatatgggagatattttcggagatatctttggagatatgttccatggcggttcatccggaggacacagaagctacagtttccacagcgatggaaatggcggcttccaccagtactacagcaatggttccggtgcagatggcttcggacagggcagtcactttggcggatttggtcaggggggcggcttccatggtggtcagttccgtcagaaaggcagcgacatccatgccgatgtaaccgtaagttttgatgatgcggcatttggttgtgagaaaatgattcatctgaaagacgaaaatggtcaggttcagtcgttgaaagtaacaattccggcaggaatcgataccggtaaaacggtacgtctgaaaggtaaaggaaatccgggattcaacggtggagaagccggagatctcctgttgaaagtaaaagtaggagacagagccggatttgaacgaaaaggaatggatgtgtatacaaacatttcgattccgtttacgacagctgttttgggcggcgaagctgtagtgccgacgctgaatggcaatgtgatctgcaagatccgtccgggtacacagtccggcagcaagatccgtttgaaaggcaaaggtattgtgtcaatgaaagacagatctgtgcatggagatgagtatgcagtagttcagattcaggtaccgaagaacctgaatgagaccgcaaaggaaaaattaaaagagtttgcgaaagcatgctgatgcaatgaaaaactgaatttatgtaattaaggatgtgaacgcagaataaatattccccattttgagtgtacaaagtgactgcgttcatgagcaagtagtgaaagcggattgcgaatgtccgctttacgcataaaaatgagagacaagtgctttttaatgaaaagtgcctgtctctttttttttaacttttgataaagatttttcaatgacgaaaaaatggaatattttaggttgacacaactaccatgagtttgatagtatttcatggtgttagtttaagagaactaatgttaactaagaggaacaaagattaggaaaaaaggaggagcaaatgaaaaagacttggaagaaaatggcatcgctgttcctgtcagtattattgatgctgtctatggtggttacaccggcgatggcggcagaggggacaacgagaagtggaagcaaggatgcaccgacagaggtgaaatcctgcataaaaagtggattgtggactgagattctcaatcttgaatttgaggatatcacatggatgaatgcaatcgacagtgtaactgtaaatgataccgtatacaaaaataaaacaattagttcatttggcagtgatactggaatctgggatattggaagtgcgacgggagcatatggcagctatacagcattcagaattgcaaatgctgataatgtatcatacccattaacagtaaaatttacagcaaatggatacaaagatcttactgtagagattacaaaaacgacagtatcttatagtgatgtttacacagcaacagtagtaaaagactctactccagctgagaaaacttattccgcaacagcagattcagctgaaaacggcaaagttactttagacaaaacaagtagtctgaaagctggtgatactgttacagtaacaactacaccgaacaaacattatgagctggatacacttaccgtaaaaggtgagagaggaacaactgttgatacaacaaaaaaatccgataacgaatatacttttaccatgccggctgaaaatgtaactgtaacagctatatttaagaaagcagctccaatcaagattaatcttgatcaggtaagtatttctcttgatagtttcaatagaaactggaatgtatcttttgcaaatgcagatggatatgtagaagatattacagaagtaaaagtaaatggtgaaacctggaaaaaagcaagctatgcaagtttcatatatggtggtcagtattaccaaaatacatctgataataaactgctgtttgctgagacaaatttcagttccagcgatgatgcagctgttctgaaaagtggagatgtgatcacaatcacagcagatggatacgaagatctgactatgaaatttgtcgtagatccaagcggaaaagcatctctggttgaagatgacggacagggcgatccgtatcagctttatgtaaaaatcgcaggcacatttgacagtgcaatcaaaggtcagacaaattatgatactgtatcaagtgcaagtaccggtggttcttcttccaacaaaaacagtgacgtaaccgtttacggtgcattggtgaagaaaggcacagagccgacagacagtgactggaaagagcttgacaacatgtcaaacattaatctggatggtaaaaaatgcacagttaacattgtaccggatacagacaaaggtacaagcacagacagtgatagcggaatgcagggtgtttatatgacaatcagcagtgcgctgagccttagcggaacaccaaaggatccgggaaaatatctggtttctgtatctatcacagatatgcagggacgtactgcaacaagtaataccttacagtttaacgtatattccggcgaagaaaaacttgcggatcagctggtaaaagaaaactttaaacagtatgcaaatggcaaatatgcatgggatatcatggagccatgggcaattagcaattttggcagcaatgtagacggagaagatgagagcgttcgtgttcctgctgatctggaagcatggtttggttctcaggtaagtggtacttacggttaccttggttatgatcttgcctggaaagaagttgaaaaaggaaatattcctcagacactttacattccggatggctgtgatctgacaatcacaaatatggaaattctcagcagcgttcgtatcgttgttgaaaaaggtggaaaactgacattagatgattctgttgttcagggtatcattgaagtaaaagatggcggaacattctccatgaactatagtgcttatgacgaagaatttaaagtaggtgcttctatctgtggacagcttcgtttagaggatggtgcaacacttgaaaacgcagcaatttattctcatgcgaactatctagcaaatggaaatcttacagatcgtacaacgtctgagccagtagtaactgttacaggaaacgtaacgatcaaaggaaacgtatacatcgaaggtgatgacgcaggaaatgagatcggtcagactgcattacgcgtatcaaacggaacacttcatctggaagatggttcacagctggtagcttacggcggaagcggaaagacactgctttacagagagggcggtgtagcaatcaatcttgacaatgcaacgattgatggaaatggaaaagtaacagcaatcggtggtgatgtactctggggaaatggcggaaacgctgtaaccggaaatggtaccattgctacaaaatctgcatttttacagggtgcaacagcaaatgagtcaaacaaagcagaagctggaaaagcaacagaaggaaccattaaagtgacaggacaatatcgtcatatggaagacggtactgtgatgggggcaactgagaatgatccacttgcagaactgtactggaagactggtattgacgctcagccaccattggataaatttgaaactcctgaggtaacaaaacttatcaatgttgttgatatcgagagtcaggtttacaacggagaagttttaaaaccggttgttaaagttactgatgcggctgatacagaaaaagttttgacagaggacgttgattatttcgttacttatacacagccggcacagagaagtgcagcagatgaatatgtaaatgctggtgactacactgtaacggtaacaggtatgggtgagtattacggaacagcaacaaaaacattcacaattgaaccgaaacagatgacatttgatgttgcagcagattctgattctgcaatttatgacggacagagcaagacaccgactctgacaatcaaagacggtgataccgttctgacagaaggcattgactatactgtatcttatacatatggaagcgatagcaatgttgcagattttgcaggtgctgagtttgtaaatgccggtgagtatacaatccttgtaactggtattggaaattatgcaggttctacaggaaaatttgtattcactgtaaaacagaacaattccgataacaataataacggttctaataacaatggatctgacaatggcaataactccaatgcaggcaataacaatggatctaataacaatggaaataccaatacagatcagaacaagaatcagactgtaaacaataacaaaacgaatggaaatggctcagcagcttccaacaaaacaaatcagacggttaataaaacaacagctgctactgcaaataatacatctgcagcgaaagctccgaagacagcagataccagtgcaatggttctgtggtttgtaatgcttgcgatcgcaggcggtgctctgacaactacaatgtatgctgtaaagaaacgcggctagaaaaagacagttgtacatcataatattttcataaatgacattttgcgtgaactgtaacggaaatattttcatgactggaaattgcgtgattgaaatttgaaattaactctgcggcatgatacaatagggtatcatgttgcggagttatttctttattttacgataaggtattgtgaaagggaggacgtatggaaaattctcagcaaaagaagaatgcaaatgtttatctgggaaggtttgtgctgatatttttactggcagctttatttgtggcagtatatacattgattttgcagaaaaattataagacaaacacattggaagcggcagtggaacgtgatatcgaatgttcggatgcaatccatacgctggtatcagaccggttcaataaggcggattacgatgagatcaataccaaggcggatatggataccccgcgttatcaggagcttcagcagagactgaacgaattgcggacattgaattctaccagatatctgtatacggcaaaacgaaacagtgagggaaagctgatctatctggtggatggactggatcttgatgcggacgattttgcctatccgggaacttatattgaggatgagatgattccatacattgaagtggctttagagggtgagaatgtttattcacaggatatcgtggataccacctggggacatatatttaccgcctgttatccggtgcgggatgctgaaacgaatgagattattggtgcgctttgtattgaaatggatatggaatcgtcctatctgtttctgaaaaaaataaacaacattgtgtttaaggtagcggtggttgcagcgtttgtaattgtgctgatcatcatatttatgtaccggtggatgcgcaaacaaaacgaaaaagatctgatccagcagaaaaaactggaagaaacagcggctgcagcagatgcggcaaatgcggcaaagacaaggtttctgctcaacatgtcccatgatatccgtacaccgatgaatgcaattttaggatattcaaagctgatgcgtggtcatatatcagatccggaaatgcagcattatcaggagatgatcgagcagtcgggcaatgtccttctttccattatcaataatgtccttgatatggcgcggattgaaagcggtgagatggaattagatgagaattacagtgagaccggaaatattgtgagtggtgtctgcagcgtgtttgaaatggaatcacagaaaaagaatctgacgattgaacattatgtgaatgtgcagcatccggatattatatgtgacaaaacaaagatgcaggaagttcttaccaatattatcggtaatgcggtaaaatatacccctccgggtggaacgataacgattacaacagatgaattgcccgatgagagagagggatatatcaagatccggacggtggtagaagataacggcattggaatgagcagagagtttttaccgcatttgtttgactcatttaccagagagcgggatacgaccagtgcaaaagtagtaggaacaggacttggtatggcaattgtcaaaagtctggtagatctgatggatggctctgttacggtcgaaagcgaactgggaaaaggaacaaaatttacagtgaccattccgcataaaatagctccaccggaatattacgcgaaaaaagcatcaaacgaagccaatgaaaaagtggaattttccggaaaacatattcttctggcagaagacaatgatctgaatgcagaaatcgcaatcttattgctggaggaaatgggattttccgtagatcgcgtagaagatggcattttctgcgtggataaactggaaaaagaaccgacaggaacttatgatctgatcctgatggatattcagatgccgaatatggacggctataaggcagcatcgatcatccggcatttgccggatgtcggcaagtccggaatcccaattgtggccatgacggcgaatgcctttgcggaagatcggaaaaaggcgtttgaagccggaatgaacgggcatattgcgaaaccaattgatgcgtcaaaaataaaagaaacattggcagagattttgaagtaatgaaaaaacttattttgtggtgctaatttagtatttcaaatgatagagaatattttaaatgaatctgattgaaacttttggaagtggtaacattgaaattagaaacagaaaatcaggtttttggttgtaacgaaaatagcgggtgcagattattttttcttgaaatgcgattgttagcatgaaagacaaaataatctgtgcccgctttcattatcttccgttatataattgttatataattaaggaagaaaaattttaagataaattagcactcaatgcttgacgtggctaataacatgtgatataacatacttaacgcaaggaaaagcgttatacaacaagtagaacataataattaagaaaagtagaaacacccggaaaggaggggtttttatgaatatccagaaatttacacagaaatcaatgcaggcaatccaggattgcgagaaattagcttatgaatatggcaatcaggaaatcgagcaggaacatctgctggtagccctgatgagacaggaagacggtctgatcccgatgctgatcgagaaaatggagatcaacaaacagcatttcatgaacaatgctgaggatcatctggcaaagagagtgaaagtttccggcggacaggtttatgtcggtcagcaactgaataaagtgctgatcagtgctgaggacgaagcaaagcagatgggcgatgagtatgtatccgtagagcatctgttcctgagcatgatccgttacccgaacccggcgatcaaagaaatcttccgtgagtatggaatcacaagagacagattccttcaggtattatccaccgtccgtggcaaccagagagtcgtaagtgacaatccggaagctacttatgatacattggaaaaatatggttacgatatggtagagcgtgcaagagatcagaaactggatccggtcatcggccgtgacagcgagatccgaaacgtggttcgtatcctttccagaaaaacaaaaaacaacccggttctgatcggtgaacctggtgttggtaaaactgccgttgtcgaaggtctggcacagcgtattgttcgcggtgatgtaccggaaggactgaaagacaagaaattatttgcccttgatatgggagcactggttgcaggtgcaaaatacagaggcgaatttgaggaacgtctgaaagccgtattggacgaggtaaagaagagcgaaggcaagatcatcctgtttatcgatgagcttcataccatcgttggcgcaggaaaaacagacggagctatggatgccggcaacatgttaaaaccaatgctggcaagaggtgaattacattgtatcggtgctactacactggatgagtaccgtgaatatatcgaaaaagatgccgctctggagcgccgtttccagccggttatggtagacgagccgaccgtagaagatactatttccattctgcgtggcttgaaagagcgttacgaagtattccatggcgtaaaaattacagatggtgcgctggtttccgcagccgtactgtccaaccgttatatttccgaccgtttcctgccggacaaagccatcgatctggtggatgaggcgtgcgcattgatcaagacagaacttgattccatgccgacagagctggatgagctgaaccgtaaagtaatgcagctggagatcgaggaaactgcgctgaagaaagaggaagacaatctgagcaaagagcgtctggagaatcttcagaaagagctggcagaactgcgcagcgagttccagacaaagaaagcacagtgggacaatgagaagaaagctgttgagcgtgtacagaaattacgtgaggaactggaaagcctgaataaagaaattcagactgcacagcagaattacgatctggaaaaagcagcagaactgcagtatggcaagaaaccacagctggagaaagaattagctcacgaagaagaaatcgtgaaaaataaagatatgtcattggttcatgagagcgtcagcgaggatgaaatcgcaagaatcatttcccgctggacaggtatcccggttgcaaaactgaccgagagtgaacgtaacaaaaccttgcatctggacgaagaactgcacaaacgtgtcatcggacaggatgagggcgtcacaaaagttaccgaagcgatcattcgttccaaagccggaatcaaagatccgagcaaaccgatcggttctttcctgtttcttggaccaactggtgttggtaaaaccgagctggcaaaggcactggccgcaagcctgtttgacgatgaatccaacatggttcgacttgatatgagtgaatacatggagaaatactccgtatccagactgatcggagcacctccaggatatgtaggttacgatgaaggtggtcagctgactgaggccgttcgtagaaaaccatattctgtagtcctgtttgatgaggtagaaaaagcccatccggatgtatttaacgtactgttacaggtattggatgacggtcgtatcacggattcccagggacgtaccgtagacttcaagaacaccatcatcattatgacatccaaccttggatctgcacatctgctggaaggcatcgatgagaacggcgatattaatccggaagcagaagaacgggttatgaatgagctgcgtggcaacttcagaccggagttcttaaaccgtctggacgagatcatcatgttcaagccgctgaccaaggacaacatcggaaatatcattcatctgctgatgaatcagttgaacaaacgtctggaagaccgtgagatttccgtagaactgacaccggcagcagagagctttatcgtagagcatggttatgacccaatctatggtgcaagaccattgaaacgattcctgcagaaacatgtggagacattatctgcaaaactgatccttgccgatgaggtacatgcaaatgatgtgattctcattgatgtagatggagatcatctgacagcacgtgtaaaataattcaaaaatagaattaagagacttagcttagttgtaataactgagctgagtctcttttttcgtctattataccaagtcgctggcgcgacggctagccccaggtacgtgaaatcactacttttttcataaaaaaatagcagtttttgtatatatgttgtattgttaagttaccacacaaaacaatcacatattcacaagaactgctatgattagtttaccatggatttttaaactcaacaactacatatcttattttttatccgtccaccgcctctttttgaaatgtaacagtactatttattgcatttcaaaggagatttttacgatggacatcaacagctagaagtctatatcccttatatgtatcattttgagaagtttgagaaacaaaatctagaaaaagtttttcgagtgcaagcggaagtattttctttcgttgctatacaaatgcggatgatgttgcagttgatgcatcacatccgaactgccttaacaattcgtttgttaaagttgtccctttgatagtaatgacaagatcattttttgattgacatgtcaatacttttccataaaaaaatcccacatcacactatgtgtgatgcgagattttcttaacttaatgctattgacctcacggtctgggcgattttctgttaggggagtttttttacagccccgtataattagagaattttaccgtttttttcacaaattggagaatgaccggctgtcatagtcaccaagtaaccatctttgccaaaatttatggcaagaaccttgcagttttcgtcataaaaaatttgaataaatacggcattttttggaggattggatccaaaattgtttttaatactgttgtacaatgtcgcaccagaggttggaacattgctatttccgaaactatattgggaattatttttgctctgactgtctaaatagatcaggacttgctgggctatcaactgactggcagttgttggatttttatgccagtagctttgctcatcagaaaacgttgcatttgatatacgaccaagacagtttttgtaagttttaccatcaatcgtacaagaattggtcaatgcatttttcatacttttctcatcaatattcaaaccatagtattcagaagcggcagattgtgctgccgtccagataccttttgcttcagattcaattgctctcgcttttgatttgtcaatatatccggtcagtgccgggatgagtaatgcagcaagaagcgacagatatgttccatctgaaagcgatt

SEQ ID NO: 13067 - DNA, 145 bp, Unknown
  gut microbiota DNA sequence
tgcgaattacttcgctgttctcaatgaatctttcaaggttatttcactgttcagttatcaaagttctttgttcgttgtctttgcgacagcttttatattttatcaaaagcatttgtctttgtcaacaacttttttatttttcttt

SEQ ID NO: 13068 - DNA, 718 bp, Unknown
  gut microbiota DNA sequence
agaagcgttttatcagattccgttctctgggagaagattatacagaagaaaatctgaaaaaaataattgccggagagaaagaattacctgagaaaaaagaaaaagcatctgatcagaaagttgtgaaatcagaaaaacggaagtttgacctggtggtggatattcaagaaagaataaatagcaagaagaatgctcggaataatatacgagtatttttttgtgaaatggtgcaaattccggctcatcggaccacgcattccgctaagaactgatcagcctttccggatgtaactgaacgcatttccgcttcagctgatcaataagttttcaacgtgttatagttctttcgtagtcatcaaatgattgcgaaaggaggcataactatgcaagactacaacacgattatcggctccatccagatgcgtttgaatggatgccagaccaggtccgttatggaccgttacaagattggctcaggtacattaaatctgatcatgagccgataccatgccaacggaatcccaatcgaggaactccgaatgatggcacctaaggaagttgagaaccttttctatccgcagaaaaatctacagaggaaagatgtcccacttccagatttccagtattactatgacagaatccatgcaccagggagccgcatgaacatttcgttctgttggctggattataaagaaaagaatcctgatggttatgagaa

SEQ ID NO: 13069 - DNA, 9875 bp, Unknown
  gut microbiota DNA sequence
tataggaggtacagtccaatctacatttaaaatttaacttcatttattataacgaaagaggtacggtccaatgaaatagttattcaaactttcatcatttaaatttttgaaaacgaggtatagtccaatgaaatagttaatttcttttcataatttaaattcttgaaacggagtatagaccaatggacaggtaaatgaattaatttaatcttagaacaatacatagttggaggtacagtccaccagagattaaagtaatcagcagttttttctgataccagaattgaatacatgacagttaccatagtaaaagaggatcaagattcagatggcaacgttcagatatgaatcggatcaaaaagtcatgatgaaggagatttgaagacgtaacagaaaaggctcaaaggaaaaatcgaatcagaaaattgcataatgagacatatcaagagaaaacggaggttaattccattggagagtatatgttattaaggctacattgatatctgtaaaacaaacagtgttgatgtagccttttccagtgcacttctatcgtgccaaacttaaagtattaaatttcttccttctatcacaccgtgcagaaacctcaaagctcttgcattttcccaaaactctgtcatccttttcttgccaggcaatttcctctcaacttctgccaattgttttctattgacactcttcccttgtaggtgtaatctagtattgaaaactacatgttgtcgttttagcagacaacaagaaaggtactagatacatgagagagattatcatcaccactgaaagtggttccgatcttccggaaaaccttgtaaaaaaatacgatataaaagtaattcctatgcacatcgtcatggatgcaacttcctatgcagatggaactatcagcgtagataaaatctacgaatactataatgaaaccaaaaaaatcccgacaacttccgctgtaaacgttggcgaatacattgacttctttaatgagatccgcgcggaacatccggattgtgtcatcatgcacttggcatactcctctctggcttcttctacttatcagaatgcagagatcgctatccgcgaatttgaggatatttatctgatcgataccagaaacgtatccggcggctgcactgctcatcttgcaaaggcatatgagatcattcaggcaaaaaaagatactgtgacagattacaaagctctggctgacgaaattgaatcctggaacaaaaaagtattctgttcttttattccgggtaacttagattacctgaaagcaggcggacgtgtatccaatgctgcataccttggcgctaccctgcttcgcctgaaaccgctgattgagattgtagatggaaaacttctggcttctaaaaaataccgcggttcgattgaaaaatttgtggatacatatatggaagaatatctggcaaaacatgatgtttccagaaaatgtctgtatctgatgtactctaaaggactttctcaggtagcacttgatcgtatgaaagaaaatgcgatccgatttggatttgagagttatgagtatgttatgacaggatgtgtgatcagctgtcatagtggtccgggagcaattggactggctggatgctgcgaataaaattccttcgcatatttttgaaaaaaaattttcgggttatgtaagagaatcccacatttttcatcatgcaggctaagacgcctcgcctgatgaaaaatatgggattctctattttcgttacgactttcttttttcaagtaacatgctcactcacaccacataacacgcaagttctatgtttttttacttgtgctacatttttgtttttcaaggaacatattctctcacaccagctaagcgccagttataccttagtgtatgaacttaacagcggtaccatatgcaataacttcagctgctccctgaatgattgcggatgtggcaaaacgtacgtttacgactgcatctgcgcccatctgctctgcttctccgatcatccggtgaattgccagatctcttgcttcgttcatcatctctgtatatgctttcatctctccaccaaccaggtttttgaagctggctccgatatctctgccgatatttttacactggatggtgcttccttttaccattccaagcattccaagttcttttccagaaatataatctgtgtttactaataccattgtgattcctcccattttctaaagtctctctgttccccatacaacaatcagggaaactatgccagctcacgctgtccaaaattccacctcaaatctaacatatatttgacttgaaactagttatctcctgatcctgcatatcgctattatagcataggctgtatgagatgtgtggattttactccaaatttaatttattcttcaaaaaccaggtggtcacaaagaaaaatacgacactgtaaattgcatctgtgatgcactgttttgccagaattccgatataaccggctgatgccagtccgtctccggcttcaaagaacattccagcagtgcctcccgctgtctcatttactgctgcagaaccactgagcatatcaataagactgatatttgttaccgtaccgataattcccataatgatcagaatgatgataaaagtcagtacgcagtaaaatactttatggctctttgcagccgcaccgattgccatcgcagtataaaccagaagaacaatacgaacaatttgaataataactgccacaatggacataatcacctctccggcactttcccggaataatttaaaaatattggtccagtcgatggatgcccaatcaatatctgtcactgaaaagagaccattgccaagcatacctgtcagtacaagaacgaatatggatacgaacagtaccgcaatactcagtaaaatccagatcagtgagctgattacttttgatgcaaccagcatccaggttggaactggaagggtatgcatcagataaccttcccctttgagcagatttttataaaaacgctgtagaaccatcacaatcgttacgatcatcaatgccacgatcaataatccatagatcagaccactgatcacaactgcaatggcattgccctgtgtcgcacccagaatcattcctctggcaataaatccaactaccgctgccacaaccaacacagccagatataatacgcccatcattctgctggttgattttaactcatattttaacaattttcctaacatctgaatacctccctgaacaactcatctactgatttatgttctgtctcacggatttcatcgacactgcgatgaaaaacaacgcttcctcgattgataaatactgcttcgtctaatacacgttcaatatctgcaattaaatgtgtggacattacaaccagtgcgtcctctgaataattacggatgattgtatttaaaatatagtcccttgctgccggatcaacaccgccgattggctcatcaagaaaataaatttctgcttttcggctcattgccagaatcaactgcactttttctttattaccttttgataatgtttttaaccggtctttttcacgaagatttaactgtttaagcatttcttcggcttttttccggtcgaagtctgcgtaaaaatctgcaaacattccaaccagtccgtctatgttcatccagtccggtaaataattcgcatccggcagataggaaacaaatgattttgtctccggtcccggttttaagccatttaataaaatttctccggatgtcggctgaagcagaccgtttgctgtcttgatcagtgtcgtctttccacttccgtttggtccaagcagaccaacaatcctgccgctttccagtgtcagattgacatcacttaatgccattacatttccataatcttttgtcagatttctacattccagtctactgctcatgactcgctccctccttctcctctcggatcagatctataatttcctctttttcaaaacccatatttttcatttgctgtaaaaatgtctgtatagtttcccgtgctgtctcgcgtttcatttcctgtattctcccttcatcatctgtcacaaatcttccgcttgttctctgagaataaaccagtcccatgcgctctaactctgccagtgctttctgcatcgtattcgggttgacctccgcctcgctggcaagatcacgcaccgacgcaagtttgctgcccggcgtataatagccggttgcaattctgttctggataatatcgatcaactgtaagtaaatcgatcggtcgtttacaaaattccatgccatatcatcttactgtcctttctttttattctatgcatcttctgtattattgtactgttgtattacttgattaatacaataatactcataaccggttttgtcaatacaaaattcatatattaattcaagtcgaacgcacgtgagacttggtgcgtgattctggtcagcgcaagctgacatcttcttttcagaatcactgcactctacactccgttccggtcggcgcaaaaccattgtctcccagacaatgtgcgccctcgcggagcacttatctcagtcggagattgaactcccactgagaaatacttgttattactcaccacttgcagaagtgggagtcttctcgactgagataaatcataatatttttctgcttatgttatacaaaagaatacaaggcactatctcctcctcaatgtttctttttattccattgacgttattttttgcattacaggaatatgttctggttaaaattgcttaacgatttttttaatatttctatacgctgtcctgttttctgtgatatgataacggtagattcgggaacatacggattgtttttctaactcacaaggataaacttctatccttgaaattatctgattcgtatcgttctgattaaaaatactaaaaataacatggaggaattactcttatgagattaggaacatacaaaggcattcacatgacacgtccaaacactgaagtgacggagcacgaagtcatgaatgtgttaaagaagaaacagaaagaatacgctgttgccacaaatattgatgaccgcagtgcacagactggcgatcaggcaattcttgattttgaaggtcgctacaacggaaagaccattccgcacggaaatggagaaaactttgcattgaccatcggagcaaaggcttttttaccggaattcgataaagctctggttggcaaaaatatcagtgatacatttgatattgatgttacttttccggctgattaccgcatcagtgccatgcagaaccgttccgttgtattccgtacaaccttaaaaaaactgcgtcttgtagactatcaaccgattgatgatgagtttgcaaaagatttttccgaatatgaaactttggatgaatggaaagatgagattcttgcaaatctgcaggaacgccgggaaacttccgtccgggaaaaatttgcccggaaagttatggcaaaaattattgccgattctgatattccgatcgatgatgacctgaaagaagaaatgacacagatttattatgatgattttctggatgaactggaaatgaatcagattccgctggaactttactgcaaacgttccggtcacagcgaagatgagatttacgcggataaagaacaggaagctgtggaagcaattcaggcacagagcgtactgcatgcggttgctgcggctgaaaagatcagcattacaccggaagagctggctgaggagcttcgggcgattgcgatagaggaggatgaagatccggaggaattcgtagagactttggaagaggaagatgtggagaatatcgccgatcagcttacgatggataaaacgatggccttcatattggacagcgtaatttacgataagtagagaggagaagaactcagatgagtgctttgggctaagacgcccttcatcactaatctgagttcttctcctttttacgttatgaacacgctgtcgattaccctgctttagtatcggatacacattccgtaaggataatattcaagtcgaacgcacgtctggaaaactgaagcgacaatttttttctaatcgtatactgaattaaccgtctatcggtagcactcgctttacataactatataagcattcttttataataatgtcaaaatttttatgttatataagttcttttatgtatctgtataacttctatcattctaccaatactaatgctgcaaactaaaactttatatttggaggaatgaacatgaataaaaatacgcatacacataacaatacacatgacacgaattgtcacagaaattatggtggtccaagtaaagatgctgttaccaccggtacgtttgatcaggcagataaaactgacaattttgactatgattatctgggaaaatctgcttctgccaatgaccagactggtctgatcccatccggaccacaaaatgatggtgaaatcgaatcctatcaggacgtgtttccatttgcgccaccactgctgaaaaaggataaagattcgctatcataacttctcgctcatataggttttggacaaattcacaaatctacctacaatatctgcacatgcaacacaaagtttattgcttcgatactctatatgcatgtgtggcacgaagtgcagggtgacgcaaaaatttactaatttcactgagtgaattaagagctcctaatttttttcaagaagcggtttcatttaaattcaacttttctgatcgcactacgtaaatagcaggctcagagcaaatttctccttccaagcgattgttagctggaaggataaatttgtctgagtccgctttcataatcttaaagtatagccataaattttaagccacccgaaacaagacacctctaaacgactttgtggtcaagccatttccgtctgtggaatcgaatcgtaaagataatgccacgtaccgtccagtccgtaaacattccgatccacaccgcgattggtccaaatccctgcaccctgcaaagataaatacacagactcacacggaagatccacatagaacaggtcgacaaaatcatggagaatttgacatctcctgctgcacgcagtccatacggtggaataaacgccggaacccagataatcggttttacgatggtaattactgtcatcatgtaaaaacacatatctgcactggccggctccatacctgcgatcatcgtaatcggtttcgtcaaagcccagatcaacagacagcacacaattacgacaaactcagaaagcacagcaagctttttgatataatacaccgcctgctctttttcgccggcaccgatacactgaccgacaatcgtcatcaaaccgattccaattcccatcgccgcaataccattcaaattttccagaatgatcgtcatagcctgtgccgcgattgctgtcgttccaagggttgataccgttgactgaattgccagtttaccaaactggaacataccgttttcgataccggacggaattcctacagaaagaatgatcaagatcagcttcatatccggtcggatgctgaaataatcacggatgacaatctcctgttttggcacacgctgacggcagatcataataatggacatcaaaatacgggaaacaagagtggaaatcgccgcaccagctacccccatattaaatccaaagatcaggatcgcatttccggcaatatttgccagattgcacaacgctgaaattgtcatcggcagtttggaatttccttctgcccggaaaaatgccgcattcgcgtcaaacaatccaataaatgggaaggatatcgccgtgatcagaaaataaatctaggaattgtccataacatcctgttctacatttccgaaaatcaaccgcagcaacggatgacggaatacgatgcacactgccatcagtccgatggagattacaagcatcgccaacaatacctgacgcgccgccttattgcaggctttcacatctttccttccaagatactgggaacagatgatggcaccgcctgctgtcaacgccgtaaacacctgaataaccagcacgttgatggaatccaccagcgaaaccgcagaaatagctgcacttcccacgttgctgaccatcatactgtccacggttcccatcagggagttcaacaactgttccaccatcagcggtatcagcaataccttcagatcgtggttggaaaagagcagcttactctcatcgattttctgtttttgttttttcaactcaatctcaccttttccccttcttttggcagaaaactgtcaaaaataaacatatcaaatgtttcgcgagccgtctgcaattcagcttcactttttatcgtccatgccgcagtttttaccccaaacagctttcggcacatacgaaagccccgaatctggcggtccttatgattataggaaataaaatctggttttgcccagaaattcaacaacagatttgtcaggaaaaaacgcacgatctgcggcattttatcctcgctctgaaaaaagtccatagacaactgtccacgaagcacctttggaaaatgcttgcggtaccataccagtgccaatggattaaagcattccatacaataaacgcccttgtattctgacaacattgcagccgccgcttccgtggttgccttatagtcaaaatcaactttaatttcaaccacaagtggcacctttccgttgaccagttccaggacatcagaaaaaagcggtatcttttctgtgctgttcttcaaagaatactgctctaattctgcatatgttaattcggtcaatttcttatgtacgccgcacatgcgcttcaggtcaaaatcatggaaaaccaccagttttccgtctttcgtcagctgcacatccaactccatgccaaagccatgctccaatgcgtttcggaacgctgcaagactgttttccggggcgtctgaattattgttaaacaagccccggtgcgcgatcattgtattgtcgaaggcagcgaaagaacgtgttttttctgtttccggtcgaagcatgtacacacttaagccaagtaaaccaataatgattgcaacagcaataagaatacttatcagtatcattcccgttatttttcctccgtatcattacagttagttcatctatctcatatctgtgtctgacgctattgtatttcaagtaaaatatacttaatgtagaacttccatcaaaagcatatgtaaataaacatatacctatcatcaatacatactaatatattcttctatgaaccacatctgattttctctatgccggtactttatttaagaaatgctcccattctacgactgctttttcaaattctacttctacccagtaagtatcttcgtctacatccaccgcaatctcacagcagtattcgcctccattttttgcatccttcggtgtaatcacaaatactttaccatcttcctgcattttctggaaagtctccttaaactgatccttcggaatatcctgatccggtacttcgcgcaaaaagacattatttgcatcgtaatattttgcaccctctaacaaaaatcttgtaattttcggagatttgagacgaatctctgtatcgtccagataacgatccaccagagtatcattggatggattgttgtgtcttgctgccgcgccaagtaacaccattgtcataagttctgggttaaactccatttttttcacttcggcatcctggaacataaatttatccaattcattcacacttttatacttcatgtcttttctctctttctactatttgtctgatactggaatctcacgaaaaaattcaagtcgaacgcacgtgagacttggtgcgtgattctggtcagcgcaagctgacatcttcttttcaga

SEQ ID NO: 13070 - DNA, 5076 bp, Unknown
  gut microbiota DNA sequence
ttgcagaagtgggagtctcaactcagactgagatgaataagagtaccttttgccagataagagtgcttatggaatatatggagtgaaatatattatgtagaaaaaggtaatgcatttttgaagtgaaatagatatatagagttgaataaattggaaagagagaagtagaatgagagtgttagaaaatttggagccgaaagaagttttttcgtattttgaagatatttgcagtattccacatggatccggaaatacgcagcagatcagtgattactgtgtaaattttgcaaaagaacatggtctgaaatgccgtcaggaagcatgtggtaacgtgattatttggaaagatgccacatcggggtatgagcaggcaccgacagtaatcttgcagggccacatggatatggtagcggtcaaagatgccgactgtacgctggatctggaaaaagacggcctgcttctggaaatcgatggtgactgggtgcaggcaaaggggacatctcttggtgcggatgatggaatcgcagtggcttacgcactggctattctggcagcagacgacattccgcatccggctctggaagctgtatttacggtaggagaggaagtcggactgataggggcaacggcactggatgcctctgacctgacgggaaaaatcctgatgaatatggattctgaaaatgacggtattttcctgatcggatgcgctggtgcggctacggtggcttgctgtttaccggttaaaaaagagactgtgtctggtcagatgtatgattggcatatagacggactgatgggcggtcattccggtatggagattgataaagagcgtgccaatgcaaataaggcatttggtcgtttcttagcttattgtatggaaaaaacaggtttgtctatcgtttctgcaaatggtggagagaaggaaaatgctattgcaaaacagtgtgatgcggttctggtggttccagaagaagatattgcggcatttgaagatgcagtttctgcgtttgagacaattttgaaaaaggaacatcactttacagatccagatttgcacatttatgtagagaaaaaagagtatggggagtacgaagcgttggataaagagacagcgcagaaactgatggcgctgctgatccatctgccaaacggtgtgcagaaacggattccggagttcccggacagtgtacagacttcactgaatatgggaactttagagcaggcagaggatgagatttccatgacattttctgttcgaagcagtgtgaccagtgagaaagagtggctcatgagccagatggagcatttgacaaaagcgtttggtggatattgtagaatttccggtgtgtatccggcatgggagtatcaggaagattccgcgattcgtccgttgatgatcgagacttacgaggagattacaggtaaaaagccagagacggaggcgattcatgccggagtggagtgcggtattttcagtgaaaaactgccgggactggattgtatttcttatggaccgcagatcaatgatattcatacgaccagagagaggattagtgtttcttcggtgaaacggaattgggcgttgacgctggcggtgttgaagaagttgaaatagttgtggcttaacgggaggtagtgaacgaaatttcagaatttgtaatgttttgaacggaaggtagtgaacaaaatttcagaatgggggattttgaacgtaaagttgtgaacaaaatttcaggattttgtctcagtcgccagcaatcggtccttgagaaaaaatactgaaattttgaatcccagttattgatcgtgtaccattgtgattctgaaattttgcattgcagttattgatcgtgtgttagtgcgattctgaaatttcgcttctcagttatgacatgtttgttcaagcaagatgaacttttagtagaaagtgagaaaatcaatggagaaaatggatgcgtgggagagaaggacggttgtatatcgtagattatttcataaatatccggaaccgggctggctgactttttttgcaacgatttttattgcggagcatctggagaaggctggttttaaggttcttgttggcagggagattttgaaggatgagaaacgtatggatccgccaacggaggaggaaacagctctctgggagcagcgggcggtgaagctggcaatagaacagggaatagcggaagataaagtggcaacatggataacgcggatggatcatcgtaccggaattgtggcaattttggatacaaagcgggaaggaaagacgaaggcttttcggtttgatatggatgcgttgactgtggcagaaagtatggatgtcgacagagtgccggtgaaggagcagtttgtttcgcaatatcagggtgtttgtcatgcttgcgggcatgatggacatatggcattggggctgacttttgcagagtatctggcagaacaggtgaagcagaagcaacatggaaatttagaacattgtgtggaaaatcaagtaaaacaacatggaagatcaatagattgtgtggacagaacgtcggctggtgaggtaatatcaaatggaaatgtatctaaatttaatgaaacgatagcagatttatcaggttcagttgcaggaaaaatctgcggtcgatatatgtttatttttcaaccggcggaagaaggcgtgcgcggtgcctttgctttccgacatcagtggaattttggcaaaatagatgaattgtattgttgtcatatcggatttgcaccggaagatacttttgtggcaggagcgaagggttttcttgctaccagcaagtttgatgtgacttttactggaaaaagcgctcatgcgggattggcaccagagcggggacgtaatgctttattggcagcagcgaaggccaccatggatatgcaggtatttccacgaccgaaaacaggaatcacacgattgaatgtgggaaaaatggaagccggagaagcccgtaatacgattcctgctcacgcaaaaatgatcgtggagacaagaggcgaaacgggagaactgaatacttatatgaaggaacaggcactttcctgtattgagcgggcagcaaaagagtatggtgttacatatgaagtgcagtttcagggagagagcgtcagtgctgctagtgatgaagcgcttagtcagaaagtactggcggtggcgaaatcgactggctgttttttggattatatgttgacgaaggattttggggccagcgacgatggagctgtgtttatggatatggtagaacagcagagcggaaaagcagtttatatgcttttgggaaccagaatcagaggattgcatcatgaatcggtgtttgattttgatgaatcggtattggataaaggttttacgctatataaaaatatacacgaatgtatgtaaacgtatatgctaatatattctcatataggaataaaaatgttggtattaataaggaatctttatagatttttcgtataagttaatatccggaaccataaaatggtacagtttgcgcaggcggtcatgaagttcttcctgcgtcagttcagaaggagtctgagaaagaatccagttatcatatattgtatcaaaaatgcaggagcgtatgccggtcggctgcgctccgtttttggtataaaaacgattacgatttatccgttgacagcgctgtaagtcatttttggctgtttcaatggattccgtctctataataacaggtagaccatctgtaaaacgcccacattcatttaaaagaaggcttcccaaacccttggaacgggcggtagaatgcactgccagataatctaatagataaaaatcagcatccgggcaggtagtaagaaatgcaaccccttcaacattagattcgttattttttaagggaaaactacgctgatcggaagtgatgcagaggactctataaagtttcgtatccatcatgcgaaggatattttttaatggttttacttcctttgcaggaaaataggggatgataaaattctggtataaatatggtacctgtgcggttgtagctgaaaaaatgtgatatgaaggcatatgtaatcctttcttcctaaaacgtgaatgaaaatgtagggatattataagtagcctagattattcacggcacagccgtaaaagtggctgaaaaccatatagtttctatattttaactgaatattgcttttcgcctatcaggcgaatgaaaaaagagcatccatttgtggtaaaattaaggtgtcgaatcttaaaaaataacccaaaggggccctttatgagtattgtaaacaccttagccttagaaagcaatagacagattaaaataaattttgatggaggagatttatcctccgatgcaggcttacttcttatcaaagaatttgtaagcaaacttggtattgataagctttttgtcaaatctttcaagaccaatgattctgcattattcagatatcacacggatcaggaaaacctgctccagatgatatattggcgggaaatatgataacagtaaaagaaacgcagaaaatgcaggaatatacgcaggaacggatcgctcaggcagagcatagagatatagaatttccaacagatgtaaaagaacagatttttgaatatgcgaatctgatcggcgaggaagagaaagttaggacttcggaagtagaagaacagttcgagtatatgtatcagctgttctttttttgttttcgggcgttaaaacggtaatgtttttcttgtgtacagtagagagctatagtataataaaaccagtttttttgcataagtttaaaagctataataaggaaatcggcaaaccagatgaaagtctgggacgcaaagctacagggcctttaaaatggcagccagttgcataaaatgaggtgcactgtctgtctgacggtgcctttttacggtgttatttcacagacgtaacaataatgattttatcaggaaagaatgaggaaaataaaagtatgaaaaaggcaaaacgttgtctgattgcagtggtgtcaggtgtacttgtagcatctgctgtcttgtctggatgtggacagtcaaagaaagaagtatct

SEQ ID NO: 13071 - DNA, 2067 bp, Unknown
  gut microbiota DNA sequence
attttgcatcggaccagcatacttttgcctttctccatactgctttttcgccatcctgtgcttttcttacccgtacctgaatttcttttgctttgtcaatgacgtggttacaggtcaggatataaccgtctgttgtgataatggaaccgctgccatttgatacagagcgtcctcttttcgtacggatgaacacaacgcttttggtctgatccatatattcttcctcgtacttaaagttctctttcggaagacctaaggtatcacctgaaatctgaaatgcctctttttcttctgtaactttctcaggagcatcttccaaatactcgcgatattgttccggaatatgctccggtgtgtaatagctgcgggtttcaccggtcgcctcatctacgcggtttaccgggtttttcgtccaggtcatacgcatgcttttctcaagattttctgcttcacgggcgttagcgaaatgtggcagatcggctgcgatcatatttgtaaaaatctttttgacctgttccttcatatcgtcctccagataaaatttcttgttctgacacatatgttcaaaaatccgtaacagttcctctgctgtataatccggaatcaggtaatttccaccgaatcgtgaataaaaacccggattactgtcaagaaatgtattcatttcggcagggtatccggccgcaacgatggcaaattcacccaggtgatccgtcatctgctccagaatcgtatcgattgcttcctgtccaaagtcatttccggaattttcgctgcgtttgagcatgtatgcctcgtcaatgaaaagcacccctcccattgcacgttcaatgaccttgcgcgtcttgatggcagtctgcccaacatatcctgcgacaagctcggctcttgtgactttgaccacatgtccgcgcggtaaaaatcctgcttccttatatgcttttccgatgagcttagcgaccgttgtttttccgacaccgggatttccacgtaagaccatgtgcagattcagatcatccagtaaatcttcacgcccggacttttctgcattttctctcaattccagtaagtttttcaatttttctttgacttcggaaaaaccaaccatgctttcaatttcttccatggcagatcttgtatcttcctttttcagaggtgttcttgtatagcgaaccatatctgccggaatatctgcaccggtcagttcacattcttttgcatgttcccgcacatagtcttcgccatgcacgctgatcagacgattcatctgagcgtctaagctggccggaaggaaggtattacgaataaaacgtgcgtttccaaaatctttttcttttccgtgaagcttgacatatctggtcaaagcgcgaagtgcatattctctgtactctgcatctgctttcattcccttcgccttcagcattcccatcaggatttctgttaactcctctcctgtgtaattgtcaaagcgaatggtctgtgtgaaccggtccttatagcccggattttgtttgagcagatctttcatctcatcctcgtaaccggcaacaatgacacagagtctgtcgtgattgttttccatataagggagtaaagcacctaaaatattctctccacggcctgttttatcctgctctaacagatatgcttcatcgataaacagaatgccttccaatgctttcttcgcaacttttgcaaaatcaccgttattctctctgttaaatacctcgttcatcaaatctgtggctgtatattccaccacatgaccacgctttaacataccaaggtttcgcaaaatctggccaaagtaacgggctaccgtcgttttccctgtacctgggtttccggtaaaaacgtaatgtccgggatcactctgatacccgccgatcattctgttgcggatgatatcaactgtttcttttacattggcaagtcccaccatattctgaagattttctaatacttttttacgtgattcagaaaccggtttgagatgtttttctaattcttttggaacatgtctgatagtaaggattccatattccatgccattttcacgaatagtct

SEQ ID NO: 13072 - DNA, 1920 bp, Unknown
  gut microbiota DNA sequence
tctgataaactgcggagcagttattcggttatgagcaagtagcgaagcggattgcgaatatccgcttgaccagaatggaaagaacattatataaacaggattgaggcagaatatgagtgaaaagcagaaacgcacaggatcaaattgcgaatactgtatgaattatgaatatgacgaagattatgagtactatgtctgtacccaggatctggatcaggatgagatgtatcggttcatcatcgggcagtttcgggaatgtccgtattatcgcccgggagacgagtacagtattgtaagaaaacagatgtagtccgaataatagtaaggaatacaacgatatgtaaaaaataagacagttgtacgctgagaaatactcagtatacagctgtctttttatatgattttgtttgttttttatagaaacaaattttatcatcctgttgtacttattaatcatgtagtcatgatgaatggcgtatgttttttaaattatatgcagtacatggatcagcagcagccatgcaagtccgtagtaagtaacaacggcaaccagatcgttgacagttgtgatcaacggaccggaagcaactgccggatcgattttgatcttgtgaaagaacatcgggatcaatgtgccgaccatgctggagatcaccatggctaccattagggaaaatccaacgcagccggagatcaggaatgcatgtcccatcggataattttttaacacacagatgtacagaccgatgaatacgaaggagaggattccaaggaaaagtccatttaagaatccgactttcatctccttcaaaacaagaccaaatttttgttttgcagttaatgtttcatcaaccagtacacggatggtaacagccagagactgggtaccaacgtttccagccatatcaagaatcagggattggaaacacataacgatcggcagtacagctacgactgtttcaaatacgccgaccacggaagatactgccattccgagaaaaagcaggatgatcagccatggcagacgttttttgatactggtggatgttttctcatgcagatcttcttcagcagtcaaaccagccagttttgcgtagtcctcacccatttcatcatcgactgcttctacgatatcctgagcagtcagaataccgatcagttctccagtttcggtcagaactggcagagaatcttcggcgtaatctttgatcgtttcgatgcagttttcaattttttcatgatctgttacatatggataagaagtactgatgatgtcttccagttcatcgttttctctggcgatgatcagatccttcagatcaatggcgccgtaaaatttatcggcatcatctactacgtaaactgtggaaatattgtcattttcgcctgcctgttctaccagttcacgcatagcctgacggacagacagttcttttctgatggcaacaaagttcgttgtcatcatacttccgatttcatcctcatcgtaggagagaatcaaatggatgtcatgactggaatcagcatccagcaattttacgattttttcttttgcggatgcttccatctgttccagtacatctaccgcatcatcagaatccatgtaggatacgatttttgcagcctgattgacactgagctctgacagatactgtgtcggtgtctccaagtaggaaaaaatttccgcaagacgtttggcaccaagcaccggatacagtttcttgcgctgctgtggtgacagcagttctaacgcatctgcaatatctctttcatgataatcattcagccgattcaacaggacctcattttttaacgggctctgaatgattttcagtaattcttctgcgtagtttggtttgatgtttaatgtttttttcatctcatttcctcctgacagccctcagatacttagatacattt

SEQ ID NO: 13073 - DNA, 1944 bp, Unknown
  gut microbiota DNA sequence
atttgtcattatgtagttgtttcaaacgacttgattataataacaaaataagtaggagatgtcaagctatatttaaaaattatttaaaaatgcaaagacatcatcccagtattcatctcccagaagatacatggcttctccatggcctgcgcccggagcggtgattttttctttgttatcaccaggttttgcctgatataaagtatccatcatttcatatggaatgaaatcatcgactgtgccatggatgaacagcattggtttttcacagttttttacctgatccagagcagatgcttctttgaatgaataaccggcttttgctatggcaaacaggtttgctgtatacatcagcggaaatttcggcatgccaaatcgaagttttaattcactggagaaaatgtcccatacgctggtataaccgcagtcttcaacgaaggcaactacctgatccggagtatcttctccggctgtcatcatggttgtggcagcacccatggaaataccgtgaataacgattttggcatcggaatcctgagcaatgatccagtcaatccaggaaagaatatcttttcggtctaaccatcccattccaagataattgccatccgtatcaccgcaggcacgaagatctggtgttaatacctgataattgtgatcgtgataatgctgagccagactggttgcaccgaggtggtcgccacggtagccatgcagggcaatgacccagtcatgggagttgccatttggataatagatgccactgcagtgaatatcatcctcagatgtgatctcaactgtctgaccgggattttcagcaagaaatgtttcgtttgcttcctgctgtgcaatttttccttctgcaatggtacgttcggtatcatcggcagtttccgggatttccagtgcaacagttctatttccaccatcaccagagcggccaatagaataatttacaaggtaatttccggcaaacagggaaatcagaacgagcagagcaacaaaaattgtcaggatgatcagtatgatctttttgatgctgagttttttcttttttatgattttcatttatgtaaaaacctttctttgaaatttgtttgattatcaaactattttaatatacatgattttagaggaatattcaagaaaaataatatttaaagtgaagtaatgtttttggagtaaatgtgcgtggactaacgatagaaaattgtgagatgaattataattttatgacgacacagcagagttacatttttgcaacagaaccgctggaagatagagtatctgcctacgaagcagcaatcagtggcaaaatgccggatgtgaacgtgttcaagggcgctcaaacaatttaaaaacaaaaaaagagcggaagccttgattataaggcttccgcaccaaattaaataatgcggaagatggggcgcacgcgatccggtggatctcggatttgcgccgaccggagcgaagcggagatatgaaccttgggttcatgtctccgtccgcaaaaaagaccccaaccaaaggttgaggtcttttgatgcggaagatgggacttgaacccacacgactgcaatagtcacaagatccttagtcttgctcgtctgccagttccgacacttccgcatgtgtcgtcattaatgtttccgacaagaagaaatgataccaaaagtaaggcataatgtcaacagtttttcggaaaaaatataaaaaatatgcatttgaaaaaacagaaaaaaagtgttgacatttaaatgccgttgttgtattatatgctttgtcagctgcggggcagcaaagcaatttgatatgcaggaatggcggaattggcagacgcgcacggttcaggtccgtgtgactattgcagtcatgagggttcaagtcccttttcctgcattttacatcaacgatgcagcaaacaatttaatacgcaggaatggg

SEQ ID NO: 13074 - DNA, 1237 bp, Unknown
  gut microbiota DNA sequence
agcatgcaggccaatataataccatcctcgaggccttcaccaataaattcggtgcggagaatatcatctacgaagccggcgtcacttataagcaaggtggcaactggtgggaagaaaacactccggagatagagaaagctgtagctgccgctgcgggtgccgactacatcgtggcttgcatcggtgagaactcttattgcgagactccgggtaacttgacaaacctcttcctctcccagaatcagctcgacctggtgaaagctcttgccaagaccggcaaacccatcgttctggtactgaacgagggtcgtccccgtctgattgccgacatcgaaccactggccaaagcggttgtcaatactatgcttccgggcaactatggtggcgatgcgttggcaaacctcattgccggcgacgccaacttcagcggaaagatgcctttcacttatccgaaagaaatcaactctctgattacgtacgactacaaaccgtgcgaacacatcggcaagcagatggaaggtgcttataactacgatgcgcaagtatctgtacagtgggcgttcggttatggattgagttatactacttttgcatacagtaacctcaaggtggataagtcggactttaccgctgatgatgtgcttactttcactgtagatgtgaagaataccggtgaccgtgtcggcaaggagagcgtgttgctcttcagcagtgacctcgttgcctcccttactcccgatacccgccgtcttcgcgctttcgagaaagtggaactgaaaccgggcgagacaaagaccgtgactctgaaactgaaaggctccgaccttgctttcgtaggctatgatggcaagtggattctggagaaaggtgacttccgcatccagacgggtgaccagactgtgaacgtggtttgtacggataccaagaagtgggagactccgaataagtgatacgacaaggtcttttagacctttagaaccatagtaaaagggccgatagcatgaaacaagctatcggccttttatttttccgcgttgtctttcaacagtatcttttttccgcttgtacctccttacttcttttcctgaaacaatagagattgtacgcatgagatgtatatctcatgttgttcgagatgtgcatctcgttgtgcttgacatgtgcatctcatgcagtatggaacgtgataattcatttcataaagtataagcttctgtctcataagattatatgtttt

SEQ ID NO: 13075 - DNA, 17872 bp, Unknown
  gut microbiota DNA sequence
ttcatacgctcaattactttgtccgtattggcctggttctgattcagcgcaccgccataagaaaaagcatcctgcaggaatatgtcatgattcagttcttttacataatccataaaacggatagaattaaagtcaaacacactctttgtattgtcgcgctccccggaaggaactggatcaccggtaatgatcatcagattgcggattccgttgatatgagctcccagcaatgtggaatgcatgctgatacggtttctgtcacggcaggcaatatgtggcataacaggaatatccaccatggaacttacttttgcagccagcaaaacagaatctgctcttgctctggccagtggagaatccgccagagtaataatgtccacgttgctctgttttaacaggaacgctccttccatcagtttctgcgcattctggtcaaaaggcggatccaactccactgcaatgaccttttctccacgctgtaattttgccataaacggattgtttcgtgtttgagatacggtatcttctgcacctttttctgccgccagttttttctgtggtacttttcctgccagtttttcgcaaagcacccgaatgtgctttggtgtggtgccacagcatccgccaaggatatttactccaagatctgcgatctgctccattttttctgcaaaatagttcacgccatccgcatgacctgcctgtccacggacaatctgctgatatccactgtttggcaatacctggatatatttctccgtagccagtttctgcgccttgatcagtttgtacatatgggctgcaccaagcaggcaattacatccatagctgtcgatttccggtgtctgtgctgcctccgcaaacagacggctgatactgattcctctcgtcgtatatccatttcgattggcagcaaaggaaatcatcacaaatgcttccgggcatttttctttgatatagcgagccgctattgcaaccgctttgatatcagagaatgtctcaaaattaaaaatttgtgccccgcattccagaaaacaatctgctaaaaaacggtattcttctgtctcattaaattcatcctcgtaaaacagattttctgccaccgggccgatatccgctgccacaaaaatttcttcctggcgtttctgtgccgcatcctgtgccagtttccaaccagtctggattatttttttcacataagcatcctgctcctgacgattatgaatgcctttgctcagtgccatggcatggtttgccgcaaatgtattcgtacggatcagtctggctccctgctccagatattcctcatgaatccggctgatcagttccggctccaataggtttgcttcctctgcaattcttccattctctgtcttttttctgtcatagtaagtacccatggcaccatctgtgatcagaatatgttcttttaaatattctctaatcattattttctccaaattccatctatggtccatctcagtctgagactatatacctactgaaataaaaaacgtacctatattttctatgtattataacgcattttagcaggtactgaaaatggcttttattccttcttctgacctgcattgctgtaaagtttcttcttaattcttttttctaccagttttaaaataccatttacacctagtaccatcgctatggacaacacggttccccagacgatttttaccacattctgggtacgcatgccttcaaataatatggttcccaaaccgcctgctccgacggtggacgcaatggtcgcaattccaatggtagaaatgatcgcgatatggattcccgcgatcatggtatctaacgccagtggcaatcggatttttcgaaaaatctgatttctggtcattcccattccagtggctgcctcaaggactcctggttccaccgccgtaaatccgtcggtaaaactttgcaccagaataaactgattgtagatcaccagcaccagaatcgccgtctgcatgcccaatcccgtcaccggcagcagcagggcaaacagcgccagacttggaatcgcatagatcatactggaaacccgcatgatccatgttgtgattcgcttatgctccatcaccagcatggaaatcataaatgccagagcgatggaaatcaaaagtgtaatccctacaatctcgaaatgctccagaacagcctgtattaacttgtcataatgtctcgttgtataagatataaaacgtgtcatctgaaaaagtttaatccttcctgtaccgactgcagcaatgaagccacatattcattcgccggatattccaaaatctgttttgcagtatcaaactgctgaatttttccctgattcatgatcatgatccgggttccaagtttcaatgcttctgtcacatcatgggtgacaaacatgcaggtcaatcctgcacgctcatgtattttcaataattcatcctgcagttttgtccggttgatagcgtcgatggctccaaatggctcatcaagcaacatcaatgacggaccagctgccagtgcgcgggcaagtcccacgcgctgctgctgtccgccggaaagctgcgccggataacgattgcgatactgttccggattcaaatttaccaattccagcaattctgtcactctggtatggatccgttcggcatcccatccaaggatttccggtaccactgcaatatttttttcaacggtcatgtgcggaaacaagcccacctgctggatcacatatccgatttttctgcgcagctgcaccggatctgtcttctggatattttcgccaaatacatggatttctccggaagtcggatcatataaccggttcaccattttcatcagcgtggtttttccacaaccggaagtgcccagaatcgtgatcatttctttttcctgaatctgaaaactgacatgatccacggcgttttccgttgcattcggaaaccgttttaccacatcctgaaattctactgcaatgctcatccttctattcctttctacacagttccagacaattttcttcctactttatatggaaaaatgtctggtttctgtgcatcttttctgattctttagtcctgctattttattgtagcgtaaaaatctgctgctacatcttcgtactcttctttgtcgatgtctacctgtgcatttaattttgtcattgtctctgtatcaattgctgcactgatcttgttgatgatctctgctacatccggatgtgcatcaatcacttcctgacgaacaaccgggataatgttgtacggaggccagaaatgtttgtcatcctctaacagaataaattcattactgctcagctgtgcatctgtggtgtaagccggtacacagtctacctcatcattttccattgcctgatatttcagagaattatcaaaggtatttttagatttgaaattaaatgttccgtatgtctgctccagtcccggaagtccatcttcacgctcaaaggtatcggatgttccaccgaaacggatattttctgcatttgcctgaaggtctgaaattgttttgatgccatatttctctgccacgtctgcacgcatggtcagtccgtttccgttgcttgcctcacacatatccagaacatccagattgaagttctctgcatacattttctttacggtatcgtaagtcacctgcgggtctgtttccatcggctgatccagaatggtcagcaatgcagtacctgtgtattccggatacatatcaatctgaccgtcgcatactgcctgatggatcagattgtcggatacctcaaattcacggtctacggtataacctgcatcttccagtgccagcgcatataattcgcccagaattttgctttcactaaagctttttgctccaatcttaatggtagtgtcctcgtttgcactgctattgctctcagttgctgcacttccatctgctttctggtctgttgttccgttacttccgcatcccgcaagcgctgcaaaagacgcaactgcaaggattactgcaaataatttctttttcatctctttttcctcctgtagttcattctttgaacaattcttctatatgatatctattgatagtatgctctggaattttctccttctgcactttgttttccttacatttagcaattcatatgctacttttatatttgatttgttaagctgctcggctcaattttttctgaatcgcgccaagtcccatactgcaaagcattgtgatcaccgctacggttccacccccgatcaccagatattccgttttcagcagattaattccattaaaaatcagaataccaagaccgcctgcgccgatatacgcagccagtgtcgcacttgcaataacctcggacatcgccatgcggataccactgataatgcccggcattgccaacggcacttccacctggcggaactttctctttttatccattcccatggcatctgccacttccaacataaatgccggaacctgtgaaaaagccagtgtcgtctggatcagaattggtgggattgccagaataaccaacgctgtcaaagccggtttcacaccaacgcccataatcggaatcagaataaccaacaccgcaagacttggtattatacgtaatgcactgaatccggtggtcagtatttttttcacctttggcacacgaaggcacaggattccgcatggaataccgatcgcagctgcaatggcaaccgccagaaggcttagatacacatgctgccaaatcatatgcagatactcctgcccatgcgtttgaaaatattccacatatgcttgcatgacttctcctccgtttcctgatatttctatcttgtctgcataaaaacagccaaagtttactgatacttactttcttaatcttacctatattagcaaaaaaacaattatcctgcaagccaatatcagcctgacgcaacctatcttactacattttagagtaaattactaggtatttttgtaacttccatggttacaacaactttttcaatatttctttcacatatcttggtacttttttacaaaaagcaatcggacatattttgcaaaaaaatcctttttctcatttttcctattcttctataaagaaaaaagatagcagttgtatcgctacaactgctatctcagtaaaacggacattcacaatccgcttctgctacttgctcatgaacataatcactttgcttatcctgcgttcaaacgcttataaatttgccaataccccaaggattgctccaaaaatggaattcagcaatgtcactaccaagaaaatgattccaagtaccagacctgctgtcgccataccttttttctcactgtgacgtccctttgttgcaaatacaattgccagaatggttgtaatatatccggcaatcgggaacagccatgtcacgatagagacaagtcctaaaaccagtgatgccactgcacggttattattattgttttccataactttcctcctgttgcttctcttttgtgctttaattcgtatagaatatcatatttcattcagagaaacaatctgatatctcttaggattttcttagtttttctttttagaaaattttgtcttaaatacgtaccacagtgcacctgtgatgcatacggaagaatatccaccgcagataacgccaaccatcagaggtcctgcaaattcacggatggaagatacacccaaaatgaatagcataaataccatgatgaatgttgtcagggaagtattgatgcttcgtgacaatgtctgtgtgatactcttgtttacgacctctttcagatcggtatttctctgacttcctgccagagccatattctcacggatacggtcgaagataacgatggtcgcgttgatggagtaacctaccagagtcagcatgcaggcaatgaatgtgctgcccacagatgtctgggataatgcgtaaaatgctaatactacaagtacatcgtgtaccagagcgataaccgcactgcttgcaaaacggatatctttgaatcggaaccagatgtagatcagcatacagattgtcgcaatgatcacggctacgattgcatcacttctcatctcactactgatggtggagctgatgtttgtagatgtaatatcgctctcctgaacaccgaagttatcttccattgctgttgccagctgttcacgctcatccagatccagtgttctggtcttgatgatgatagagttgctgtctgcaactttctgtgtctgaacgtttgcatcgccggttacttcttctacataaggtacgatctgatcatcaatctcctcaatggtgtaatctttgtcaaatgcaacagttgttgctgtaccacccttaaactccatgctgaagtttaatgcctgtccgttaccagctttgtgtgcgcccatgccaacaaatccagctacgatcactgcaagggaaattccgaagaataatccacgttttccaaggaagttgacgctcttgcgctctttcttttcaccgtaaaatttcttatcctggaatcccagtccatacaatgcttttaccagccatctggagattcccagtgccgtaaacatggagaatacgataccgattgccagtgttgctgcaaatccttttaccgtacctgatccacgcagaccaagtacagctgcagcgatcaatgtggtgatatttccatcaaagatcgcggaaaatgctttcttaaatccaatatcaatggactgtgcaacagaatgtcctgctgcaatttcctcacggatacgtgcgaaaataataacgttcgcatccaccgccataccaatggacaggataatacctgcaataccaggtaaggtcagtgtaatgtgatataaatgtaaaattgcaagaatgataccggtatagataagcaatgcaatagatgctgccagtcccggaatgcggtatgcgatcagcatgaatgcaatgatgatcaggataccaatgattgctgcaataatacttgtcttgattgcctgagaaccaagttttgctccaacgacctcagactgtaactcttccagttccagtttcagagcaccgcttcggatctgggaagcaagtgcttctgcatcctcataactgctcataccactgatcacagcttcaccatttgtgatctggctctgtaccgtcggataactgatacactcaccatcataataaattggcagtactttattcagatattctccagttttttcagagaaaatcttagcaccttcatcattcagttttaactgaacgacatatttactgccggatgttgttgtatcactctgtgtggcagcctgtgcatcggctaccatctcaccggtcatgaatgtctcgccctctgttgtcttaaactccagagtacccggtgttccaagttcttccagaattgagtttgcatcagatacgcccgggatctctacggagatacggttatcgcctacctgataaacctcagcctctgtgctgtaagtctcgacacgtttctgcagtttgtatacagtatcactcatatcctctgcagacggtgtctcatcgccttttacctggtatgtaatgctgacaccaccggcaagatccaggcctaatttaacacctttgtcattgtcctttgctgcggtaccttttacaataccataagaataatagccaagcagtaacatcgcaatgatcattaccagaaagactacgactccctttttctttttcatccttctacctccatctcagcttctgccgctttgatcatgattgcacattcaatacgctttttctgaagttcacagccaatatcatatgcatcattgatatgtccatggaaatgataggagtttgctgcgcatccgccgctacaatagaattttgcaaaacattttctgcatttttcttttgcataaacgttacagcatttgaattcatcccgaatgtcggtacgttttacgccgtcccagacatttcccatcaggaattcttcatttcctacaaactgatggcaaggatagaaatcaccccacggtgtaactgccaggtactcggtacctgaaccacatcctgataatctctttgccacacatggaccaccctctaaatctatcataaaatggaagaaattgaaatcctttccggctttttttctttctaccatttcagcggcaagtttgtcatattcctcaaacagcttcggcaggtcttcctcacggagtgcgtactcctcagaatcctctgctactaccggctcaacggaaatctgtttgaacccaaggtctgccagatgaaggacatcatctgcaaaatccagattgtaatgagtaaaagtaccgcggacataatacttgtcctgattgcggctctctgcaaactgctggaatttcggcacgatcatatcgtagcttccttttccgttacggaacggtctcatgtgatcgtgtacttcttttcttccatcgatacttaagacaacgttacccatttctttgtttgcaaattccattacttcatcgttcagtaatacaccatttgttgtcagtgtaaaacggaatttcttgtcatgcagcttctcctgctctctgccgtattttaccagatctttgacaacctgccagttcatcagaggctcgccaccgaagaaatctacttccagattgcgacggcttccggagttttcgatcaggaaatccagtgctttctttccgacctcataactcatcagttctctgtgaccatgatattcgccttcttctgcaaagcagtagcgacaggcaaggttgcagtcgtgtgcaatgtgcaggcaaagtgcctttacaactgtcggacgtttcttaaagtccataatgtaattttcgtattcgtcttttgtaaacaactctccgtcttctgccagggaagcgacttcctcacaggcttctttcacttctgcctcgctgtattttccggacagttctgctacaatctcctccggtgtgtgatcttcgtacagagcgatcacatcataggagacatcatctaccacatggatcgcaccactgtttacatcaagaacaatgttataaccattatttttatactggtgaaccaaatgtagttcctctctttctatttttgtctataaaatcagcaaattccgctgctttttatttttcctctaaacgtgcaaatgaccgcatgccttagcatacggccctttgttcataatccgttttgtttttcttatttgtgctcgcagctctggtttcctactgtacaggaagttttgcaagcagactggcatgatgtctggcactcaccacatccacctttttttactgtgttctgtaatctttttgtatttaatgtttttacatgtttcatggtcagaaaaactcctttctttattatacatgtcaagagtatagcatattttccgctataaaggaagtctttttttatccgcatgcaaagcaaaacattttttcacaaaacagatataaaacccttacattttaaatggggaactgaacatattcaactgatcattcctccgatcattccggctcccatgcacatgatcaatgtcatgccaacatgcagtccatcaccggaaattccctggttcatcaacagggaaccgatcagtaacacgacaaaatatgctccgccgatcagaatcccccacaaaaaacgtctcgttttcatccgctttccgataataatgccacccagcagtcccgacactacatagattaccataatgccgatggtgacaatattctccgtcagctccattttataaagaagaaatgccagcaaaaacagcgctgcccccgttaatatgtacataaccagcaatgtactcaatactttcagtacgatcttgttatttccttcagctcgttccatttttcttcctcccattactgttttcgatttttatttctcatattttctgtcacaatttttttctgttatacatatatattcggacaatccgacggatagaacctctttttttcgcaacaatctcttgaaaatcctatttgtttcctgtaatatatagaataaaaattgtaatcccacagcgcattttacacataatctgtgacacgctgtgcttacaggcaacatatttattttagagaggtgaattatttttggacataagttccacaatacaattaatcatactggtcattctgctgggtttatcagcgttcttttcctcatcggaaacggcactgactaccgtaaaccgcatccgtatgcggtcactggcagaggaaggaaacaagcgtgccacccgggtgctgaaaatcacggatgactccgcaaagatgcttagtgcgatcctgatcggcaataacgtggtcaacctgaccgcttcttctctggctaccacccttaccattcacatttttggcagcaccggtgccggaattgccaccggaatcctgacggtactgatcctgatcttcggtgagatttctccgaaaaccattgcaactctgcgggcagaaaaaatttccctgcgtttttgtaacatcatctggatcctgatgaaagtcttgactccggtcatctttatcatcaatcatctggcaatgctggtacttcgtctgacgggtgtcaaagcttccgaaggcaagcaggccatgacagagagtgagctgcgtaccatcgtggatgtcagccatgaatccggtgtcattgaatccgaagagaaagaaatgatcaacaacgtattcgattttggcgatgcattggcaaaagaagtcatggtaccacgtatcgatatgacctttgctcaggtggacagcagttatgacgaaattctcgatattttccgggaagaccgttttacccgtctgccggtgtacgaagagaccaccgatgatgtcatcggtatcttaaatatcaaagacctgcttttatgtgaccgggagcatttctccgtgcgggagctgatgcgcgaaccgtattttacttacgaacacaaacacacggcggatcttctggtggagatgcgaaactcttccattaatattgctatcgtacttgatgagtacggcacaaccgccggtctgctgacattagaagatctgattgaagaaatcgtcggagagatccgtgacgaatacgactatgacgaagaagacccgatccagaagatttcggatcatgaatatctggtggaaggttccatgaatctggaagatttcagtgatgcactgaacctgcatctggaatccgatgattacgattccatcggcggctatatgatcggtctgttagaccatctgccaaagattcgggaatctattatgacaccggatggcattttcctgcaggtgcgcacaaagaataagcatcgaattgagaagatttatgtacgtcttccggagatttctgctaaagctgaaaatttcggttcaaaagacggatatcagtaatgaaataaaccgatctgctgacatcacatttatcattttataacagcaaaaaagagacttctctatggctcacataaccacagggaaatctcttttttattttcattatttattcacagtgagaaatcttacaaactctctgaaacaattctacttctttttttgattactcgattacgtgaatccatccttccggagcttcaatcttgccttcctgaatatcaactaatgtctcacgcattttagcaagaaccggtcccatctcatccataccgcttgcgaagcagatctcacgaccatgatctacgatcttgccaactggagagataactgctgctgtaccgcacagaccacactcaacgaagttcggaacctcatccagatatacttctctctgctctacttccagtccaaggtaatgctcagctacatacatcagagaacgacgtgtgatagatggcagaatactgtcagacttcggtgttacgatcttgttgtcttttgtaacgaataagaagtttgcgccacctgtctcctcaacttttgtacgtgttgcagcatccagatacatgttctcagcatatccttcttcatgagcagttacaattgcatgtaagctcattgcatagtttaatccggctttgatatgacctgttccgtgaggagctgcacggtcaaaatctgtcacacggattgttaacggttttacgccgcctttgaagtacggtccaaccggtgttgtcagtacacggaactgatattcctgtgccggtttcacaccgataaccgggctgcttccgaacatatacggacgaatgtaaagtgttgcgcctgtaccatatggtggaacataagccatatttgcttttacagtcttctctacagcctcgatgaatttatcttccggataaactggcatttccagtcttcttgcggaatcagccatacgggatgcatttaagtccgggcggaaaataactacttttccgtctacggttgtgtatgcttttaatccctcaaaaacagtctgtgcatactgtaatacacctgcacactcgtttaatacgatagtagcgtcctcggtcagagttccctcatcccatgcgccatctttataatttgctacgaaacgtttgtctgtctgacgatatccaaagtccaggttttcccaatcgatattcttcttttccactgtgatatccttctttcttatctattttgcaattttcactttttgttcctgcatttacgttttttctctctatgtactgttatacagcaaatcatagagcatttccagttctttttcaaaaaatgcctgtatttttttcatgtgtttcaggcaaaagatgaattaattttcattcaataattcatccgatatcccattcttcacatgaattgtattttttactaatcattgcgactgcaaaaatgcatcttccagcagttttttcacatccaacccgagcttcctaaattaattatctacaggaagtactgatagattcgatagctactgcaccaccccgcacaatctccacactctggaaccgctgttttaaaaaggcgatcagttcgttatttctgcgctctgtcagcttgcactctaaaagaacactgtccattccgatgtctgccggctctacatgaaaggtctctgcaattcggaatacttctgccttatcagtgttgcttaattttttcaccttggcaaacataagctctttcatatggatcggtacatcggtcagatccataactttaataacctcaaccatacggtttaactgttttttaatctgttcaaaggtaatgtcatcgcacactgtgctgatggtgattctggaagtatcctcctcctctgtcgtacctacggtcagacttttcaggttgtaggattttcctgcaaataaaccggagatttttgcaagaacaccaacctggttttctacatataatgcaatccatctgtctttcattgccattctcctcccttatttgcttttcagaatcatgttattcatcggatttccacccggaaccatcggaagtacgatttcctctgtagcgatcataaattcgatgacagtcggcgcatcggtattgttctttgctgcctccagtgccggaataatgtcctcttcctttgtgacacggatgccgtgtgcaccgtaactctctgcccatttcatgaaatccggtacatatggcggacaactttcatttggtcccttgcaatgttccggacatcctttgcggcggcgcagacaggtagcagaataacgttttccgtagaatagctgctgcatctgacgaaccataccaaggtaatagttgttcagcaggcaaacggtgatcggcgtctgctgtacaatagcggttgccatctcctgcatgttcatctgaaatccaccgtcaccggtgatacataccacatctctgtcacgatgtcccatctttgctccaagtgcagccgggaaaccaaatcccatggttccaagtccgccggaagtgatgatcttcttatttttatttacatccagatactggcttgcccacatctggtgctgacctacgtcagtaacgtatgtaacttcatcgtaaacctgatttaaaccttccatgatcatctgcggtgtcatgcctttatcacggcgcatttccagtggattctcatgatcccaggctgcaatctgttttacccattcgtcagtatccttcggctctacccattccaacatctgctgcagggcaacttttgcatccgctacgatcggcacatctaccacaacgtttcgggaaatcgctgctgcatcgatatccacatgaatgatcttggcctttggtgcaaactcgttcagatcaccagtgatacggtcattgaaacgggttccaatggaaaagagcacatcacatttgctgactgcgatatttgccgcataacggccatgcattccgctgcttccaacgtaatacggatggtcggacgggatcgcgccttttcccataacggttgtaacaaccggaacatgtgtgatatttacgatctgctctaacagttcgttagcccctgagatattgacaccgcctccggcaaggattagcgggcggcgtgccactttcagtaattttgtcgcttttttcaactgtccaaggtgaacgccctcgttaattttgtaaccacggatgtctacatgatccgggtattcggacggacctgttgcagtctgaatatctttcggaagatcgatcagaaccggtcccggctttcctgtttttgcaatgtggaatgccattttgatggtttttcccaaatctttgcgatcacggactgtcacactgtatttggtgataccgcgtgtcataccgacgatatcaacctcctgaaatgcatcgttaccaatcagatttaatggtacctgaccggtaaatacaaccagtggaatactgtcataaaaagcatctgcaatggctgtcacggtgtttgtcgcaccaggaccgcttgttaccaggcatacgcctgtttttccggtctcacgggcataaccttctgcctcatgaaccagcgcctgctcatgacgtggcaaaaccagatcaatcttgccatttcccatcagatataattcatcaaataaatcagttaccgttccgcccggataggcaaacacggtatctacgccttcttcaagaagagcttttacaaataatttttttcctgttatatccattcaactctctcctttttccttcctttttgtccctgcatcacttcggatttttatatacatctatttcttatgtagaagtgatcccttcattttatggaactttgggaagttatatccaccctaacgtgcgcagcaggaaaatccatcccgtcagtgtcacggaagccagcagtgtggtcgccactacgatgctcgccgtcaatacaccatcgttatgcatattttttgccatgatataacagctcggggttgccggtgctgccagcatgactacgagtgcgaccattttttcgccctgaaaaccaagagcagccgcaatcggaataaaaattgctgcctgggcgatcagcttgataaaagcagcccagagggtaggtttgatctttgccagtgccttctttccttcaaagcccgcgccaagtccgatcaatgcaagtggggttgccatctttgccacattgtttacggtcgaatttaccagttccggcagtggattatgtaataatgccacgatcagaccaaggactatgccgatgataatcgggttcttcaggatgttgataccagcctgtttgattctgcctgtatcgcgctcattctccggataatctccttcaaatgtcagtacaagcacggaatatatgttgtacaaaggaaccgcaccgatgatcatcagggatcccattgttgactgcccgtaaatattctggataaatgccagtcccataaccgccgcgctgctgcggaaggaagcctgagtaaaagcacctaccatagatttgtctttcataaaaatttttgtcaggccatacacactccagaaacagatagaagtggcaatggcacaaaacagcacatatttcaggtcaaatacttcctgaatattgacggatgacaggtcacggaacagcaaaaacggcaaagtcaccttgaaattgaacttatttgccaccgtgacaaaattttcgttcagcataccgatccgacgtaaaaagtagccaattaccatgacaaggaaaatcggtatcgtcacattgatactaaataaaaagttgctcatgctttatgccttcttttcatatttatagaaataatattccagatcaaagtaggtctgctcctcgctgtccgcggtaaccacccactcttctttttcatccagattcgggaaccaggcatctgcctcgtaagcaaaatcgatttttgtaatgtgcgccacctcgcactcatccaaaagctgtctgtaaatactctcaccgccgatgacgtaaatatctttgctgtcgtattttttcagttcttcgtgcagttcgtccatatcgtgcacgatcacagctccgtcaacctgataactgtgatcacttgtcagaacgatattcacacggtttttcagcggtttctttcccggaaaactctccagtgttttacgtcccatgacaacgatttttccggtggttgtctcacggaaaaacttcatgtcatccggaatgctcaccagcagcttattatttctgccgatggcccagtttttatctactgctgcaattaaattcatgtatctcacatctctctttcttcttaattaatatttcatacagttcacacgcgccattcgcaaaacgccttttcaggcttctccgtagctacgctactatttttgctcataataaggcgctcccttcatcactatgcatccagccaattcctcatgcaagcatgatcattgtctgaatacatgtgatgagtgaactgttaaaccgcgattggtatatttgtgatctgcggaccggtctgataattatccagacgcacatcatctcttgtaaacttgtaaaaatccttcactttcggattcagccagaaggtcggagccggaagcggctcacgggagatcagctcctgtaccagcggaatatgtctgtcataaatatgcgcatccgcaataacatgcaccagctcacccacctgcatattgcaaacctgcgccagcatatgcatgagtaccgcgtactgacacacattccagttatttgctgccagaatatcctgggaacgctgattcaatatcgcattcagcaccagtttatcctgccccggtttctttgtcacattaaatgtcatgctgtaggcacaaggatacagatgcatttcatgcagatccgcgtgcacataaatattggtcataatacggcgactgtaaggattgtttttcagatcatagatcacacgatccacctgatccatcataccttccttatactgatgctttacgcccatctgataaccatatgcttttccgatggaaccggtctcatctgcccactcatcccacacatggctgtgaagatcattgatattgttggatttctgctgccagatccagagcatctcatccgtacagctcttgatggcagttctgcgcaaagtcagtgctggaaattctttggacaggtcatagcgatttaccacaccaaactgtttgatggtgtaagcactggttccatcctcccatttcgggcgcaccttttctccctctgtgctggttccgttttcaataatatctttacacatattgataaaaatgtgatctgcgtaactcatctgcgtcctccaattatattttctattctaatatttcgttccataaaaattcaagtcgaacgcacgtgagacttggtgcgtgattctggtcagcgaaagctgacatattcttctcaga

SEQ ID NO: 13076 - DNA, 710 bp, Unknown
  gut microbiota DNA sequence
gcttcaatggttcgggagtagtaaattcccaaacgccatccttcccctctgtcaaatcggcaatgcccggtgcatcataatcgccacgaggagtcttaatagtttgtggaggcagaaaatcaccagtaatctgcacccttacagccttaggagctttcaagcgaaaagtaaccgtgttgtcatcatgaatatcaggagagacaaccgccgcacctccccaaagagcttgctgtgcaaaaagggtgacacagcagaccagcagcatcgctgccgaacttaataatcttttcataatttcttatattaaatgaattagctttttgttatttagcaaagctgcgacttacaaaaggcaggcacatataaagtgccgaatgccaatattcgctggtatgtccgccatcccgcacacggaactggcaagggataccggcattacgcatcgcttggaaaaactctatattacggtccagcagaaagtcatcatctccgcaatccacaaaccactgtactgtacgaagctgtgccttacgcgcatcatctgcctcaaccacatacctgatgcaactatgttcctgcacagaacgcgtcagcacagccatcttgtttgtggggtcgggatcttttcccacctcctcaccactgacggggatgttcatcaaagcactcatggcataggcagcacaatacatatccggatagcgttgtgc

SEQ ID NO: 13077 - DNA, 2152 bp, Unknown
  gut microbiota DNA sequence
tcgcggagcatttatctcagtcggagattgaactcccactgagaaatacttgttactactcaccacttgcaggacgccgctgaaaaagtccttattttacacaaaatggtacaagataaagtatacttatgtgttttacgctactgtatattgtatgtaaaaacagtttttcagtagcgtccttgcagaagtgggagtctcatctcagactgagatgaagttttaccgcaaccgtcttcacataatggttacggtaaacttagctgaacttgtattgttttccccatcttctttctgtttaaaaaacagatctacattgtggataaaatttgtaacctgaaaatttaatgtcattattttaccatacccgccagtagttgtcacgatgtacggcttcgtctgctccattacacgcatccggtctctggttcatctttcatttcgtatgaccatacacatagcgcaacctcagcagccgcagataacaatcctgcaattttttcctgagttcctcagaattttcgatttcctgttcgccaaacatccacctgtcatatttctcattcatcagtgcaagttttggcaaaatctcactgttcttctttgccagcttcaggaagtaccggcccagttcctcatactcctgaaaggcttctgccagttccagacaaatttgaaacaaatgaaaagacggtttttcccgttcaaacgttcgcctctgctgaattaagaaatcataccctttcttttttcctgttttttccagaaccattgctttcagagcgactgccttcacccggtataacgacgcttctttttccttcgaatactgttcaagaattttgaaaagctgctccagcacccttaatgtttcttcttcccgtccggtaaatctggtttccagcacatctgccatcttcaatagcagtgtccattttttcagataagaataattacccgggccaatcaaatgatatgccagttcatacattgtcagtgcaaatttcgcattattctcagacagataatagtcaccgattgcttcctgaaacatataagcacttccctgagacaggaaattgatcgatatatgtttactcaataaccggcccacttccttgctgacactatcgaagggatattcataaaaccattccctgtacagtcgcatcacataatccctgtcatctccgttataagtaaccgggcagtcaggtactttaaaatgatgatctccaagctccatatgtgccataaaaagtctgacagacatttcttccatatcaaatataacttccgccagaagattatcctgctcaatctcataagtatcttcaaaatcccgctgcgaaatcacatagatattattcttgtctgtaacattgatatatccgccggcatccaccctcatacattcctcgccccactggcgcagcgtaattgcctccggaagtcgtaaaaatgtctgactgacaccaactggtacatagtatcccggatgttcctgatcctgccggtatttttgccagaaaacggtatctgtaatgatccattcattcttatttccatgctcatcaacaagaacacttccgtcttttccgatcttggttgcgatccagtcgttttcaccggtttcggcatcctgtcctacttcggcttctttttccataatgagatcaccatcggcagcgacactccaggaaatcactttttcgccaggtgttcccttccttgccataatacgcgtccattttttcgcaataatcaggttggcaccttcctttgccagcttttgcacataagctgaaatattctcaatttttttataatgcacctgttttttctctgtctgttccatcctgcttctcctgttctgaaaaagttcttttttcctttttctgattataatatgttatgctccctgtgtcatttcaaacatgtatgtttgtttatacttattaaatcatttcggatgatattcagcattgacaaaaaaatttgattctgaaacctgaatattcattatttgaaaccacagttttatctgttcattttcaagtcgaacgcacgtgagacttgatgcgtgattctggtcagcgcaagctgacatcttcttttcagaatcactgcactctacactccgttccggtcg

SEQ ID NO: 13078 - DNA, 4992 bp, Unknown
  gut microbiota DNA sequence
atggatcatcacaccggatggaatcgtcagatccagcatggagattgagcgggatgcgatcatgcgtggcatgtacagcgaatacttcgaagatgtgacagaaaatgacaatccattccagccaaacgaggcatttcttcctcgacttggtatccgcctgttcctgtcaaaacgtatgaatcaggcagaatactttggatacggacctcatgagagctatattgacaaacgccgggcaagctatcttggcaaatttacttcccgtgtctgtgatctgcatgaagattacatgcgtccgcaggaaaacggaagccactatcattgcgaatatgtcagtgttgctgatgacagccggaaactgaccgtatataacgagcagccgctttcctttaatctgtccgagtatacagaagaagaactgaccacgaaaggtcataattatgaactggaaaaatcaggatacactgtattctgtatcgattacagacagagtggtatcggttccggaagctgtggtcctcagctggcaaaagaatatcgtctggacgatactcattatacgttctcattccacttgaaaccggaaattttataatttcttatcaaacacaaaaacataagacacattcgctgccgtagaatgtgtcttatgttttctttcttattacttcgcacttatagaagtgaaagcacattacacatctatcttaccaggctccgctatagcccagtgtcacactgctgttttttgctccctgttccatactttcctctaatgattttccctgtaagataccatataaaaagcctgcaatgaagctgtcaccggctcccatcgtatccacgacatcgcatgggataatcccaaactccgtataacttgtgccgtcataagcaatgcttccttttgtacctctggtaacgatgactgtctttgctcccttttcctgcatttcttccatgaagtttcgcatccattcttcatcttctccatcataggcaaaaaatgcataatccacaaatggaatcgcgatatcaatcaccgggctttcatatttcgttgcaaagtcaaaagcaatcctggtgccacaagccttgattttctcaagatcattctctatcatcccccagattccggatacgaccagatcatggcttccaagaaattcaatatcttcttcactcagcttgaaatctgccataacgccttcctcataatctccgagaatacgctctccgtctatgatttccacgtgtgtcacagccgtactgccaggcatcactttcaaatgagaaatatccacccctttttttgcaattgactccttcattaatttcccatatgcatcgtctccaacgacaccggtataagacgcttccccgccaagccgaaccgcataaacggcaacattcaccggatttcctcccggaaatgccccacctgtctgatcataagcatccacgcaattgtctcctacagctgcaattttaatctttttctccattttcagcattcctcgcatcacttcatcattgtttatctttcagtacgcagaatcatcttttcttccaaattcattaataatcaaactgacgataatatcttctgatttccattggatggcaattgatctgctccaaatgtgcatcaatacgctgtgttacagcatggctcacaagatgagacagatttccacggaattcctcgctgattcctttcaactcatagtctttggaatcaattactgtgtaatttgcacaaacacgcggcaggaattttactactcgttcactcagagaacgctgtgcatcttcacctacaaatacagtgaccggtgtatcgcggtctacaatttccagcattccatggaaaaattctgcactgtggatagattttgtacggatccaatgctgctcttcccagtagcacattgcataagaatatgtggaaccatactgattacctgctcctacaaaataatggatactgtcattgcaatgtttctttgcaaatgcctctccaaatgcatccgctgctttctcaacttctaccagatctacagccagattttcatccagttctttgtaataacgatcatattccgggaattcacctgcattgtacataaaacggtctgcaaccataaaaaacttcagctgttcattgcccggatatgcaatttcataatctacgatctgcgccagttctgtagtatccacatcaataaatccaagcacctttgctcccgctgcagaagcttttttgacaccttccaccatctcgatggtacttccggttacggatgaaaccacaacaatcgtatctgctccaacttttttatttccagttgtcagatattctgctgcattttccacgaaaaagtcaagtcctgatttttctttcatatgaacttctgcctgtaagcaggaagcataagtgcctcctatgccaagccagcagatatttttaaatccatctttacagatctggtctacaatttcttcgattttcccgcgcaatgcaagtgcaccttttacactgtcaatctgtttctgctcatcaaatttcaacatgttattttgatatcctcctttaattccttttccttttctgcaaccacttatgtaaattactataccacagtttcttaaatagtcaacatcttttttaaaaatgttattctacgcatttaataactatatgtttttcgcgattatatcttgtgttttattcattatcattcattttttggcatatttgcataaccgactaatttagaccactagtgtatttttttataccaatcatatttgacgaacagattgcatctgttatatgatagaaacaagcaactattcggtagcatgaatgtaaaagatgttctataataatcttttcatatagttatttttaaaattggaagtaaaaggagcgtatttttagaatttatgagaaagaatttactgacaatggatgtcattcttgcaaaagagatcatatatatgttgaaaaatgagggctatcgccccggagaccggcttccttctgagcgatttcttgcggagcattttcatgtgcagcggcctactatccggaatgctctggcacaacttgtgcgtgagcattacctttttccccaggaaagacttggatattttgttgctcctgagagaatcaaaatatctactcacacctgtaccggtaattttgatcccggagaaagacgtccgaatattcgctggcagccctattcttttgaagagattttggtagataaacgtctttccggcaaaatgctgatcccggaacaaacaccagtttataaaatccttttcatttattatgaaaacgacaccccgctgtgcctggattattcttatactccaatcgatatctatcctggtctgactgctgaaattttgggttcacgcccgattttgaatgtattgcagacagatcttcagataccgattttgaaatccaatcagcgtgtgacactcatttacacaaatgaggaagaatccagtctgctccaaactgcaccgggtagtcccatgatgaaatacaaaggtctggtatacgacgaaaccggcagactgattcatttttttgaagacattatgaaaatagatgattttgcatttatcagaaatgcggaaatggaggaatcatggaacaattaaatcatgtagcagcacaggtgcgcgatattattgtaagcaggattgaaagccatgaatatcttcccggagaaatgatccctagcgaacgagtccttgcagaaatgtatggtgtaagccgacctactatccgcacagccatcgatgaacttgtaaatgagcattatctcgtgcgtcgacagggaaaaggtacctttgtcaggaaaccggaatataacaaagtcgctttcggtgtattaaatgaatccgaaaatgccagtttcacttcccttgtccgcaattttggaatcgagatatccaacaaattactgtgcaccggcaccatccaggggcgttattattatgctgataaacttggtcttgcatttgaagaaccaatttatggaatccaccgtatccgccagggtaacaaagagccactggctattgagtacacttacgttccactgaaatttttcccggatatcgataattataactttgaacagatttctctgtatgactacatgtccaccagagatcacctgcccgttgttttccaggaatctctgaccatggtagaagccggggataaaatccgttcctatctgcatctggaagatgaaatgatcgtcaatcacctggaactgattggctatgaccatcacggtaaccttgtagaatatacagaaagttattcccgcccagacaaactggaagtacgttttgtatcaaataacacaaaatagaaacgctgtccgtaaaaaaataagtcgagcgcacatgaaatttgtgcgttcgacttatttttgttaaaattttctgagtccgatacttccatcatcttcggtattctcaatggcacggatttccacataataaccggcatttgcattgatctccacatagacacggtctccgactttgtgaccgagaattgcttttccgattggagattccgtagaaatccagcctttcagggagtttccgcgcacggttgtcaccagtgtatacacttcttcttcgtcatcatcttcaaaatataaagtaactttattgttgattccaacttcatcggattttgactcatcggatacaactaccgctgttttgatcatgcgctccagataacggatacggctctcattggcatttttatctttttttgctgcgtggtactcaaaattttcactgagatcgccatgcgctcttgcctcttttacagcttccaatgcttctttacgaactaccagtttccgatattcgatttcctctttcattcgttcaatatctttttctgtcacttcatcatgcataatctcgataccttct

SEQ ID NO: 13079 - DNA, 5552 bp, Unknown
  gut microbiota DNA sequence
ggtgatttgacatgtcagataccacacatccacgccattcctcagagcttcctctagaacttcgccaaaagctgggtgtgtggacatatttggtcggacaacagaaacgttcggcatagcaatcacgaaagcaaggatacaatggtagccttgcttttttgcatggagcagttcttttacatgacggactgcacgttcacttggcgcatctgggaaatatccgatgccattaatttccagcgtacagcctttgacttccatcagatatttttcttcgcctttctccatataaaaatcaagacgggaatcgccgtatttgtattccggtttgataaatgtataatccttagtggcgagccattctccaacgaccttgttcggagcctgactgtcgatattcacccagcccagggattctttgtatacactgatcagatcatattttgttttacggttcggattgtccgaacaggtcagagctacctttgcatcgggaaaaagcagttctcccatgcgaccggtatttttgacatgtacggtttctaaggaaccattgattattacttctgccacaaaacgattgtggcggcggacaaaagtgcccattacaacgttttcatatttcatttcaaaaatcaatccccttcctctgtatgagccttgattttttcctcatctacgctgtctaactgaatatccggcagtaattcaaaataaaaatcctgatatttttctgccagagcagcaatgcattttgtctgaagaatctggaattttgacagggagataatgtctctgtcaaaggtaatgtatacactaatccagagtttccgtccggtgcggacaatatcgtaatacagatttttgtgcccgtaaccaccaataatcggttctaccgtggctttaatatcacctacggtctctgcttccggcggccagagcatcaggtcacgaagtccggtaattaccgttttgatcggtgtcggcagcataaatgcggacagtacgatggtgatgatctgatccagatacggcgtcagacgttggaaccatgcgaatggaacgatgatcggaagtaaaaaggcaatcgccattccaagggaaaccacgcagtcaatcttccaggtctgtaattcaatgttcacgatcggtgaactcatatgtttgtttttaaaaaagagacagattgccatggtcagactcagggcacaggcaaaaagctcaaaagccgaaatcgtgttaaaagatacgatatgtccaccatgaagcagcagatgaatattgttaaaaatcaacccaaaggtaaccgccgccatgatggcacctttgaccaccacgaatccggtttccacctgagtaaaaccaaatggatgctgttcattggcagggcggtaaatcagcggaatcagaaaaatcgatggaagcatcataaaaaattccacgctgtcgtaaaccgcatccagaagaaccgcctgagaaccggagaaaacagccatgccgatttccacgatggcaaagacgagactgccgtacagagacagtgtcatcgctgatttttctcttttctgtgttttctttcctacatgcataatatattgaacctcttttgtaaatatgtttttatatggaaaaattgcaatcaaattgcatctatatattttccttactgcagcaaattaactgagtgaattttacatcaactgagcaaataaccgtaagatcaactgtcccagacgcaggtgcgcaccgagcccggctttgtatttttcagtcacttcacggcattgtgaaaatgtatgtttgaaatcacgttttatctcatcaaccgctggacagtccaccataaaacagccattttcgaaatgatgatacagactgcggtaatccagattgatggtaccacaggtagccatacgatcatcggcaatgctcattttcgcatgacagaatccgggcgtccattcaaaaatacggacaccattggacaccagttgatgataaaaagagcgggtaacactgtaaaccatctttttatccgggattccgggtgtgataatgcggacatccacatcacgttttgcagccagagacagagcgtgtgacatttcatcggtaaggatcagatacggcgtgataaaccagcagtaatgctccgctttatttgccatactgatatagacttcttctcccacctgctcatcatccagaggactatcagcataaggctggacatatccgtgctgaaccgatttatattggtactctgtcagataaggttcaaaagaacgatcgcttggcagactctttttaatcgcattccacatttccagaaaagtgatggtcagagatctgactgcatctccctccagacggatgccggtatctttccattctccataagggtgagaaaatccaaaatattcgtttgcaagattataaccgccagtaaatcctacttttccatcaatgaccgtaattttgcgatgatcacggttgttcagaaataaattgacacccggaacaaagggattaaatacgcggcaggcaatgccaagcgcttccagctgtctggtaaaatcgtgattcagaaaactgatggaaccaatatcgtcatagaatacccggacttctacacctgcctttacccggtctatcagtacatcctggattttttcccatgcatcagcattttcaatggcatggtattccataaaaatgaatttttctgcctttgccagatcgacaagttgtgcttccagtccctgtacagcttccgggtaataggtaatatccgtattttgataaacaggataagcggcatttcgatacagatagtcagaaatacttccggctggtgcataatgttttttcaggcgatgtgaaatatcgtgatcttgcggcagatacggcagcaaaatggcatcgatttcctgataacgtttgcgcatattgcgggtacctttgtttgtctgaaacatcagatacagacagacaccgagtaccggcatgatcagaattaatatgatccatggcattttcagggaagatgttttatttttgctgtaaatatataaaatgaggatcagtacgagaatttttgttaaggcattgatccatggcatctgtgtattcagacgttttacaatagaaagaaaaaaggcaatctgaagaaaaattgccagaagacagaaaaaaagacgcttgatgctgttttttgttttacttcgactttccattgtgtgatgatgtgtctttgccattgtgctgtcatcctttctatggcgtaaatatcgttttgtatacagtgttttgacaccaaaattttgattacacggattgttccgtgctttgcactcccacaatccttcccgctattcgcatatcgtgggataaaaatcccacttttatgctcatatcggggcgtgccccaaggtcattcatccacccttgtgcaagcacaggtggactcagaccttttgacactgtaatcatagattatgataccataatttttccacacagcaagaaaaaatctgttacaatagggaaaaagtattcttaatatgacaagaagtagatgattatgcaagaagcagattgtatcagacaaataggatagaaaaagcaatgtagagataaaaaatcagaaaggcagcagttatgtatcgaattttttgtgtggaagatgatgagaccatcggaaaaatgataaaaaagcatctggaaaaatggaattttgaggtgcatgtggcagaagatctcagccagatcatgacagagtttgcggcatttgatccgcagctggtactgatggacatccgacttcctttttataatggctattattggtgcacggaaatccgcaaagtgtcgaaagtgccggtgatttttttgtcctctgtggcagacaatatgaatatcgtcatggcgatgaatatgggaggggatgattttatcccgaagccatttgatctggaagtgctgacggcgaaaattcaggcgttactgcgcagaagctatgactttgcgggaagcagcagtatgttagaacataaaggtgcagtattgaaactgctggatgcgagtctgatctggaacggtcagcagatcgaactgacgaaaaatgaactgaagattttgcagacgttgatggaacataaggaaaaaattgtcagtcgggaagaactgatggaaaaactatgggaaagcgatgcttatgtagatgaaaatacattgtcggtaaacgtcaatcgtctgcggaaaaagttatcttcggttggactggatgacttcattctgaccaagaaaggaatcgggtatcgaatcggatgaaaaccggaaaaagttttatcaaacgaaatatagagtggttgattctggcaattgtcatgctttgcatgcatgtactttatttgtttttgattggacaccctgagggggatctgatctatgcgggaatactggatctgtgcattattgcgtttgcgttatgcattgcgtatattcgttatgatcggaaagtgcggtatctgaaagatatgttgcagcagccattttccggtgaaatgaaactgccggagacggaggacgtgacagaggaactgctgggacagcttgtggaaaatgcaaatattgagcgtcaactgacgttgaataccgcagccagacagcaatccgagatgaaggattattacgcgaaatgggtgcatcagatcaagacgccgatcgcgggacttcagcttttattgcagatggagcgcagtgaactggaagaagcagagtcaaaggatgagattacagaagaactttatgtaaagcagcttcagaatctgacggatgttgaggaagaactgtttcgtatcgaagaatatgtgggaatggcattgcagtatcagcggatcaacagcaccgcaaatgattatattttaaaacagatttcactagatacagtaattcgcgaagtgattcacaaatatgcgaaaatcatgatccgccgcaaaatccggatgcattatgaaaaaacagaagcaacggttatctctgatgaaaagtggctttcgtttgtattagagcagttattgtctaacgctgtgaaatatacgccggagggtgaaatctccattgaagtgcaggaagaaccacagcacatctggctggaaatccgggatacgggcattggtatccgcagtgaagatattccacgggtgtttgaaaaaggttataccggatttaatggacatgaggacaaacgttccacaggaattggactgtatctgtgcagggaagtgttgcaaaaactggggcatacgattcaggtacagtccgaagtaggagaaggaactacggtaagggctggcttttcaaaggatgcgattgattttagagattagccccctcaattttcttttaacaaattatagcaagaattctccttcctttacaggtgggagatgaattgcaaaaataaatataaaaagcaaaatagaacacttgttctacattcgagtcgaacgcacgtgagacttgaatgtgtagagaaatcctgcaacctt

SEQ ID NO: 13080 - DNA, 15028 bp, Unknown
  gut microbiota DNA sequence
aatctttctgtttatcctagaataaaggagtcttgtatacaccgtccgcgatcagttttgcaaaagcatctacaacagtctgacgatcttcctgataggttacaccaaaccatttatcctgtgtctcaagaacttttacagacacctcaccttttgcaagcatgtcgccaatgatggtcggaagcagatactctgctttgatgttgcccggctccacatttgccagaaattctgcaaatcctttatccagtacatccaaaaattccggtgtaacaccccacatattcatagatacgtgtgttcctgtcggaatctcattgccattttcgtctttgacaataccatccgtatcacgggcaataccgcttgtctcaacaatcttctgcaacatctcctgttcatctacctggcatacacctctggtaacagttccgttatcgctgagtgtattatcaagaataaaccctgccatgcaatatttgtactgggaatcaccacagccaaccagataatcatgcacttttacaaatgcttctttcccataataatcatccgcattaattactgcaaacggctcatttacaatacctttacagcatcttaccgcctgaccggttccccaaggttttgtacggtctgccggtttctcaaagccttccggaagatcatccagagactggaacacatattccacatcacaaattttttcaatacggtctccgattacctctctaaaatctttctcaatatccttacggataataaatacgattttattaaatcctgcttccaacgcatcatggatagaataatcaataataatttcgccgttcggtccaaccggtgtcaactgttttacgccaccaccaaaacgggatccgattccggctgccataatcactaatgtagtattcatatactttttccttcctaaattcttaacttgtattttttcctgtatttaacagaattgtaacattttttctgctcatagtaaagtaaaatgcacttattattcaaataagtgcattttacacgcatattcaactattgcataaaaatatgcagacgttttagagcttttttaattattaagcagcttttgccgaaccattgacaacctgatataattttccatcatatgtcacggtaccattatagttaaaatctacttttccattggagagataccagtctccgttctggttagacacaacaccggtaaaattaaaatttacttttccgttttctatgcgccaccagccattgctgtttttcgctacagttgtatcataagtaaccttgctgccaaccacatgccaccagccattctctccgtcaaccgttccttttatgacatcatttttctggaaagttacttttccgccttccagataccaccagccattactgtttgatgcgaatccttcaaagctgaagtttacttttccattttcgatgcgccaccaaccattgctgttcttttctactccattatgtgaaaagtctaccattccattgctgatataccaccaaccattactgtttttcgccactgttgtatcaaagattaccttgcttccgactacatgccaccagccactctgagcagcaacggctccttttatgacatcattttttgtataagtaatctgcccattttctacatataaataatctgtaccgttcttatagaatcccgaatatgaaaaatctacttttccaccatcaaggtaccaggttccatttttgttagatgcaataccagtaaaattgaaatttacttttccttcttctatgcgccaccagccattgctgtttttctctactccattatgtgaaaagtctaccattccattgctgatataccaccagccgttgctgtttttcgctacggtcgtatcaaacgtcactttacttccgactacatgccaccagccatagatcccctttacggttcctttgataacatctgttttctggaaggttacttttccagattcaatataccaccagccattactattgcttgcaaatccattataagaaaagtcaactttgccacctttcaggtaccaccagccgttctggtttttcgcaacaccttcataattaaagtttactttaccattttcgatccgccaccagccattggcattcttctcaataccagtatggctatagtcaatcacaccatttacataataataccagttaccatcagatgctttgatcacaccattcagccttttatctgtcacgccattattattgcttccatcaccactatttacaaccgttatataagaggcacttacatatgcatacatctctgtaaaattgtattttcctgaattactgtcaatacctgttcgtccgctttttaataccggatcactttgaatacgataaaatccatttgtagaggtattgccatctttcaacagaaatgccacaccatacaggtttgccgcataatacaacctgctggaagaagtactgttcctattccggatattcaagttattggtaggagttgtcttcatgcaactgatgggatctttaattccaattgtatagcgatattcatcctttgatgacaatttttctccaagataatacgcataattggccgctttctcaccccagtacggatctgatgcatactgcacattgattccactggctttatttcccagataggcaccacgatagttacttccatttggattcagatatttttttgacatataagtctctgcaaaatccttaatacaagcagaaacactactgtaataatttgcactctgtgaaggggatgcatctacagcattcaagccaaacaggttatttttatttttggctatgctgctatctccccatccactctcattgattgcaatggaagccatcagcaatgcattcacaccatatgtattctgattatttacaaaatcatttcccaaatcctttaacttggatgtagaggatatttttccattaattgtgctgttcaaatctgatgcagaataagaagttgtacttcttaacggaagatactggtaataattaaaatacggattattcgaatttacagaatgtgccctgctatcactggtataatccgaaatcattgtggtatagttggtataaaaataatgtccatcataactgaaatagttcgttccctgtgataaataagacggagcttttccatatcttaggtttgaaacatactttgactgtgacagatttccggtaattcgatgatataatttttcaccagatacataataataactgtaactctttacattagaaagagctacgagcgttacgtcactactttttacctttccaattacacctgacatcataaatatgtaataattcccagttgttccaagatatgcagcatctgcgccgtatgtaccattgatatacccactttttcctgtactgtattccgtataagaaacgtatgtcgatgaattatttgtcttattaaaattaaccagatattgtgctgatgtacttcttgctccatctaaagaaaatgtttccacttcattttcctgattttgcagatcatcatttccctgctgtagattttcttctgattctgactctgccagatcagatgtgtcatctatagactctgcggtatcttctctctgggaactatcttcttccagatttccctctttttcaattttctccatatcatcattggatgatacttcttcccccatcgcagtattgtccccgtctgaaaactctgcatctgatttctcaccgctctgactttctgagtccgactgattcatttctgaagttatcgttggtgtatcattcccatctgcttcagctgccataaaaggtgttgtcgttattacagtacaaagaatcactgctgtcactatcgatgttatctttttcttcatacattcatcctcatttgaatatgctacagtccgctaacttttccacccttaattgcatacgtttttccatctacaaccagttttccgttatatccgaattttacttttccaccttccagataccaccagccattgctgttctgtgcaattcctttataagaaaagtcaacttttccatttgtaatcttccaccaaccattgctgtttttctctactccgttatgtgtaaaatctaccactccattatgaatataccaccagccattactgtttttcgctaccattgtgtctaaaatcactttgctgccaactacgtgccaccatccattgacaccatctactgttcctttgatgacatcattctttttaaatgtcacttttccgccttccagataccaccagccattactgtttgatgcaaatccatagtatccgaaatctacttttccattattgatgtaccaccaaccgttgctgtttttctctaccccgttgtgtgtaaaatcaacctttccattatgaatataccaccagccattactgttttttgctaccgtcgtgtctaaaatcactttgctttcaaccacatgccaccatgcattgacacctccagcagttcctttgataacatcattcttcttaaatgtcacttttccgccttccagataccaccatccattgctgtttgccgcaaatccatagtatccaaaatctacttttccattattgatgtaccaccaaccattactgtttttcgctaccgttgtatctcttgtcactttgctgtttacgacatgccaccatgcattgacaccattaacgttacccttgatcacatcatttttattgtatgtaacctgtccattttccacataccaccaattagtattatcatgtacaaatccattatatgtaaaatctacttttccattttttaaataccaggttccattttcattttccgcaattccttcaaacttaaaattaacccagccattttcaatacgccaccagccattgctgtttttcgccacaccggtatagccctcatccatcacaccatttacggtataataccactcgcctgtttttggatcttttacaacatccgttccaccggatttataccagtaatccagatccacacaagtcttaataccatcgatttttgccctgctgctacactgccagatatttaatgtgccatcatagaatcttcctttttctgaatccacataggaatgagtattatatcttgccatccacaccccataatttttgctgagtgtgtctgtgtccatatccttttctaaccaactggaactggaatataccattgcctgatatcctgcgttctttacctttttacaaaaagcatcgacacacgctgtcttctgtgattttgataaattagcattgttcaatctttccagagaatttccattcttatcggttgttcccgcatattcatagtcaatcactaccggaagatcaagctgataccctttgattctgttcagtgtccatatcgcttcttcttctgcttcctgcacattgattgcctgagagaaaaagtaaactccgaccttcaatcctgccgcttttgcgccttcaatataggtcttaaacttactgtcgcctgtacttgcaatcgttccaccggcatatccacgatatccgacacggatcaatgcatattccacaccagatgcttttactttattccagtcgatatttccattatgataagacacatcaattcccattgcaatactttttccagaagtatccttgctgttatgtatatatgtattgattttagtacctgtaatctttccggcactgtttaatatataattttcccatttcgttgtgattccactgctgctgcgtgctgatccatcttcctctagtgaaaatgtcgcaataccatcattttctgcaacgtcatcagctgtctgctcgtcaccatacatttgctgaaaagctcttgcattttccggatcatccgcatcccagtctgctggatacagatcctcatttgctgctttcgtatccgtttccaaactgctttcacctgtactattttcaatttgaggctgatttgcagattgagccagagcagtcacactactattcattgacactgccaaagaagcaaccaaacaaattaccgcaatttttttcattcgtaaacctcatctttctaaaaacaactatatacttttttagtataactcaatacataaaccggaacaagctaaatatatcattttctcttgtgaaaagctctcatcttgaatttattaataacttttaaataaagtaatgccacaacacatccacaaagcgaagtaataataaaactatctaatccgtatgttttttctccataaagaactttatagtagatactccatatatacatatgaatcaaatacataatcgtactcatctttcttaatttatgatatacaggatgatccattaatttccaatttaaaattattccaaaaaaacttactgtcgtcaaaatcaataaatatgacctcaaaaaataattctttaaaatgcaatttagaaaaaaactacttatcataattaaaatattcatattataggatatttttttgaaattgaagcacatacctataggaataaatatcattcctctgaatatacgcccgttataaactgtatgtgcaattatattttgcactatttcaacactatatttactgctttcaattcctgcaatccagcttattccaattgaaataacagaaaaaattatactcactatcaagaaactattttttgaagcattcaattttaacaataatattactatgcacaatgtatatactgttgatagcaaataccataacggccaagcattatattgttctccagtaaaaaatatcccttgtaaatatgttgacatagcttttttaagagaaatgttcttatcaaaaacatgataaattgttaacggggtatataataccatccaaataaaatacattttcagtatttttcctatataatgtcctaatatagatatatctgatgctttgttcgaaaatgacattctctctgaaagtaaaaaaccggttgttaaaaagaaaaatggtactgccatgttaacaatattattatatacaatttgaactatatcatttttacaatcaaccaacggattcgtatgtattgcaactacagcaaaagccataatgaattttatcaagtcaatgttattatattgcaaccgttcagtgctaatcagctcacctgtactcatacttaacctttccataaaaaatactccaactatcatttctgtagctggagcatttttcactttgcatattactttaaaatcagcatatttggctctggataatccacattctttcactattacattcttatccaaccgtttgaaacccagtaattatgaccatgataccatacatttccgttatatccgaaatctacttttcctcctcggatataccaccaaccattactgttttttgcaattccataatatccaaaatttacttttccattctgaatataccaccagccaagttcatttttctctacactgttgcagctaaagtctacttttccattgacgattcgccaccaaccattgctgtttttcgctactccagtatatgtaaagtctacttttcctcctcgaatataccaccagccaagttcattcttttctacactgttgcagccaaagtctacttttccattgacgattcgccaccagccattactgttttttgctgctccagtataggaaaaatctacttttcctcctcgaatataccaccagccaagttcattcttttctacactgttgcagttgaagtctacttttccattggcaatccgccaccagccgttgctgtttttctcaacagaatctacaaactgaacctgactgtcttttacaaaccaccagccttcttctccatttacagtgcctttgataacatccattttctggaaagaaactctgccattttcaatataccaccagcttccctcattctgtacaaaaccggtataggaaaaatctgcttttccatttctcacataaatccactgatcattatctttatacaatcccgtataagaagttcctaattctgctgaatagtcccattcatccaaaacagttacagaaagagtaatcgtcttaccccctgcaattgcactgacagttgcaccggtgcctttctgcagtcctttcaatgtaccggtttccggatcataggaaatatttccagttgtacgataggttatattttttgcaccatataccggagttgtcactcctaccagagttgttgtatgattttgtctcacataaacctgtgttacactttttccatttacatctctccagtcaactgttacatctccctggccatgcttttgcatcatctgatacataccatctgcagccataattccattttcattatgcccaatctgagaatagtgaatatcataatgaacatcggtgatccttgtcgggactttactgaatccatagcgaatcggataatcaaatttaccattatattttgaaaaatactgacgtacaccggcgtcacttacccatgcttcgttatcatttgtcactacatatacgttatttaattttgacgatgtacttccaccaattccatactgcgctgctcgcggtccggtcataaccagctcatcctcggtctctttcgatccgacagaagagcgaagcataataatcccacacttttcaatggttaactgctttgtaatgtcactgtacatagtataaaaatcgtcataataatcagaagcacttcgatatctgtccgcagtttcgccctgaagccaatacatcagtcgatgtccttctgtgtaatgtccggatgcgatttctgcttcatatactttctgcgccaatttgctgagtgttattgctctctcatatacactctgtcccggaatccagcttgcaattgcagtatcactccaggctacatttactgtccatactttttcgcctgtcagtctgttccattcataagccaatgcactatctgggccagtcttaccttccccttctgaagtcaacgtatttaatggatattccagtgtttttcctgacaaagaactggcactgttcattgagccagctataaaatctgctgcattttcagaattacaagtctctgaaaaattaatacctgaaatattctttgaccagctccatacagttggtgcataggttgaatacacagttccaatttcacaggctacagacttattcagctgatatccggtattagcggaacacattccttccatgttgctctgtcccatcaaatacatgatcgtcagtggtgctgcttccacagtcacatgaacataaattttatcgtatgctgcctcactattttcttcctttggaaccaaaaccagaagtgctgtaccaacgccacttgccctcacattactgtcatctgtctgcgtaagtacttcatctgattcctgctcctgtacttctcccgttttcactggatgtgatttgctctctaaatttgttacatgatcaattttatagtcattatattcttcatgatctttatccttataaatagaatatctgtcatcatatgacaacattaccggttgctcctgcactctaatattcttgcccaataattgttcagatatcacattgtcctgttctactgctgcttgttcagacacatccttttcatccacatcactcgggtcttccattcctgtctttgtcgcatctgtaatatctgatgtatcagctaaatctgctgcatacacagtacctgttgtcattgtcaaaatcataagaccgcagagtaatgcagaaattcgtcttttccaatttttcatttcttcacttcttgcctttcctattcatctactgtattaagtttaaactaaatttttattataactcatatttttttaatattcaagagcacaaaaaatatggattttagattttctatatctaaaatccacattttcttcttacattttttagaatacaattacttttgttccgtttggaatattgtcatggatccattttgcttcacttaaagcaagtcttacacatccatgagataactgcatgccaagacgaccatcctgaatgcttgttttacttcctttattgtaaattacagaatggaacagataatccccatagaactgcgtataataccagcaagtataggtaggttttccaaaggataatccacgtcctgtcaccttaaattcacctttgacggtcggagtggaaggtttgcccggactgcaggaaatatatttcacggtagaccagtttccctttgatcctgcaaaaatagcaactttacaagcagatgtatccgttacgatcaaccagtttgtatcactggatgcataagctgctcgggatgaaatctgtacacttacaccactcatggtcacttttccatttgcgacataacaatctgtaccattccattttacatttccattatatccaaagtctacttttcctccacggatataccaggctccattattatttacaccaataccattgaatccaaaattcactttaccattatcgattttccaccagccgttagcattttttgctactcctgtatagccgaaatctacttttcctccgcggatataccaccagccaagatgatttttttctacactgttacaattgaaatcaacttttccatttacaatgcgccaccagccaagacggtttttcgctactcctgtataaccgaaatctacttttcctccgcggatataccaccagccaagatgatttttttctacactgttacaattgaaatcaacttttccatttacaatgcgccaccagccattgacatttttatccacaccgctgtgtccgaaatctacttttcctccgcgaacataccaccagccgtcttcactctttacaatgtcattacagttaaaatcaacttttcctctgacaattctccaggagccattttcattgctttttacacctgtataggaaaaatctacctgaccattttttacataccaccaaccatttgcattttttccaacattggtataagtacgatctatgataccatttcggtagtaataccaatttccatctgccgtatttttgcaaataccattcaacatatcggctgtaacttcacaggaagctgatactttcatttcagaatcataagcagtaatcgttgctgtaccatttttaatcggtgtaaccgtaccattctcatcaactgaaataacagaaggatcagaagattcccagatcagatcctgatcagatgcatcttccggataaatagtagcatctaattcaaatggtgtatcatctgtcacgtattttttatctgtattaaatacaattccagaaacaggtacccattctgtatcagttacatccgtcacttcatagcaatcattatctgtacaatggatactttttgttcctttcacaccaggctttgcagaaatatctactgtataatccttattccacatatctgcctcatgtgttttatgtacatttaccatgttctgtgcctgttcaacatcacatttataagttactgtctcccagtcatctcctttttcactatcaccaaccgtataatttgtaacttcatcaatatgaccattatgacgaatttccaatgttggcagttcactttcctgatttgtattctcatctgataatactgcaatctctgccccactgttatcatttgatatttctgctgccagtgccggtactgcacacatgccagccatcagggatactgctgccaatcccactattactttttttaatttcataaaaccacctttctgcaaaaggctctcacagatttctctgcatatcggtcttttactcaatcactcttaagatttttactctttttccagaaaatgtcaatagaatattcaactattactatatattgtcaaaatctcatcaatctgcgcctgttgatttttttcataagatttgaattcttctacattatctaatttgtattgtttcagaagaatggtactatctgctacaagttctccaataactgccacacccagcataatacacagcatctgtttacctgcttttttgcctccacaaacaaaaacatttccagaaatccccagattccagtgaaaatgcagttaattccgcctgtgtaccaatttaaggaaatcgatattccaacacaaagactcagatgccacagattctttttccagatcagacgataaatacctagtaagatcaatggaagtaagatcacaccgtccagccacattacattactgctctgtgccaaaccatactgacacaatccatatcccatagaaaggaaccagatccatacacgtcccaactgattttcaaatcttctgtttagccagattcctcaagtcatagatgccagtgcaagtttgatcaggatcatcaaatcaaaaaacgtatgtaattgcgttttatcaaaaaaatacaccagcaaatttaatggagatgccagataataactgaatactgtgatatttgttccacccagtgtcttgccaaacgtataaccaatattgttgcttccatgcaatacatcatgaaaccaggcataaaaatccatgtattgatagtatacatctgcgcttgccagtgtagaaccaccaaatggtgccagacctaatattttaaaaagaatgatcagaagtactgccacacctgtaaaacatcccatatacaagctcaaactctttattttaagctccatattagcaagttttactctgtgtgccaatatcaatattgcctgcatatccgctctccattacaaataatcagaaactctgtccatacttttggttcttaaatttcgctgccagaaaagatttaatcttcttgggccagttctcttttccaagctgaatacatggcaactctttataattcacctgattatattccatccatacatccagcaacaattcactgattcgtcccataaacctcgcttcataaggtgtcattgcactggtatcaactttttgctctacctgacccaatattgcaaacagccattcacagtatgcatgatacaactctttcttcataataaacatattaaacatatgtccgctttttctctgaagcattctcttgtaagtctcataatattccgggcatatcaactgtataatttccccggtaatatctaaatgtctgtgatcatgtgtatgctcataatgactatataaagtttcaatataataatttcttcgcgtcggaacgattacatctgcatgctccaagacatcctgtgccttttttgaagtaagaatcgcacgttgtttatcctggcacaacatcgctgccagctttgaatttttatttgaaatgtaccgtctgtaatgcactaacccaatataatccgcatccaggttcttccatgcccaatatattcctgtcaattcacaataatttgcattttttgctgatatattttcgccgctgtcatccccctgaaatccaatctcctgttttgcaatcgcatgaccaacatgtaacggtaaatacatctcatccgacggcatccaatatttcttatgtgcggcaactaatacttttatatttttcttactcataattttaatatatcctctgctgacaatattgcatatttgccaaactgacctgttctcagcttttcagaaagctctcttacagattcagcgtatttattatacgcgttctcatccaacatttcaaattttgcagataattcctttaaagaatctacgcaaattcctactccctgtttctctacaaaatctgcctccgcagcttctttccagataataaccggcaagccactcgacagatacagtgaaagtttgtgtgggttattatatcgcagatattgtccggactgtccgacacaaccatcaatacttgcaccgtcccataccagaccaaatccacttgtcagttttcccggaatctcatccgacgggaagcttccaaaatactgtacattttcgcattgatccatctttttgtcataattcatgccatacagtttcacactgacaccacttagttcgccaagctgaccgacatacccgcatttttctgtatcaagatttccagctactgtaatcgctttttcaaactttggtatattgataacacttcctttttgcagataatcaaaaatctcaagtgtcacaattttttcttctgatacaccgcgttctataaaaaactgtttcatcactgcattatgtacgatcagtacatctgcaattcgcagcataaattcaaattcacctttataataatcattgtaacgaaatgcccgcaattcctctacatcatgaatcagactgataaattttacatgttttttttcttttaattccgtcagtgttttctctctggtcaactgcggataatgaaacggatgctgtagcagaataaccgaattttcttctattcttttcagacattctgcccagtctttccgatagccaatctgacgctgtacttttgcaagcttcgttctttttgtcgtattcatgcggatcaggattctttcatacttcagaacatctgcaacctctgcaatgtcctgcgttgctttcgttcccgcatgattataattttcagaaatttctacaatttgatatttcttcatcttacatcctttaaaaacagtttctctaatttcacggtttccgtctcgatattatatcctttttctgtaaaattttgttttacttccgaaacatccagacgttttgccgttttctgcatctgactcaaatgctcactccatacttctgccccttcatccagatccaggaatacaaagttggaattaatcttcacttcctgtgggattacttttgccgaagcaagcatcggaacaccatttgcctgtgcttctaaggcagcgattggtaat

SEQ ID NO: 13081 - DNA, 253 bp, Unknown
  gut microbiota DNA sequence
tgccggcattcccagagcatttacagttgatgtatttgattttgttttgcacaggaattaggaaaagcgaggtttgtacaataaaatcgggagccttttattcacaaggcaatgagaattggatgcgcatatatcaaagcaaaatgcggagagaaaaagtcattcctgttcccagtttattggttggactggtgaacgattatgaaaaaaagtacggaataaaaaatggggagtatttattcaaaaataaaaa

SEQ ID NO: 13082 - DNA, 11659 bp, Unknown
  gut microbiota DNA sequence
ctatttatattaaatttatctattgtaatcctgtataattatatttcccaaaaaagtgctgactatacaaatctccagctgttgctccaacgggaacagtatatatctgaatactataaagcattgattacagaaacagaaaacaaaaatcgttttattcatgatatcaaaaagcaccttcaatccatttccattctgaatcaaaatggtgaagcagaaaaaataaatgactatattaacacattgattaattcctctgaacttcaaacttctgtccgattctgcaatcatgaattactgaatgctatcttttgcagatatctcatgcagtgtcaaaacgacaatgtagaatttcgaactgacatacggaaagatacctgtacatttttagatgaaacagatatgacttctctattctgtaatttattggataatgcactggaagcctccagatatatacctaattcatttattgaactttcaatccatcagaagccagaaactgcttttacaatcattgcactcgtaaattcctgccgggaaagtcccttttccggtacagataaacgattgaaaaccagcaaggaaaataagacacttcacggacatggggtaaaaattatagaaagagtagtaaatcgctaccaaggaagcatagactattactactcagaagaaaatcatacatttcatatgattattgcattaaaaaaaccacgtacatgacacaccatcaattgctgagctccttgaaaattctcttacaaaaaaacatcccaaagtactatgatatctaacgtactttgagatgttttttcattttttcgttatcggatactgaattactatttgtttccaatatcgtatggtgttgtctggtatacataatagtttaaccagtttgagaacaataactgtcctgcagaacgccatcttacaatcggtttcttggtcggatcatcatccggataataattatacggaatatgtggatgtaatcctttctcgctgtcacgctgatactccagcgccagtgtatttgcatcatattccagatgacaaagtacaaaaaagtttttggaatccgtcgttttcaaaattgtaggaccgccctgttcgctgtctgcaatcagttccagttccgggactttatccacatctttcttcaagatgcccacttcccgggaatgtggtgctaaaaatacatcatcaaatcccctgaataatggtgaactctgtttcaaaacggtattcggataaacaccggaaagtttttccgggtattccacggtcggtattccgaaatgataatagagtcccgcaagcgcaccccagcagatgtgcatcgttgagtgtacatgtgtctttgcccagtccataatggtgcaaagttctttccaataatgtactttctcatacggcacaaatgccaacggagctcctgtgataataagtccgtcgaaccatcgatcctttacctgctcaaatgtcgtgtagaaagactccatatgctgcgtatccacatgctgtggcgtatagcttgcagtctgcagaaattctaccttaatctgaagcggcgtatttgaaagtttccgaagtagctgattctctgtgatcaccttggtaggcatcaggttcagaatcagtacattcagaggacggatatcctgatgcatcgcccgatactccgtcataacaaaaatattctcgctttcaagaactgctgtagctggcagtgaatccggtattttaatcggcatatccttttcctcctttttctagtttcaagattctcctttgaatcttgtagaactctcctttgagtccccgcagatagttctattctatctgttatccataaataaatcaacacttatttttttcatagttcatgtatcacagatgtttagaggatgatcatgcccgcaaaaggatttatatttccttctttaatgtatgtaccacttttacgatcagtgggattaccatagcgatccacaccaccggctcagcccagataatgccccagtatgcaaacaccggcgcaaatacaaaggcaaaaataatttttcccgcaagctcaatgcagctggaaaataccggaatcacgcggtctccaaatccctgcatggaatttcgcaaaatcacgatcacaccgcacacgataataaaggacatatctactttcaaatacatgcttccccagtagattacctccgcatccgtggtacttgccacaaaccggatcagcgcaccttccaccgtatgacagataataaaaactgccacgctccagattgccgcaatcagcaaagatgcccgtattccctgacgaatccggtcaaaacgctttgcaccgtaattttgtccgcagtaagtcgccatagcagagccaagcacgctcatcggaagggacatgatctcaaatacttttcgcgccgcggtatgtgccacgatcactgtcgtaccaaaggtgttgatggcagactgcagcatgatcgttccgatgcttaccaggcaggacattaatcccatagataaaccacttttgtacatttccacaatcagttctttctccggtcgaaaatctgatttttgcaaatgtaaaatcgggaatttccggaaaattcgaacaaaacataaaactacggaaattaactgtgccagcaccgttgcgtacgccgctccctgaactcccatatgaaattcaagaataaacaaataatccagtccgatattgctgaccgttgccaggatcaggaacaataacggtgtcagcgaatctccgatcgcacgcaatgtattggcacacagattatacaaaaccgtggcaaacagtcccacgatcagcacgctgatgtacgcgtaagacattgcaaactgttcctccggaacattcagcaaatgaagcaatggctgcaatacaaacatcaaaaccaccaccagaaccgctgtggtcagtacaccaagctcgattgtcatagcaaaagattttttcagccgtttcatattgtcagcaccaaagcacatcgctgtgatcagggaaaatcctaatgtcagaccatttaaaaatccggtcatcagcgtatgtaaggtggacacagaaccaaccgctgccagtgcttccgttcctaatgtacttccaacaattttggtatctaccagactatataatagctgaaaaatattcccccagaaaatagggatggaaaacaaaagaatctgtttccaaggggttccttctgtcaatgttttcgttttacccatttgtcataactcctttccaagagtgtcgtgacagaccctcatactgttgtttcttatattatataaaattcaactccgacaacttatttcttacattttggtaaccttagcaagtataaagatttattggacgaattgcaagtgaaatgttacactaatgtatagtgcccagttgataataatttccttttttacacaaatttttggtaaaaaccgggaaaatccacttctgggaaaatgtagtatacacaatctacaaggggataaatgaatggataaacagaaaaacaaatattattacctgaaagggattaagaatggtatgccgatctgtctcggatatctggcagtttcctttacactgggaatcactgcccgcaatgccggtatgacagcctggcaggcgatgctgaccagtcttgcctgtaacgcatccgccggacagtatgccggatttacggttatcgccgtcggtggatcttattttgaaatgattttaatggaacttgtggcaaatgcacgttatcttctgatgtcctgttccttaagccagaagttttcttcggaaaccgggcttttacatcgtatgctggtaggctatgatgtcaccgatgaaattttcggtgtcgcggtctcagaacctggaaaactgaatccgttttacaactatggtatgatgactgtggcaattccgggatggagtcttggaacattcttcggtgtcattatgggaaacatccttccggcaaatattgtcagtgcgttgagcgtcggattgtatggtatgtttcttgctatcattattccgccagcaagaaaaagcaaggttattgcggctctggtcaccatctctatggtttccagctacatattctcacggttaccggtgatttccaatatttcgtccggtatccgcacgattattctgaccgtggtcattgcaggtatcgcggcggtgctgttcccggtaaaggaggaagacgaacatgaagcataatatttatatttacattctggtcatgtttgccgtgacctacctgatccgtgttttgccgttgacgctgatccggaaagagatcaaaaataagaccattcggtcgtttctgtattatgtgccttatgtcacgctggcggttatgacgtttccggcaattatggaagcgacaaacagtccgcttgcaggacttgcggcactgattgtcggaatcattctcgcatggtgtggacgaagcctgtttcaggttgcggtattgtcctgcgtggtagtgttcgtgctggaattatttttgtaatgtggctatactttaggattatgaaagcggactcagacaatctttcctcggcaagcgattgttagctgcagaggtaagattgtctgactggcgctttcactaacttatgtattaattacaagaaactataaaagttcctctgccatagcgtcaagttctttctcgttttcctcactcagagaagacataatttttacagagtgctcaagccatgtaatctctttgcttttctcaaacatacctgtcatcacacgggcagctgtcggagcccaggaaccattctcaatcagaccaatggtacgtttctgataattacgctctgtcagatgctcaataaatgtcttcatgaacgggaacacatccccattgtaagttacagttgccagaaccagttttccgtaacggaatgcatcttctactgcctctgccatatcctcacgggcaaggtcacatacaactactttcgggcagccttttgctttcagcttctcagccagcagctctgctgctttttttgtatttccataaacagatgcatatgcgatcataacaccttcggactctacgccataagaggaccagatgttgtatttctcaatataatgtcccagatcttctgtcagaaccggtccatgtaacgggcagataatctgaatatctaaagttgcagctactttcagcaggttctgcacctgtgcaccgtattttccaacgattccgatatagtaacgacgtgcttcgcgatcccaatcttcctctacatctaatgcgccgaattttccaaatccgtctgcggagaacaggactttatctgtgctgtcgtatgttaccataacttccggccagtgaaccatcggtgcaaatacaaatgtcagctcatgttttccaaggcttaaggtctcaccattttttacttctactgtttttccgtcaaggttcagtccacggaagaagtttttcatcatggtaaatgtctttgcatttccaacgatctgcgcattcggatatttttctgcaaatacttcgatatttgctgcgtgatccggctccatatgctgaacaatcagataatccggtgttgcgccatccagcacgttctcgatatttgccagccattcctcaccgaaattgccatctacggtatccataacggtgattttctcatcacggatcacataagaattgtatgccattccgttcggaacgatatactgtccttcaaacagatccacttcgtgatcatttacgcctacataaataatgtcctctgtaattttcattgcgatacactccatataattttttacttattcatctcacgggcttttcccacgataataataggggattagtccaaactactacgggttgcttctcatattatagccagaaatgccagctagcgcaactcctgctcgaaaaataattgttttacaactaatctgtaatcagacagatgctgcgccttccggatctttttctcgtacttttccgtatttgtaaaagaccacgccagataaaaccacagttccttcattttaaaaagtacgtttcgttccccagacatctcctgcgtatagtctgcaagcaaacgttcgtgaaactcccagaggcgttctttggaaagtttctcagttccccggatttcgccaaacaatgctggatttgccagcacacctcgtccaagcattacgccagaaacatccatctgtttcattacctgctgatatttctctttattgaaaatatctccattgtacacaaccggattttttgatttttccagcgcattcagaaaactttccatccgcggtgtgtttttgtagtaatccgtctgtactctcggatgaatgatcagttctgacaccggaaatttattgtatatatccagcagatgttcaaattcttcctcatcttccatacccaaacgggtttttagagacaatcggatattgagcttactgtacacttcctccagaaactgttccagtgcatccggttttgctaaaaatcctgcgccccggtattttgtcaccactgtgcgggacgggcagcccaaattcagatttatttccttatatcccagctgttccagttcctgcgccgctttcaaaaagatctccgcattgtttgccatgatctgaggaaccagcgtaatgtcttcattatgctccggcgcaatgtccttatattccttcgggctgatgctccgattttggttcggtgccagaaacggcgaataatatttatctgctttttcaaaataatctgcctgtgcatttcggtaaatatatccgccaattccctccagcggtgcaaaatataaattcatactataatattactccatacgcttctcatttgttttctaatagttatgcttcttaaatctgatatacctttgtctcgtacggctccagtgcaacctcgccttcgctctctgcggttgtatacagatctgtcatccgtgtttttaatgtgatattctgtttttcgctactgtaattcagtacaaaaatatacttcgcatcatttttctcacgtacagcaatctcacagtcagccggcagctcgatcagctctttccacggatcgatcacaccagtgtacgtcagaaattctgtcacattctgacgggtaaatgttccgccaaagtgtaatgtatagccctgctgtgtgttggtgcggatcagcgccggacgacctgcgtaataattggatgtgtattttgcaagcacttccacatcatcacctgccgcagccagaatatcattgaaaacaccggtctcaatctctttaccattccagtccatggataccggatcatctgctggtcccacgaaggtaaattcttttacatcggtatggcttacatttgtcagtaatcccggcatcggctccatcacgcaatgaccgtgtttgtctttctgtccggtacgcgcgccgatgatcagttttccacctgcttttacatactctttcagcacttttgcacgtttctttgtcaaaatcaacggatgcggataaatcaataccggatattttttcagttcttccagttcggtgctgtctttcaaatagaaaacatccatcggtgtgtgactgagctgtgctgccacgaaaatctctttttcgctctttttcatcagacgctcatgccatacatccagctgtgcatcccacacgttatcataatctttaactaaagcaaatgctgctttgtattctgcgccggtcacgccttcaatcgcctgtacccgatgccagatgcggtttacttctgccagtttacggttgtagcgattgtcgtaatctaaaattccatgccagtagatctcggttcctactgttgcggtacgccagcggaagaagcttacataatcagcgccgtgagcgatactctgcatggtccataaagtcatctgtcccggtttcggtgccggtgcttccattcgtgtattccagccgtttgcaccggactgctgctccataataccaaaatgtgggcagatggaacgcacttctgtcagatttttactccatttccggtcgttgaggtcatcagaatgttttggatcttcgatcaggcagtatgcaaagtttggataggaatcataggtcagaacatccagacactcgtcttccatcttgtggttgtccacattgccaaaaataccgtttgtggtaatgaaatcttccggtttcttgtatttgcggatgatatcgctctgcattttgcagaaacgaatcgtgctgtcagaaataaaacgataataatctaacacctgatgcggatttgtggaatcatgcacggtcgtacgcggcacataaatctctttccagtttgtataagtctggttccacacaatggttccccatgcctcattcaatgcatccagtgttttatattttttcttcaaaaattcgcggaacgcaagggtatcgctctcggaataaaactcgtccacttcacagtttaattcattgtcaatctgccagcccacgatacacagacgtttgccgtaatgttttgccacttttttgacaatccgggcggataattcctgataaatcggagaattgtaattgtagtggcggcgcatgccatgataaaatggtgtgccatccagacgacagttcaatacttccggatatttttccgtcaaccagactggtggtgtcgctgtcggtgtgccaaagatcaccttcatctgttcctcttctgccacatccagaaattcatcaaaaaattcgtaagtaaattccccttcgcatggttcaatcttgttccatgcaaattctgcgattcgaatggtaaaaattccattttctttcatgcggcgaagatcgtcacgccacagttttttatcccaatgctccgggtaatagcaggtacccagtgaaagtttttcccatttgaaattttgttccgctctcataatagcttctcctttttcaatacattacatctctttgtttccacataataccagatgaaaaatcagtttcttacatctaatataataatataaccatttcggtcagatactatcatgatagcatttcagaatgtagaaaacaacaaaaaaactggaaagcctttcaactttccagcgcccctgccaagaatcgatgcgacaggatttgaacctgcggtctccgctccgcttcggtcggctcaaagccaaggtccacaggaccttgtgagccctctgcgtcccgaacgcagcactctaccaaacttttttctgcacaaaaaaactggaaagcctttcgactttccagcgcccctgccaagagtcgatgcgacaggatttgaacctgcgacctctgcgtcccgaacgcagcgctctaccaaactgagccacgcatcgttattttgttttctgtagtgcaccgccgcgctacttgacatataatacaggaaaaggtgttgtttgtcaacaccttttttcattattttccaaaataattttttattccctgtaataagccttctgcctggttatttaaagtaccgtcactgtgatcggaacatgcatttccaagctcgatatcgacagatggtattgtactgtaggatgtctgcgttaggtcaatgctcatgcttccgccgccattgatcttacagccctgtccacgcagtccatctactaaagatgcacccagcgcattgtgctgtttccagtgagaagccaccggctccatccccttgattccatccggtacggaaatataaaagcatcctttatcatagcttaatccgtcaccgtcccaatgtaaggaaatatgacagtctgctacattattgcagattacggttcgtgctacattatcaagctgtacgtcagagccatcccgcaccatcagcacatcataacctgctgccagcagtttatcccgaaggatttctgccatgcgcagcgtcacactgctctctgttgcaccatcattaaatgtcatgccgccggaaactgccgttgctttcgttgcaccagctgcggtacttccaccggttgttttggctgagccatccgggtggcataaagttttggcactgcttccaccggaagttccatgtcctgcattgacaccaacaacgattccttttcggtttccacttgctttatacatgacagctgccccggaatggatcgctgaatgatctgcatactgccagcttccatccagataaatctcctgacggtcagcatagcttaccggtgcactctgtgccggttcctggctgctgttgtcctgagttgcttcctgttccggttcctgagtctgtgtatcctctgtattttgtgatatatcgccctgcacttcttctgattccggaagttccacctgctccggctgttcctctgacagatccggtgtttctccctctgaaatgcttgtttctgcgccagtttcacttgtaacactctgtacatgattggaagatacttctttttttccacaggatgacagtcccactgccaatactcctgcaaaagctaatatcattaatctttttttcatcatatattatttttcctggcatcccggacaatgtcttgccagatgctcatcgatcaactgttttaaagttacgctgtctacataatcagagataactttatacataccttcccagaaacctaccgtcgcacagtcatgataacgctcacactcgttttccggtgtttccagacacgcgatcggtgcaaaacttccctcaatcgcacgtaaaatttctcctgctgtatatttatctgcttttctgctgagacgatatccgccctgtgcaccacgaacgctacgcaccagtccggcacggtgcagcggtgtcacaatctgctccagatatttgatggaaatattctgacgtgcagaaatgtctttcagtgaaatatatttttcttcgccaccattgaccccaaggtcaaccattagacgaagcgcatatcttccttttgttgatactttcatgttgcttcctccttgcaatctataccatagctgttcaggatagatacaatactgtaccttccctttccctatggattctgtaaaataaatttattatatttcattatattcctacatgatatatagtatttattttaatatacttttcaaattcttgcaaggcgggaatttgaaacaaaacaaagcgcatgccgttatgcacacgctctgtcagttttttcttttttaatatttctgttgtttagttattcatattatccgtaatgttatattctgctttcagagatacaattttctggttaaacagtgtatccagtgtctcatatccggcaaatgtattatctccgctcgtgaaactttcatcatctgaccaccagctcgcctctggaacatcataatccataatatctgtataaagggaaccatcactgtactgaattatgttgtggaagttcacataataatactctatatcagatgttccattattagaagttaatttataaatcatatataattcattctgattataataataaccatctgttgattgtgacatgctcccaccacttaaatcacagattttgaagtgggggcttcttgctcaatggctctactgagcc

SEQ ID NO: 13083 - DNA, 2071 bp, Unknown
  gut microbiota DNA sequence
tctgcctctacaaattccgggcggctcaagtaatgataccaggcacttatttttccttctttcaggaaattttctgtatttaagtcaatcagatccggattttccgcatgtacattgatcattgctcccagttcttttgccctgagcagcaatcttgccaatgtcgcatcgtctaccatcatgccttcttttttgtatacaaggaagcatttaaaacttgtgatgccttctgctacagctttctccatctcatctaaaatttcaccgttatttaagtttgtgatacagcaatgcattgcataatccacgcaggcttctttttcctcctcaactgaaaaatttatttaatgatatttcttcattacgattgcttccacgatcattaaaaccgcgtaaaatataattccgatggcacatgcaaccacgatgtatgcccatgcggtggaatactgcgcctgtacaatgttatcacggatctcacgtccgacacccacgatatattctgcaaaatactcacttacaatggcactgataacggcatttggagtacttactttcaatgcggtaaaaatatatggcacgctgtttggcatttgcagtttgaaaaatacctggcgttttgtagctgcgtaagaggccatcatatcttttgcaaatggtttcagttcatttaaaccgcggtaagcattgatgctcatggacgcgatactgacgatcataactaccagtatttttgctaccatgcttcgtacttccggctgattgctgacatcttttgtccagtttgtcataaccggtgccagcgcaacgatagggatcgcattaaatgcggatacgatcggtaatcctgcaccgccccacttcggagccatggttgccagaactgctaccagataaccgatgacggaaccgacgatcagtccgatggcagataccatcaccgtggacttgatatttatcagcatcgcggaccagttatcatgaatgatcgccgcgattcgtgtcgggagcggaagggtaaatacatccgtccgcaaaattgcgtgtattgcctgtgactgccacaggataaaaaaggcggcagagaagttttgttgtgacttctttgccgctttaaagtttcctgtgaaaaggttgttccttaatttacggttgattatacgcattcgctaaaacaatttcaatttctcagtgcacaattttttttgtgctgttgcacacagtatcaccatcaaaagaacgacaggtcaaacatatgtaagacctgccgttctttgtctattacttttttacttttgttctgtttccagaagttctgcatcttccagttctgtttccgcctctttcgcaatttcctgcggccgctcagattcaagtaccatactgtgttttaccaccagaatccagcccgttgccaacggtacagatcccagatatgccgcgcgcaccgcaaaggcattgactgctatcgctccatagcatgccccgataaaaaaggaaagtactgtattggtatacaaaattccttttttcttaaattccggatcttttgtcaaaaaatactgcgtccagccgagcatggcctgtttgaaattattactggaaaagatggtcgcactgttgtagccgtttgccgatgaatatacgccccactgaaatgcagaacagaaaaaaatcggatacagaccaaccagcactggttttaacggcagtaatgaggatgccactaatcctgccgcatccaccagaatcgccaatttacgcatatttatgttcgtataattcgtcaacaggtaggaaactaccactccgccgccaaaaagcggtaatgcaaggaatcgtaacagcacatcataccactcacccgataccagggatgctgccatctccatgatatttccggtctgcgcagaaccgaagttacccatatgtagtaaaatcgcataggctccaaggaatccacccacaagagcaaaattccagtgaatcaaagcttcccattgattttttgttactttttgtctcattgtatttgcctttcttttcagaaattgtaatgtctttgattttt

SEQ ID NO: 13084 - DNA, 2736 bp, Unknown
  gut microbiota DNA sequence
aggggagttgaagtgtcgaagacacttttttacagaaattggaactatttagagatgattttgcaattgagttctgtgtgattacaataagagcttttttgagacttaaatagtgtgatttctgtaggattattgcggaaaattttcagttaggagcgatgtgtatggctattttactgaggcagttatgtgaaaaagcaagttatctgtacggaatgcggattctggcaggagagaacgggacaggcaatatcgtgcagtggatccataccctggaggacgtggagaccggtggattcattcacggcggagaactgatctttaccacgggaattgcgcagaacggcaatgaatggctactggaatttgtagaaaatctgtatgagcgggaagccagtggtctggtggttaatgtgggaccttacattacatccgtgccacagtccgtcattgattattgtaataaaatgaattttccattgctggaagtgccgtggaaaacccgtctggtggacattacgagagatttttccaaccagatcttccagaacgaaaaagaagaagaaaatctggcggacacattgaaaaatatcgtgtttgatccgaaaaatgccagagaatatcttccggctcttgcccgcaataactttaatgtaaatggaaaattctgcatcatgggaatcgacattgattttctgaaccgaaatgtctaccggcagaaaatgtttcggtcgcatctgctgcgccgggtggagcgaatggtgggaaccatcggatattttgtgtcttcagagtctatttttatcgtattgaatgatttcgcaaacgaggagatccacgatttggcaaaacgtctggaggagcaggaaggtttcgatactgtgacgttaaagattgccgtcagtcagaatgaacccggaatcgagcatttgtctgagaactataaaaaagtctgtaccctgttgcgtctggcacgaaaacgtggggaaagtccacttttttatgatgaatttggtgcgaaaaagattctgttgtccgtgggagataatgaagttctggagagttattatcacgagacgcttggtgcattggaacgttatgaccgggaaaatgacacacagtatctggaactcctgcgccgctatcttgagctggacggcagcgtgcaggcactggcagatgcggtgtacgtgcacagaaacaccattaattaccagttaaataagatcaagaagatccttggcagggatttcagtggtttgcagagccggtttgaactgatccttgcatatcaggtacgggaattgttgtaataaaggaaaattaatagtgaaagaaaagcttttattgtgtgttgaggtgatacccagtaaaagctttcttacttttatggagattttgtggaaacgttcatacaattctggaagattacggagtgatcatagaagaagcttataacggacaggaagcattatcacgtatggcagacagtgagctgggttatctcagtcgagaagactcccacttctgcaagtggtgagtaataacaagtctttctcagtgggagtacaatctccgactgagataaatgctccgcgaggattgccgacagatttcgatcatagctatgagtgcaaatgcatttgatgaagatgtaaaacgttctctggcaagcggtatgaatggacatttgtccaaaccggttaatgttgagaagttgattgagatgctggaatccagttttcgtaaggcagcatgtgaccaagatgctccataactttttcctgagaaccatataacctggtcaatgccattttacggtctaattcctgaccggagatggcattggtcaggtattttttatatttgtcggaatccatatttttcgctttcacatatttcccaaaatagtaaagccggtcaagctgttcctggtcagagacagcagttgtggtcagttcgctggtcatctgatggtgaatgtgtccatattctccctccggattgtgggttacgatggttttccagtcattcattttcagaatcgaagcaatgtctttttcaatttccgttttgcagctgttccagttatcgcgtttcccaagtgttttgtccggataggtcagcataatgccgatggagtcggtttgtctgatgacagattcaaattcccggcggcgggttttgttattgccattggtgatgcacacaactacatagtttccgttcaacagatgagaaccgccccagattgtttcatcatccggatgcgcgacgatcatcagagagtcatagctggcaagggcactttggggaacgtgcgacagactgttcaatttgccttcgcagtcactggaaaaataccagaccgctttttcgtttgcgtttatactatagtaaagtgctccgccaaataatgccgcgaacagtacaaggcacagcagcagagaaatcagttttttcttcatggtaaattcgtccctttcggagtagtgtctttttctaaaaagaatatgtcagcttacgctgaccggagttacgcgccaagtctcatgtgcgttcgacctgaattttaataaatttagtataccactgaaatcttaaaaaactcttaacgtctgcaaaagttttctttgtttttgaatgatttatgtatgttcattgtttcatctcagtctgagttgagactcccacttctgcaagtggtgagtagtaacaagtatttctcagtgggag

SEQ ID NO: 13085 - DNA, 7393 bp, Unknown
  gut microbiota DNA sequence
aatctgatatgattcccctcttttttattcgctataatttacaaatcatgaaattttccatcttgcattatctgtcatagcagcattttactataagcttttcttcacagtctcctatttacagatttttcttcataatctcgtaacttataatttcctgctccagcttgcagtcatgctccagcatatattgcataacctccacataaaatccctttttcagaagatttcgtgttttcactttgtccgtttcactcaattctctgccatatccgctataggtttccaattcagagactcccatatacaaaggcataaaatctatcccggttccttttcgcaaatgtttcaaaatatagaagccatccggatcaagatctccaaaatgaaaccattgtttctctggattttctttataaacctgtttcaaaaatgcctgttttgcactgttatgatatcctgccaggaaaagatatgcacacttttcatccttcaggcgatgaaaagaagtaagattttccaccgtgactaccttgtctgcccctacacgaatagcattcatcttttgtatcagttccgaagatagtgcgatcggtgcatctccgattcggatacgttgtccattttccagctggatttctatatttcctttcagataaatatatgacggattggtataaatctgaaactcttccagaatgattttctgccgttccctggtatcgtcaatgccttccagaagttctgaaaaatccaggtatttcgaaagcactttgcatactcgcgttctgtaatgatcttcaaattctttgctgccatccagtatcatcatagacagttcccgttccagaatttcttctttatttgtgcagataaactctaaaatccttagcaatttgtcgcatacatctaattcataatccgtttttcttcccgcttcgactttggcaagctgatccctgcaaaacatgtcgctaaccgcatattttttctgttctgcatcatctgcaacttctgcaattcttacctgttctgcattatctgccacacttatccgcccagcatcatccgtgatctgtatatcatccgcaagccccttctgcatccatctctcaaaaaacgcaatctgctcctgaatcatatccttcttctgttttctatccaacagttcataatacacatccagcttttccttgcaggcagccagttttgtgatcacctcatcttttttataaatccgaatcagtccctgctcctgcaaaacctgcatctcagtttcaaaatccttcacctgtgctacatttgcaaaatcagagacatattctttccacaccttctccggtttgaccgcaaaattctgtgaaacagcattcgtcccctcataagttttgctgttttcatatttgtccaacagggcatgcaataaattactctgattaatcgttaaattcatccagtttcactaatccttccactgcattcgtatatcgtccggtaatgatcaggctgacggtagactgaatatactgaccgatacttcctattttctccggcggtgcggcataaattacctgaaatccgttttcctccagatattttaccatctgctcaatgcgctctcgcgacagcgcggaaaacgcctcgtcgataaatgccagacgcgcacagcagcttcgctgcggataacactgcaacaggcttgctgccaaaataataaaatatggtgtctgtttttcaccatttgacgcagaaccctgttttttcgaaaggtcagctgttattttttcctcaccctgacggcttgtgatctccatatcataagtaaaatacttccgataatccgtatattcttcctcatcctcctcatttaagatcatatccataaattcccggatgtcccgttccatctcttcgtcttcccgattggcattcatatacaattctggagagttcatgtaattctccagttttttacagatccggaaaaacagtaatcgctccggtttttcctgcatcttaaatttataggtatcctgcccgaacggaatctgcttcaattcacggttgatcgcatcaatctcacgttttgcctcaccgatggtctcattcatttctgcgacaaaatcattcataaatgcactttccagtttctgtgactgatccagcagtttactgtgcacttcttcaatttttacattcgcaatctcacgatattctttccgataaaacggaatgtacgccggaccgcgctggttcatatcctttccggcgattttgcaatattcgatctgttcattttccagctctttgacacattcttccagactgaatctcagttttttcagcgacaattctgaaaccacacgaacctcatcctgctttgcagaaagtttttcgtattcctctaacattgcccgttccagttcaagatacttcatccggatttcttcatatagtttttcacaggtatgaatctctcctgagatattttttcgacgctcctcatagcctttctgctcactctgacattctccgatttttgtataaaggtgattttgctgtgtctctacttcctgataagcctttttcgcatcaatctgctccttcaaaatagccgcaaattccgggctttcctgaatctgacgaatcgtatcttcgtatttatgcttctccgtctgattttgtgccagcagctccggagcttccacatggtaattatttatttccagatctacgccacgcagcgaactgattttttctttcgtctgcttcagttcgtccatcacctgatcataggcttcctgcacgatctgtttttgttcacgcacagattttttctgcaattcaatggcatcctgtcccagacagatctgcgtctttttcatattcatgcaggaaaccgcataactctttgcaagcattccgtccttcatcagaccgccttttggatattcatgcaattcgttcaaactgtcgcacagatgaattccgttcagcaggtagttggcatatcttctggcatcaacatttggaattactaactgttccgcagccgatccttttaccacctcagaatccggcagcttatccgtaatgacaaccgttgccgcatgcagcttcttttcctgcaaaacacgcattgcttccagacagtattttccgtccacgatcagataatagcgctttcgtcccagaaaagtctcaattgcctgccgccaggaagtatctttcagatcctgaaccagttctgcaaacatacgcacctcggcattgattccctttttcgcaaatgcatctttgatcacctgttttgccttaactacttcttccgggaaaatgatctgatttgcatccagctgtttcaactgtttttccagattcgtaagttcctcatgccgtatacgtttttcatcctctaaatgaactctctgacttacaagcagattctgctgcttctccactgcatccagtaaacgaagcagttccttacgtttctgatccgcggaagatcctgcttctccaagatgcagtaagaccggtctgctgccagcatccagtttttccagcaaccatgcaatttctgtggaaagtgccttctgaatccgcagcaatttggcagtctgttcctcttccttttcgattttaaacgaaatctgctgaacctgacttttcagattttctatggatttttgcattccctggtaagcgtcattggactccgcgatctgtaaccgctctcttgctgcttccagaagtttttgcagatccttctgtctctgctccagttcctttttcttctgctctaattccgtgacatgaatctcaatttcctctttttccttctgttttgccagaacttcctgatacttaaagatcatttcccggatgttgagatttcgctttttcgtttcgtattgctgacttttattttcaatctctaccagcttatttttgctgtcacgcagatcttcatacattttccggatatggtcgaactgctcccgctgttcccgaagttccttcaaagaatccacatttcccggctccagtacacattccgcaataaactgatcaatgttattctgtggatcaaatgccatcattttgatcagtttggaacggtatttgcttacctcacagcgcaatcccagtgcacgtatgatctgctccgttccacgctctctgcccataaactctgccgatttcatgcggacaccttttacttccagcagatttttcggtgttacatacatgttttttccatcaatctcacaaaaattcaaatcctcgatctgcgcatttctgcagacaaaccagctactgccgggtgcagaaacctcatccggggattctatgcacacgccgatcaccagatgttcctgctctgccggtgaccagaattccattgcaatataactgacgacctgtccctgacggagataccgcgttgcaccattacttttcgtatcgccccgcacatagccttttaccgttctgtccttatcttttgccgctttgttaaactgtgtatttccagtgagcacatacgtcatggcatccagaaccgttgatttaccacttccgttgacaccggtaaacaaggtggaaccttccaattcgatacacacatgctgaaaacgggaccactgcactaataataatttcgttgctgtttttctattctgcatcatccgcatcttcctccgtttcggtatcttctttttccatcattctcttttccgtcacttccacaaactttttaaattcctctgtatccaaagcaaactgcaaagatgcatacaggcggatgaggcaatccggctccccgacctttcctttcacttcgatcagattgtaacgggaaaataatttcagaatatttgccatcaatgttttgtctaacggttccttgagtccgtatttttccaatgtaaatccaagatccgtgatggaaactgtaattgtctgtgccaggcttccgctgcgcaggcggtccacatacaacgtccacagacagcacagcaccagactctccgctttcttcaacgccagacggttaccctgcagttttccattttcgccaaactccgcactgtttcgaagcatgactacaccattttcccggtcaagcacgatatcaaatccaataaaggaaaaatactgttcaaatacttcctgccgctttgccacaaaataatacatttttttataatcttcgtccttgtcccgcacaagaaacgtctgttttaagagtcttctacagcttttctgaaataaatgcttctccgaagaagtaaaatcttcccatattgtctctatactcatcatgcatcctccttcgttatcttaaaccgtctcaaacgcatgtcatttgcttcataaaatccatcctgcacttccacttcaaatccgttttcctttgcataggtgatcgcggaaatattggcaagaatatcttcttttcgatgcagcgggagatcctcactctgaatttctctggcatctcccatctgtttttccagataacgcttcatcatatcccgggcatacgggttgtacgcctcttttcgctgtgcttccattgccgcctgaattgcttcttctgtcatttcttcgatttctgtcacaaccggctctttgatcgactgcatctgacgcgggaagcgcacagatccctcatccaggaattcgtgactgttcagttggaacaggtcttccatctcctccggcagcgtatctttcatggaaagttctgtcatttcttccatcagataccgcatggtcctctctacatttccacggatatcattctcacgatttctcaggaatcgcgccctgccgattgcgatctgcagataaatattgatcttatgcttgatatcatgcataatctggtcataatcttcatccagaaaacgcttggttgcctgaatcatatccagtaccaggtcttctgcctgcatatgatccatattttcttcttccatgcaatcctgtaccatacgctcaaataccggttcatccgcgatcatcccatctaattttgtttttataaaaattcgatagatatggatattctgctgtttcgtcagtctggaatactcacggataaaatttccgtcacaatattccagaatattttcggtcaggctctccagcgactgttcctgcaccattttttcaataattttccgaatgaatgtagaaagttttttcaacgctttggacagatcccttgcatttttatttatattttttatgccatttacatatggattttctttccattgatccggattatttaacgtattatatatgttgtaaatataactggaaaattcctcctgctccggtttttccagctgatttaaaaactctgccagcgcaattccgttttctgtcattacgatctgcttttcataagtcgcatcatcgatttcttcatacagccatccaatctcttttgaaataaatttgcggatcacagctgctgccatatcatttgcagtcttatctccagtgtactcctcctctgataattccacatgatgctccagaaaataaattgcaagcgtatcccggatcctgtttcgcggaatacgataactgatttctctttcatattctttataaatcagctgcatgcagtcggcataaattctctgattactgccacttgccagattattgaaaaatcctgccggaattacattaaaaacttgaaacatcaaaaaagctccttcctatgtattttccgttcttttttatatcatactatagatcctttgttttttgcaaattcaagcaaccattagtttaaaaaaagaaaaaagtgcagcaatcatttctttcattgctacacttttcatatttatactttatacgttatgtaagttttttatctcagttatgaaaactctcacttctataaatcgtgagtaatatttaccgccagattccccgccgctttcgtattttataatacatactgttttccatcgccataactttttccaatggaacgctcttgaacaccggcattttcatcttgaacttgatccagaagaaggaataaaccgccaatatcgcaaaagtaattcccgttaccagccagatcatattgcgctccaccgaatctgtggaaatattcagaatcatataaataattcctgcaataccaacaattggaagtaccggtccgaagagcactttaaaactaagaaaatgccatctcttatattctggtaaacaaaaaagacgcctgcggctgcagacatccttgactggtttcattttctatattttgtttgctttttttatttgcacttatcataatcactcaatatggatttgtattgtaaaaaacgatacaagattcaagtcgaacgcacgt

SEQ ID NO: 13086 - DNA, 9982 bp, Unknown
  gut microbiota DNA sequence
catgacatacttcaactgcgcacctctgtaatcctgccggaggctatatcagatgggggattggctcccacctgatatattttttatgataaatcacagtcaaaatgagcactaactgttccaaaaaggagaactacatatgttagaactttacccgaattattattcaaaatttacctgcaccgcagaccaatgtccaatcacctgctgtcaggaatggaaaattgctgtggatgatgacacttaccgaaactggtttaccatccagccgcccacagatgttactccgcaaaaagccacactttctgcctataccacttatcaggaggaagctcgtgtcattcgcctgaatgagcagaaaaaatgtccgttcctgaaagaaaacggactttgccgactggttctcgcacatggagatgccatcctgtcggatacatgtactacatttccacgggaatttcataccttttccaatcacatagaaaagactttaatgccaagctgcccggcggtcattgatctgtggaaagaagaaaacaaactttcttttccttctgtcaatgccagtctgtgttctgatacggacaatctgcttttttctgttcgaagccatctgatctctctgatgcaaaacagcccagactctccggaacatattttgctggaatgtttttatattcttctggaattgcagcagcagacgttatcttcggatttactggcagattatttttcagaatctgtcattgggcagctttctgatgccattgaacagatggattttccactggaagataccttgctggaatgtaatgaacttcttcaggatctcgccgtcaattaccaaaaggaagggctttacagcagttttctgactccgcttctggcacttgcagatcagatttcagaaggcactgtcaattatgatctggcagaagaatgggatgcttttgaacagcagtttttccaatatcaggctctgatccgaaattttcttgcaaatgaatttttctctgatctgctgtctcccgacggcgatctggaaagcatgatcgtacaaatgcaatggattggcatggaatatggcgttgtccgccacagtatttttttgaaatggttgcttgaaggaaaaggaaatctctgctatgaagtggttcgtgattcgctggtcatactgacacgaatgaccggatatgaaaaagatgatatttacgaatatctggaaaacagttttgattccctttattgggactggggatattttgcaatgatcgtatctgattttttaaatgtgcagtgattctgagaaaaaaggacaaattttaagcccgatcgatgattttcttctccgaccgggcttttaatgaatttcctgtaatttcattgtctacaccttcaactttctcagattattaataattacttatgttccttttggaccgtacctcctatcttagattttgagttcttccttctcatttcattggactgtacctctatttcttaagttcttttgttgatattatagtaacgcacttcccctgttttgtcaatacttttctgttattttttatttatgttactatttttctgtcttttcttctattttcttcatatttactgttttttattcccaactctatgctatgtaatgtatgatttttaagttataattctttattttactctttgcataagtctctttctttaataacagaattatttctctggcgcagcatttctaaccgtagtataatacataaatatataaactacttctatttaacaatcatggaaaattgcctgaaaccggcaatagtgagggtaaaacaatgaacagaaaatggtggcatgacaaggtagcatatcagatttatccaaaaagttttctggataccaacggagacggtattggcgatctgagaggagttatttcaaaactggattatttaaaacagctgggaatcgacatgatctggctctctcctgtctataaatctccgtttgtagatcagggttatgacattgccgattattatgcgattgcagaagaattcggtacaatggaagactttgacgaattactggcagaagcaaaaaaacgtaatatgtatattattatggatctggttattaaccactgctccgatcagcatgaatggttccagaaagcactggcagatcctgatggtgaatatgcagattacttctactttcgcaaggggaagaacggaaatccaccaagcaattaccgttcctactttggcggaagctgctgggaaccagtacctggtaccgacaaatattatttccacatgtttgccaaagaacaaccggatttaaactgggaaaacccggttcttcgtcaaaaactttacgatatgatcaactggtggctggataaaggacttgccggttttcgaattgatgcgatcatcaatatcaaaaaggatcttaattttcctgattatgaaccggatggtccagacggaatggtcaactgttccaaaatggtagacagtgtcgatggcgttggcgaattactggaagatttaaaaaaacacaccttcgaaaaatatgatgcctttactgttggtgaagtttttaatatgaaagccgatgaacttgctgagttcattggcgaaaacggtcatttttcaagcatgtttgatttcagtgcacactgcctgacagaaggcaaacgcggctggtatgaagccggaccggttcaatttaaagactggagagcggctatcaccaatgcacagcttaccgcgcaaacctgtggttttgaggcaaacattattgaaaaccatgatgaaccaagaggtgtatcacgctttttaccaagctacgcacagaacccggctggtaccaaaatgcttgccactgtcagcattctgttacgtggaattccttttatttatcaaggacaggaaattggtatgcaaaatgccatatggaacagtatagatgaattcaatgacatcagcaccaaagatcagtatcgcattgcaagggatgccggattaacagaccgtgaggctctggctgtatgcaatcgaatgagtcgtgataatgccagaaccccggtacaatggagcgatcagccaaatgccggctttaccagcggaaccccctggctgaagataaatccaaattatactcagataaacgtggcaaatcaggaaaacgatccatcttctgtgttaaactattatcgcagattaattgccctgcgaaaatcaaccgcttataaggaagtattcacctatggaaaatttgttcctgcttaccaacatacggactctgtaatggcatattatcgtgaaacagaaactcaacgcattctggttgctgccaattttagtaaaaaacctgttaccctgaatttggagcatccggcaaaacaggttcttttgtcaaatatggaagccacagacattatggactctacattatcagattccttagaatcagcaactctgccattaagaagctgtgaaatacttgttctggaattagaataaatatgcataagtttgtctgtttacttcaggcaaacagcaagataaaaaagagagaggaacaccgaaatgatgaggtgccgtaacgaaggttttgaaatcaagtggcaaagacaatcggtacggtatattgcagaaaaatctaaaaatcatatttggaggaaattgcattcaagtcgaacgcacgtgagacttggtgcgtgattctggtcagcgcaagctgacatcttcttttcagaatcactgcactctacactccgttccggtcggcgcaaaaccattgtctcccagacaatgtgcgccctcgcggagcatttatctcagtcggagattgaactcccactgagaaatacttgttactactcaccacttgcagaagtgggagtctcaactcagactgagatgaacagagccatcgaaaaatgctccgttaagatccaagagaaccacatcatctccgaaatgcttcttgatcctgtttgtaaatgtggatttaccggaaccagaacctccggcaatcccgataatgatactttccattgctttgattacctctgattttcttttgtaattccaaattcttccggcataaaacgcgggcagatattctcggaagtacagataacagtggatgccagtctcgttccgataccacatgcctcacgcagtgtttttccataagtcagaccgatgcagacccctgagaaaaaagcatctcctgctccggtagtatctactacatctactttcagtgccgggtaaacccctgcgtcaccttccagtgttgcataaacagcaccagctttgcccatggtaacaaccatctgcggaatctttgcagaacggatacgatcctgcagaattgcgcacagttcttccggggtgatattttcataatcctcagaaaacagaattcctgcctcctgctggttgcacacgaagcatcctgtttttcgaataaaatcccggcgctcgatggcaatgctcatattggaaaccagtgcataaaccttcttattatatttttccgcataagcgaaagtcttttttgttacatcctgatccatgtcgatttcaatggcaatgctgtctgcatttttgaaaatctcatcgccatgctcgtccaaaatctcagacatcggtttgtgatccgggcgcttggaaacggatgcaaccacgtcacctttgtgatcaaatactgccagccatgttcccatgccgttttttacttttttcatatatctggtatcgactttgtggcggtttagtttctgtatgacatcctccccgatggaatcgtcatctacggctccgatgaaaatcggctccagttctacgttcgcaatatcttctgcaacatttctacctacgccgccgtggatctgctcgatggttccaaggtttcttccgtatggaatataggtggatgttgaaaatcctttgatgtcaataaatacatctccgataactacaattcccatgtatcttgctcctttattttatctgtatattaactttatatgtctcttgtatctatatcttcaatttatccttatctcagtcatatttcgatacattttttataacaattactatctctggcccttgtcgtaaggaataccttctgccttcggtgctctcgatttcttggaaaacagcgccagtaccagaagggaaataatgtacggcagcatcttgtaaaatgttgccggaatattcagggaagccagaaaatcaaatccggaatatacgttagataatgcacgaaacaatccgaacagtacagctgtcaatgcgatcagattcggtctccactgtccgaagatcataactgccagtgccaggaatccaaaacctgccacaccgttttcaaacttccactcagaaacacctgcggtaatgtacacaattccgccaagtccgcctaaaaatcctgaaatcaatacaccgatataacgcatcttgtacacattaattcccacagaatctgctgcctgctgttccgctttcgctcttttttcttctgccttctgaagtctgcggttcatgcagtgtttgaagaacagtacaaatccacagaagtaaataataattgctgcgatcagatccgaaatctgagaacagtaaaccatcttatcaacatatgcgccaccgcttgtaatatgctgaataaagaaagaggaaaaaatcgcaccaatcggatggataccaccaaggaacgctgctgcgattccgttgaatctcatgtttggaacggcagtctgtgcacaggaccactgctcaattccacttaaatataagaatccagcgccaagacctgccagcgccaagcattgcaagaagcagacacagccaccacggtgcattaaaatgaatggcaaaatacagggcaaaacctgcgcccaccgcatactgaccagatgctccgatgttaaacagtccaactttataggcaaacagtacggaaagggtgcacatcagcaacggtgctgattttgccagcgtacttccaagatcatctgaaagttgatttttttattatcgtggcttacatccattcgtgcaacattctgttcaatttttccatatcaagaggtttcgcaatatgttcattcattcctgcactctttgcaagtatcacatcctccgtaaatgcatttgccgtcattgcaacgattggcaacagctcacctttgtgtttaggcagggaacggatagctgtagccgcctcatacccattcataatcggcatctgcacatccataaagaccaaatcataatatccatttggatgatctgctaccttatctacagcttcttttccatttacagccgtttcaatctcagcacctgtcatacctatgatctcagctgcaacttctctgttcagttcattatcttccaccaaaaggattttctttcctgtataatcacttgcagcgatatttttcaggtaatctcttgcatcctgactcggctttccggatattattttttgcagtgctgcggtaagtcttgaacggaacaacggttttgaaatgaattcatctactcctgctgctttggcttcttcttcgatttttgtataatcataggacgtcagaacaatgacagaaacatcaggtcctatcttttggcgtatctgccttgttgtttcaattccatccattcccggcatctgccagtcaataatatatacaaaataatcattgccattctcatgacgtttcaccgcacgctctactgcctcttttcctgacagtacccactctccgtcgattccaatctcattaagagtagccactgttccttcacagcacatcttatcatcatccacaaccagcacgggcaagttgaccagttcatcaatagtctctgacttttcatcccgcagacgaaggaaaatagtaacggtaaatctgcttccctttcccagcttgctttctaccttaatgtttccattcatcatattgacgatatttcttgtgattgccattcccaaaccggttccttggatttcgctgatgcgtttatcatcttcacgagtaaacgggtcaaacataaccttttgaaattcctcgctcattcccatgccgttgtcttgaatcacaaactcatagcatcctatatccagggaagtggtaggcttttccgtaatagaaaacagtatcttgccgccatctggggtatatttgatggcattactcataatattggtaaatatctgttgtactcttaaactgtctcctcttacatattcatgttcaattttgttgagctgtacttcaaaattatgatggtgagcttcaatctcggaacgtgtcattgcgatcaagttatctaccagttcatccagattaaagtcttcttccgtcagttcgatctttccattttcaatgcgtgacatatccagtacttcattaatcaaaccaagcagatgacgactcgacttggttatttttccaaggcaatcgatcacacgatccggatgatcaatatttgctccggcaatggctgtcataccaacgattgcattcatcggagtccgaatatcatgagacatatttgataaaaattctgtctttgacctgtttgccttgttagccgcttcataagcttccttcaaagcaatcctcgattctatctccgcaagtttttcctgagtggtatcctgtgagatcaacagcaccttttcaagtactccgtctttccaagacaaaggaatgaaagccatgctcttaaaattcttttcatcttccgtacaatattccagcttataaatatcatccatacttctaatcataccacggatatggtctgctgaaatcactttgtcaatcgtttcatcctttgccaccactttatagcgggatgcaatcctcctgatcaggtcatgatatgttccgtaagcatcgtatggtggcttttttccgtgcagactataaaacttataagtatcatcttccagattgcacatagcaaaacgattgaccagacgcattgttccctgaagaagcagatccatcgcatcattcttacgtgtcagctccaatatgttttccatttcttttctggcttctgtaatatcccggacaaaaatcattgcataacgggaaccgtcatttttttctcctctcataaggacgttgcgaaccaaacgttcctcaccttttatccgtattctgcattcaagagtgatttcttttgaaccttcactcaatttttcaacaataaaattacggttgtaaaaatgagaaaccgcttccttgtcctcatcaacaacataattatccaggtatgcctgaatcagttcatcccatgtatggctcttttcaaaaatttccagaagggaatcctctacttttagtgactcaaaagaattatcctttagatttacataatactcgcagatgtttccctctgtataggcgcgatgaaatgcctcatttctctgtgctttcatctcgctctgctttctcttgtcaatatttatgaatgtaccgacaataagacgtactgttccgtccagacgtctggttgtctcggcatttgcccggaaccattgataggaaccatctttcattttcaagcggtattcacagtcatatttcacactatctgttttgtcttgaattgcttgctctaacagtgtaagtgttgcttccttgtcttctggatgtaacaaatctgcccacgattccagtttatttgggaaatcaagaatgtcatgatacccaagcatcgtgcgaaactcatgactccagtacacttccttaatatttccgcttttgtcacaatcaaaacgccacatcccagaacgaatcacgttattgatcagtttcagattctgctgcatccagtcaatctgaacagacaatacccatacctgctttccatcatctgctatggcatctttcttgcacatacggacaaatacaggtgtgccatcgctcatcagcatctgtccttccccacacccttgaagacgttggaacctgtcgtattcaagaaaggtctggttttctccatagaaaagatttctcagagaacctgatgttttcttttgaaattcttcaaacgtatatcccagattcttcaacatgtgtgaactgacctgtgtgattgtaagattttcatcataatatcctgtcatgaatccaacaatattcagttcgctcactgcatcctgtacgattttttgacagttttcatttaactttgtattatccagtgaaaagatattattttcactttgcttttctttattgaacattttcattctccgtatattctaaatccaacagggatgtaagtacttccattagtttatttatatcaaaaggctttgaaagatgagcattcattcctgcttcagcacaatgttcttcatcactcttaaaagcattggcagtcacagcaatgatcggaatttcagcactttctgaatccatctggcgaatatgctttgcagcatctattccatccatgacgggcatctgcatatccatgagaattccaatgcctgttttaactgtatataactctgatcttcaaggaactttaatgcaaatctccgaatcagtgcttcgctgtgaaggcgtcccaagacagcttcatagtttcctccaatagcttcataacactcttgcattgtcatattttattcctcctgtcaattgtattccactaattcatgaacctctgctaatcaattatatacataccttaaaatcgtttttataacttcatcaatcacaatcggctttgacaaatgtgcgttcattcctgcatccagtgatgcctgaacatcttctgcaaatgaattagctgtcattgctataataggaatgttttttccatccggtctgtcattcattgccctgatcgcttttgccgcttcataaccattcatttcaggcatcatgatatccatcaggattacatcaaatgtgcct

SEQ ID NO: 13087 - DNA, 39919 bp, Unknown
  gut microbiota DNA sequence
gatttgctatgtattattttactatatgtgaatgatacaggatagataagggtaggaaaacagtatgaattacgaagcatttttggcagagacagaacggatcagtacattgccagagcgggaacagctgaatttttatacagatgtaatgaaccaggagacgggaaaaacaaaagtggcaatgatggcatgtttttataaagcgttgctctattaccatgcgggagattatctgacggcgaaggaaattttggagcctctgattatagattatcagagttacgaatatatgccggagctgatttcctgtttcaatctgatgggggtgatcgcatactgtgaaggtgagtatatcctgacgcggtattttttcaaacggggattgaaaatagcagaaaatcataaagaaaagagccgttattcctatgagtacaacaatattgccctgacatatattgcacaacaggattatgtaaaggcacttggttatattttgatggcagaccagtatctgggagattcggatgagaaaatgggtgcatatgtttacctgaatatggcatcaatttaccacaatctgtcccgattgcgtgaatcagctgaggcatataacaaatgtgtggaaaaatatcacggctaccaatatgtcgagcatgatctgctgatctgtggaatgcttctggcatttaaaaagaaaaactgggaacaatatgagacatttcaaaaaaaagtgcttgataaaatggatgaaatgtatgtgtcggagtttatcgatgcctgcaaagcaatttttgattgtgcaatggaagataaagacaccgcgctggtatatggaattcttgcacgtatggaggcatatgtgaatctgcatccggatgaacttaaagtctgtctgaaagtggaagaatataagtatacctatgcaaaaagcattggcgacaaaggtggaatgctggcagcgcttgagcggaaggatgcgctttatgcaaagatgatccccgcattggagacacagcgttctttggaatttgaacggtattttgaagtgaaccgaaaactgcagcagtcagtggaaaatgaaacgcgcgccaatcaggtgaaaaccgaatttctggcaaatatgtcacatgatatccgcacaccgatcaacggaatcatgggtatgcttaccatgatcgcaaatgaacgttcggatcaggaaaaggtagatgaatgtattggaaaaattgatgcctgtacgaaacatctgctttctctggtaaacgatgtattggatatgacaaagctggaaacggatgcggtagttctggagcaggaaccgtttaatctggatcaggtctgtgtagaaactatggaaatgatcgagtttcaggcagtagaagcaggtttgcatgtatatgctgatcatgacgatgttctggatgtaaatctgatcggaagcccgttgcaactgaagaaaatcctggtgaacctgtacggaaacagtattaaatataacaaaccgcagggcgccatttatacaagcttgcgtgaactggagcggtcggaaacatcggtttcttatgaatttaagattcgcgataccggaatcggcatgacaaaggaatttattgaaaccagattatatgagccatttattcagggtgaaaatgctggacgttctcagtatggtggaaccggacttggcatgtcgatcgtaaaacaactggtggaacggatgcatggttcgattcaggtggagagtacaccgggagtggaaacctgttttacggtaatcttgccttttgcgattgatctgaatccaccacagcgcaggaaacgtttggaaaatgcggatatttccggaaaacggattttggttgtagaggacaacgaactaaacatggagattgcggagtacatattgaaagaagccggagccagtgtggaaaaggcagaaaacgggaaagtggcattggagcagtatcagatttcggaagaaggttattacgatgccattttgatggatctgatgatgcctgttatggatggctatgaggcggcaagacagattcgttcatcggatcgggcagatgccaaaacgattccgattgtagccatgagtgcgaatgcttatatggaagatgtaaaaaaatgtcttgcagctggtatgaatgaacatgtcagcaagccggttttcaaggatacgttgctttccgcgcttgcaacacagatgaatgtgaagtagaaacatatggacttttttagagtgtatgtgatttttattaaggataagtaaccatatatagcatataatagaaaaatattcagaacgtataaggatgttataacaggaaaatatagataagtcaccggattacggtagatatttgatcggatgagatggaatgtctattgtaataccggtgattttttgcataaaaaagatattttgaagataaacagtatataacagttgacaacagatatacactgttatatactgttagctgtaagggaggtcccatcaatatgcatattattttaaatcattcttccatggtgcctatttacgagcagcttatggagcagataaaaacagaaattattgagtcagcactggtagagggagaggcgcttccctccgtgagaaagctggcaggtgaacttcgcatcagtgcactgactgtaaaaaaagcttacgataagctggaagaatccggatttgtgacaactgttcatggaaaaggaacatttgttaccgcttcggacaaacagctggcactggaagcacgcaggagagcagtagaagaagaattcgaaaaagccatcgatcaggcaaaaaatgtcggattgagcaaagaggaaattctggaaatcgtaagtctgctgttggaggaagcgtaggaagcaggaggatttgtaatgatcacaatgaaaaatgtccgcaagacatatggaacgtttcaaatggatctgtctatggagatcccgagtgggcagatcacaggtcttgtgggaaaaaacggcgccggaaaaagtacggcgatcaaattaatacttggactgacggaagctgaaagcggtgaaatatctgtatttggaaaaaatattcatcagttaagtatgacagaaaaagcacagattggagcatctctggcagactccgggttcagcacctatctcaatattgtcgatgtgcagaaaattttgtcaaaaatgtatccggattttgacagcgcttactttgaaaaaggatgtcgggaattgaggctgccggagaagaagcgaatccgtgaatattccactggtatgaaagctaaattgcgggtgctgacagcgctcagtcaccatgcaaagctcctgatcatggatgaaccgacggcaggtttggacgtggaagccagaaatcatattttggatatgttaaggacttatatggcagaggatgaagaacgttcgattctgatcacttctcatattgcgtccgatttggagcatttgtgtgatgatatttatctgattcatgatggaatgttgatattacatgaagaaacagatgtgattttagaacaatatggggtattaaaggtaagcgaagaacagtttgacaatctggatcaggaatatctgttaaaaaaacagaaaacatcctacggttatgcctgtttcacaaaccacaaagattattatcaggaaaactgtccgggaatcactgtggaaaatggcaatatcgatgaattaattttaatgatgacgggaggttatcaaggatgagaggattgttagaaaaagatatccggttgttgctgcacagcaaacagacatttctgtgttttattgcacttgtgattgtacttggggttacacaaaaaaatccttttatagtgggctacgccacttttatgatggcagcatttttggtttctacactttcttatgatgagatggatcatggacttgcctttttatttacgttgccgattgaccgaaaaatgtatgtcagagaaaaatatctgttttgtatgggaggagcagtcattacctggtttattgcgttaatattgtattttgctgtcctaactgtaaatcatacgcaaactttatttgaggaagaaatgctgaaaggacttgcttttttgccaattgcgattttatttttgtctctgcttcttccgttgcagttaaaatttggtgtggaaaaaagccgtctgctggtgattggtgtttctgtttttactggtatcatgatttattttctggcagaaaaaagtggaatgctggatggagaaagtacagtgatactgtctgttttcggagtgataggggatatagctgtggatatgatcagcctgcttgtggcagggggaatggcagcagtgtcatatctgtgcagctgtcgtatcatgaaaaagaaggaattataatattttctgattaaaaatgatatctgtctgatatggaatttgcttttggataaacgaagcctttcagacaaagacagtacagagatgatttcggtaattttgtgctgattaaaaaaattttttgattgaaatcgcttgacttctggtcgtatttttttgtattgtatagaatgtattaatttgagtacaaaattgacacagaagattgataaattattgacaaattctggctttaatgatagtataggttcgaattaagtactctattagattacagtaatgaaaggacgaggtaggtaaaatggcagaaatcaatttaagcaagtacggcattagcggcacaactgagattgtacacaatccttcttatgatttattatttgaggaagagaccaaaccggaactggaaggttatgaaaaaggtcaggtcagcgaacttggcgcagttaatgttatgacaggtatttatacaggtcgttctccgaaagataaatatattgtagtagatgagaattccaaggacactgtatggtggacttctgatgaatataaaaacgacaaccatccggctacacaggaagcatggaacgcagtaaaagatcttgcaatcaaagagctttccaacaaaaaactgtatgtagtagatgcattctgtggagcaaacaaagacacacgtatggcaatccgtttcatcgttgaggttgcttggcaggcacatttcgtaacaaacatgtttatccagccaacagcagaagaacttgagaactttgagccggatttcatcgtttacaacgcttccaaagcaaaagttgagaattacgaagaactgggtctgaattctgagacagcagttatgttcaatatcacaagccgtgagcaggttatcgtaaatacatggtacggcggagagatgaaaaaaggtatgttctccatgatgaactattaccttccattaaaaggcatcgcttccatgcactgttctgcaaacacagatatgaacggtgagaatacagcaatcttcttcggactttctggaacaggtaaaactacactttccacagatccgaaacgtctcctgatcggtgatgatgagcacggttgggatgacaacggcgtattcaacttcgagggtggatgctatgcaaaagttatcaaccttgacaaagagtctgagccggatatctacaatgcaatcaaacgtgacgctctgcttgagaacgttactctggatgcagaaggcaaaattgatttcgctgacaagagcgtaacagagaatacacgtgtatcttatccgatcaaccatatcgaaaatattgttcgcccggtttcttccgcaccggcagctaagaatgtaatcttcctgtccgcagatgcatttggcgtacttccgccggtatctgttctgacaccggagcagacacagtattacttcctgtctggatttacagcaaaattagccggtacagagcgtggaatcactgagccgacacctaccttctccgcatgcttcggacaggctttccttgagcttcatccgacaaaatatgcagaagaacttgttaagaaaatggagaagagcggagcaaaagcttaccttgtaaatacaggatggaacggaacaggaaaacgtatttctatcaaagatacacgtggaattatcgacgctatcttaaatggtgatatcaaaaatgctccgacaaagacaattccatacttcaactttgaagtaccgacagagcttccgggcgtagatccggcaatccttgatccgcgtgatacttacgcagatgcttctgagtgggaagcaaaagccaaagatctggcagacagatttgttaagaacttcgcaaaatacgaaggaaacgaagctggtaaagcgcttgtttctgcaggtcctcaggcataagatttatataaaagcaaaagttggatttttaaatatttgaatatttgatttttcgagatgtggaaaattcgcataacagtggatttccacatcttttttgttgtctctaagttttcttattaaacggttatgtacaccattttttatataagaaatccttgcaaattttcaaaatttccggaaacagacttttttcatggaagaaaagggcgaaatatgttaaaattagaaagtatgtatttgaacgcaggccgcaaagcgactgcgttcatgagtaagtagtgaaagcggattgcttatgtctgctttatatggaggaaaaatattttgatttcatttgcaagtgattatgtagccggagcacatccggaaattataaagagattagcagagacaaatatggaaaatttgtccgggtatgggacagatctatactgtgcacaggcagcggagaagatcagacagtattgtcattgcccggatgcagaggtttattttctggttggtggaacacagaccaatcagattgtaatcagcacgatgttacaaccgtatgaaggtgtaattgcggcagattcaggacacgtcaatgtacatgaagcaggtgcgattgagtacacagggcataaggttttatcgcttgcaggtgcggatggtaaaattgctgcagcggatctggacaactatgtggcgcgattttatgcggatgacagttatgaacatatggtgtttccgggaatggtttatatttcatttccgacagagtatggaacactatattcgaaaaaggaacttcaggatatttatgaagtatgtcagaaaagagatcttccgttatttattgatggtgcaaggcttggttatggacttgccagcagtgaaaatgatgtaacactggaagtattgacacagttgtgcgatattttttatattggcggtacaaaagttggtgctttgtgtggagaagcagttgtatttaccaatcaccatgcaccgaagtatttcgtgacacagatcaaacagcatggtgccttactggcaaagggacgtctgcttggaattcaatttgatacgctttttacagatgatctgtactttaaaatcagtgagcatgcgatccgtatggcggcgaaattaaaacagctatttgcagaaaaaggctatcgtttttacttggattctccgacgaatcagcagtttattattctggaaaatgagaagttacaggaactgagcgcaaaagtagatttcagcatctgggaaaaacaggatgaaaaacatacggttgttcgttttgcaacaagttggtctacacaggaagcagatattgagtatctttcaacgttattataaaagcggattttagaagaaataagaaatatatctgtagtggtggtggcgtgaaaaacgtatccttcactgacagaaagagcaaggcacagcaaaaaaattgactgtgagttgaaataaggagtatttatggaaaaaagagaatcatttcaatcaagatggggctttattttagcctgtattggttcggctgtggggatgggtaatatatggatgtttccgactcgtgtatctctgtatggaggtggagcatttttaatcccatatattatttttgtggtgttgatcggatctaccggtgtcatcggagagatgagcttcgggcggggaaccaggtctggtccgattgatgcatttggaactgcatgtgagcggcatggaaaaagaaaaatcggagaagcacttggtatgataccggtggttggttccatggcaatggccatcggctacaccgttgttatgggatggattttaaaatatgccataggtgctttttccggaacgacgcttgcgccggagcatgtggatgattttgcggataaatttggcagcatggcatctgcgtttggaaataatggatggcaggttttaatcttgtgcattaccatggcaattttgatgtttggtgttggaaatggaattgaaacggcaaataagatcatgatgccgattttcttctttttgtttgttggacttggcatttatatcgcatttcaaccgggggcggcaacgggttaccattatatttttcgtattgatccggtggcattagcagatccaaaaacttggatttttgcattgggacaggcatttttctcactgtcagtagctggaaatggaacgttaatctacggttcttatctgccagatcatgaaaatatcccagcagcggcagggcgtgtggcattttttgacacattggcagcaatgctggcggcattggtgattattcctgcgatggcaacgactggcgcaaagttgaatcagggtggaccgggacttttgtttatctatctgccaaatctgatcaagtccatgccgggtggcaggctgatcatcattattttctttgtggcagtattatttggtggtctgacatcactgatcaatttgtatgaagcaccgattgcaactgttcaggagaagctgcatgttggaagaaaagcagcctgtatgattatcggagcgattggcttgagtgtttcacttttaatccagggaatcgtatccggttggatggatgtgctttctatctatatctgcccgctgggagcaggactggcagcgattatgtttttctgggtatgtggtaaaaaatacgtggaggcacaggttaacaaaggaagaacaaagccgtttacaaaactttattatccgatttgcaaatatttgtatgtggcagtttgctttattgtgctgattcttggaattgcgttaggaggtattggataatatgaatgaaataataaaaagcatatatgagagaaaatctgtgcgtgcctatgaggacagaccgattccggaagaaatgaaacaggtaattctggaatcggcagcgcaggctccgaccgcaggttgtcagcagttgtataccatactgaatattacagatcagaaggtgaaagaagcactggtggatacctgcgatcatcagccttttattgcaaaagcaccattggttttgatattttgtgcggattgtaaaaaatggtatgacgcatttatagaagcaggaagtgaaccgcgcaaaccggatgtgggtgatctgatgctggcggtatcagatgctgtgatcgcagcgcagaatgctgttgtggcggcagaaagttttggcattggttcctgctatatcggagatattatcgaaaattatgaggagcagcgcagattgctacagcttccggaatatgtgtttccggcggcaatgcttgtgtttggatggccaaccaaacaacaaatgcagcgaccgaaaccacagcgtgtagatcagaagtatattgtacatgagaatacttatcgaagcatggatggaaatgaattgagagatatgtttgcggggcactgcaataacagatcttttgaagattggatgatggcattttgtaagcgtaaatacaattctgatttttcaaaagaaatgtcacgttctgtacataaatatttggaacagtatgcagagggggaagaatagaattgattcaatcagtggcagtattaggtgcaggagccgttggttcttatgtgatctggggcttatcttcacgaaacgatatccgtcttggagtgatcgcagagggagaacgtgcggtgcgtctgaaaaaagatggatgtgtaattaatgatacggtatatcatccggaagtgtgggcaccgcaggaagcgcacaatgtagacttgctgatcgtgtgtctgaaatatggttctttgcagggagcgttggacagtataaaagaaatcgttggagaacataccaccgttatgagcttgatgaatggcgtagacagtgaagaaatcattggcgaaaaagtgggagaatcccatgtattatattccctgatcaaagtagcctctcataaagaagagactggttactattttgatccggaaacaacgattggtatctttttcggagagttacaggcaccgcatgacagtgatcgtgtgcgggcaattgagcatttatttcaggataccggaattcattatttttcgactgaacatattctggcagaattgtggagcaagttccgtttgaatgtatgcaacaatctaccacaggcaattttaggagcaggtgtgggttgttatcatgacagcgtacatatgaaagcaatcagtgatggtttgcgaaaggaactggaagccattgcattggcaaaaggtattgatctgacaaaagcgggatctgcttctgtacacggaagtccggtgccgccttcggcacgttattccacgttacaggatctggatgcgggacgacatacggaaattgatatgttttccggcgcgttgattcgtatgggaaaggaacttggaatcccgacaccatataatgaatatacttaccatatgatcaaagcgttggaagagaaaaacgacggcaagtttgattataccggaaaaataaataagcgtacctgttcgaaataaaatattttaaaaatctttaagattaagaattctgattatttcatgtattcgattaccatgagtacataaagtaatcaggattttttattacagaaaagagaaatgacatatggatgtagaatttcaaatattagaatggattcagaggtataagatgaaaaaaggactgatatgtcggtacatataatctatgtacaaacaatcaatccttttatttttagcttgatattagatatcgtatttatccagcaatcttattcagtaacccggtggactgtaggaacagaataaacataataactggcatgatatagcggatcattacgttatacaatttttttcgtttgaacttattgccatttaactccatttcctcttcaatccaggatggttttacgatccaaccgatgagaatagaagaaagcagtgcgataaatggcatcataaaactgttactgatataatccatgatgtcgagtaactgtccggtacttccgtttggcagctgtgcttccacataaaatgtgctgtaaccaagtgcaatgattgcagttgctgccagataaataaccgttaaaatgctggtgacttttttcctttctgcatggaataattccatacagtttgcggtgatggattccagtacggaaatacaggaagtcagtgccgcaaatgctgtcagaatgaagaacatcagaccaatgattcgtcctgccagtcccatggaataaaatacgttcggcagggagataaacatcagaccaggtcctgcggacataccgtccaatccggaaaatacataaactgccggaatgatcataacacctgcaagcagagcaacaccggtatccatcagctcaatctgggagatagatttatttaaatttacatctttctttacataagagccgtatgtaatcatgattcccatggatacgcttaaggagaagaataactggctcattgcatccagagaaatctgtaaaaatcttgttaccgtaagtccttttacatcaggtgtcagatatatttttagaccctgcagaccggttctggcagttccgtcctctaccggatgttttaatgtcagtgagaaaatcgcgataccaatgaccatcagtaaaagtatcggcatgataaatttggatacacgctcaatacctttttccactccgttgtatacaatcagtgcagtcaaaaacataaagatcagaccgaaccatacagaagacggagaggaaataaagtttgtaaagcagttactttccaccgcttcttttccagaaccggtcagataaatagtaatgtatttcagaatccatccgccgataacagcataataagtcatgatcagtacaggtacgaagaaagttaaaatacctaaaaacttccatttctttttcatttcctgatacgcataaattgcacttttaccggtttttcgaccaattgcaatatctgtagtcagcagtgtaaaaccaaccgtaaaaacaagtaccaggtatatgatcagaaacagaccgccgccgtcttttgctgcaagatatggaaatctccataagttaccgacaccgacggcactgccggcagctgcgaatacgaatcccagctgtccactaaaaccactcttttgtttcataagctcattcacctcataaatttaagatatatgtaatgacaaaaaatgtcacttaagcataatagcactaaatccgctaaaagtacagtgatttcgcggtctcaagcacaaatctatcattctgtttttcagtaaaaataggacatggaaagcgaatagaacacgaataggattaagatatacaaaaaaataaaaactgtttcaaaatttatggtatactgttgttagatttttgacaaaaaagtaacagtaaagggaaaaggtatttaaagtcatgaacattttaaagaacaagttatttttgtatctgacggaatttttcgccggaatgtctgtcatggcagtggagcttggtgcaagccgactgctggcaccgtatttcagttcgtcacagattgtatggacgatcatcattggaaccattatgatcgccatggcgctgggcaatatttacggtggtaaaagcgcggacaagtctccggatccgggaaaattatacggccggattctgattgcagcgatctggattgcactgattcctgttgttggaaaatatatcgtgcttggaatttcggcattgttaatttttacggtcaataacaatttcctgattatagcagcttttgtagcatgtatggtgatttttgtattcccgctgtttttacttggaacagtaactccgtctctggcaaaatattccgtagacagtctggaggacagtggaaaaacggtaggtacattaggtgcatttaatacgatcggaagcattattggaacattcgtaccgacctttgtaacaattccggcggtaggaacatccatcacatttctcattttttccggaattttaattgtgctgagtctgatttattttcttacaactcataccgggaaaaagaaagtgatcacatcatgtgtgatcttcggactttgctgtgcattgggctattctgattcttttgcattctggcagaaagatctaacttacgaaggagagtctatttacaattatctgcaggtgtctgaaaatgaccgacaggtgattctgtccacaaacgtattgtttggcgtgcagtctgtctatatgaaagaagatggactgaccggaatgtattacgattatgctatggcagcaccgctgatggtgccagagaaagaaacaaaagatatgaatatgctgattcttggtatgggaaccggtacctatgcgacacagtgtaaaaaatattttggtgatatgcagatggaaggtgtggagattgataaaaaaatcaccgacctttcccggaaatatttttccctgccggatgatgtaaaagtgacaacttatgatggacgtgcttatctgcaggcagaagaccaaaaatatgatgtgatcatggtggatgcttatcaggatattacgatcccgtttcagatgtcttccgaagaatttttcagcatggtaaaagagcatctgacagatgacggcgtcatggttgtaaatatgaatatgcgtggcagcggagagggcaatatcaaccagtatctgtctgataccatttcttctgtattcggaaatgtctatactgtagatgtggacggttctacaaaccgcgaattgtttgcttctgatgatgcggatatgatgaatgtattacagaaaaatatagcaaaggtgacagagtttgatttgcgtaatctgatggcaaaggtttctacaaatgcagtagcttacagtggtggagattatattatgacggatgataaagcaccggtggagctgcttggcatgcgtgtgatcgatcagctgattcaggatgaagttgcatattataagaagatttatgagacagatggactacagggcttgttagagcagttgtaattgcgaatcatttaacagcaggtatatctcgacctttaactgagatagttataagcgggcatatctctgcccagaacgagacagttataagtgagtgtttcgctactctaagtgcgaatttaaaagtatgacaaaataagaaggatgatttcatatgattattcatacgggtatgcgtactgacattccagcattttatgcagattggtttgcaaacagaatacgggaaggatttgtctgtgtgcgaaatccctataattcgatacaggtaactgaatatagtcttgatccttccgtggtagatttaatcgggttttgcacaaaaaatccggaaccaatgctaaaatatatggatttattgcaaccctatggcatgtattggtatgtgacaattactccctatggaaaagaaattgaaccgatggttccggataaagcgcgtgtgctatctacatttcaaaaattgtctgagatcgtaggaattgattcaattggctggcgatatgatccaatttttctgaatgaaacatatacaatggattatcatatccggctatttacgcatatggcatctgtgctggaaggatataccaaaaactgcgtgatcagttttatagatctatatcagaaagtacggaaaaattttccagaagtgcgggctgtggaaaaagaagatcgtctgtatcttggtaaggcaatgattgagattgctgcagaacatggcatgacggttcgtccatgtggagaaggcgatgaactgtcagtatatggtgcagactgcagcggctgcatgacagaacagatttatgaacaggcagtacatacaagtatggattttccaaagaggaaccagcttcgaaaggaatgtgcctgtctgttgggcgctgacatcggagcttataatacctgcctgcatctgtgccggtattgttatgcaaattatgatgcggatacggtaaaagcaaattataacagacatgatccgacatcgccgtttttaatcggaaatcggatgccggatgataaggtacataaggcaaagcagaaaagctggatcaatggtcaaatgaccttggctgattttttgtaaatcttaaagaatttatttactagtgcatgttatactgataataaatttgtgacatacatattttataaaaatacagagaattgcgaggtacaatatggatgtagcgacaatggctgccatcaatagtataaataccatgaatctgatggtggcaatgcaattggaagcaaatgcaatatttgtagtaaatgatggaaaggaatatgagaaaatgggtacattattagagcagtatatgggaaaagaatgtgtggtaagtctgtttaatgaggttggagccatcaaagggaaactgatggacggtgatgcgcagtggctgaaagtagagacaaagaaaggtacacagctcattaaccgcaacatggttcgaaatattacttttgaaaataaataggcttatagaaaaatagtgaaaaggtaagtataactatgaaagtagagcagtatgtaatggcgtatggcattgagcaggatcgggtgcgtgcaatccttccggaaggatttgtttctcttcgtccggtgcttcgtatcaatgcagaaatccgtgatgaaaaaaatggatatgtggaatttaacactgccgttgaaaaagatggaaagaaaggctggctgaatatcggttactgggagaacgtaccttttacacgtaatggaaaaacaacgatatttcagacggattttctggaattatcctttactggtgtcgctgtggaaggttcctgcccggcagagaaagacaacgatggctgttttttcttaggagagacagaaatattaaaaccggcagagcatatttcagagaaaaaggaattctgtgattgcagttttcagtggaaatttacagatggcgatgcacatggtgtcagcattggaaagacattgcctgcttatccgacagagacggaacatatttatccaaaagaagcgtttacagcagagaatgctgcaaaaattccatgtaatcaggtacttggtacatatgtagtgaaatttgaacgatagaaagaataatttgggggagatatgttatcgtatctcccccattgtaatttatgaaagtattatttcctttttccccagtctgccatggttccaccctgaaattctacatgaccgcggaatccctgaacaggaagctgttctaaagccttgtctaagtcgttaaattcttcatcggtcagtatcacatcccaggctgcaagattttcgagaatccgttcctgatttttggaacccggaatcggaacaacgtttggatatttgtggagcatccatgcaagggcaatctgagcatcagtagcattttttgccttggcatatgtttcaatcagctggatcaatggttgattggcttccagattttctttttttaactgtggaacgaattttcggacatcgtcattatgagaaaaatcagtgcttgtgtttacttttccggacagaagtccactggcaattggagaaaacggtaccagtgcaatattgtgttccatgcaataaggaatgacttcttcttcacagcttcgttccaccatggaatagatattctgaatggcagaaagtggatgaaccgcctgtgccttctgaatggcctgaatgctgtattcttcagatgggatttcaccatagccgtgagaaaaacccatacatcccacaccaattggatttacttccagattacgcagttttcttttattcatgataacgtgtcatcctttctgtgtttatgtttctgctttttatgatagcatttttaaaactgttgtaccagatgaaaatataagtggtttttgattcttttttcttatgatttttggtatgatagataaatatgaggagaagtagagatatgaacatgtatgaaattgaggagcgaacaccagaaataatgaatgttttgttgaagatatgggaagattctgtacgtacaacgcatgatttcctttcgggtaaagagatagatcagattaaagaatatgtaccacaggctttaagtgacgtagcacatctgattgttgctgaagatgaatcaggaaaaatgattgcatttatgggaattgaaaaccaacgcttggaaatgttattccttttgtctgcagaacgcgggaaaggtgttggaaaacaattgttacaatacggtattgaaaattatggaatacaagaacttactgtgaatgaacagaatccacaggcagttggattttacagacatatgggatttaaaacgtataaacggacggattatgatgaggaaggaaatccatatccactgttatatatgaaaaaaatatagagaaggagcatttaaaatggttttatattttacaggaactggaaacagtaaatatatcgctgaacgaattgcaacagcactaaatgaagacatattgagtatgaatgatcggataaaagaaggaaatacggctaatgtcatgactggtaaaagtatggtgattgttgttccgacttatgcatggagaattccgcgtgttgttttgagctggttacagcagacaaaatttccagaagcgaagaaaatctggtttgtgatggactgtggtggcgaaattggaaatgcagcaaaatacaatcaggaattaagtcgacaattgcatctttcttatatgggaactgcacagattgtgatgccagaaaactatatcgcaatgtttggcgttccgggtaaagcggaagcaaaggagattgttgcaaaagcagaaccgtcgattgatgacgtaataaaagatattcaggcaaaacgggagttttcaaagccgcgtaataatatgtatgataaaattatgagcagcgcggtaaatactattttttatccaatgtttgtaaaagcagacaagtttatggctacggatgcttgtataagttgtggcaaatgcgtacaggtctgtccgttaaacaatgttcagttgaaaaatggaaaacctgcatggagttcaaattgtacgcactgtatggcatgtatctgttattgcccggcagaagcaatcgaatatggaaagaaaagcgaaggaaaaccacgatatacttttgaaaaaatttttgattaatcttttacaacctattatttatcggactgatattgatgttgtatgaattatatgataaaatttgtatagatagaatattatctattttgaataaaaatatgtaattttagataaaatattgtctatataatgaggtgacatatggagcggttagtatgggaaacagcagaagaattggatcaaaagctagcacagcgagtacggaatattcgaaaaaggcgatctatttcacaggaaaagctggcagctatgagtggagtcagccacggatcaataaaaagatttgaaactaccgggcagatttctctgatctcattgacgaaaatagcaatggcgctggatattgcagatgaactcagaagtctttttttacaggtaccttacagaaatatacaggaggttctaaatgaaacaaaataaagcattacaagtgctttttgataacagagttgttggaacattagcgctggctgcaaatcataaggtggtttttcaatatgatgacagttggctagaacaaggtttttcaatcagccctttttcactgcctttagaaaatcaggtatttgttcccacaaaagattattttgatggtctttttggagtgtttgctgatagtcttccggatcattgggggagattattgttgaaacgattgttgttggcacatgaacagaatcctgacaaactaacggtgattgacagactggcaatcgttggaaaatcgggtatgggtgcattgacctattatccagagcaaagtttttcggaagagaatgacaatacggatttggacgaattagcttttcaatgtcagaagattttgcacacagaatattcggataaacttgatgaattatatcgcctgggtggaacgagtggtggtgccagacctaaaattatgactacgataaatgatgaggattggatcattaaattttcagcacatgtagatggtgagaatgcaggaaaaatggaatatgattattcctgttgtgccagaaaatgcggaattacaatgagtgagacaaaattgttcccatcagaggtctgtgaaggatattttgggataaaacgatttgatcgtatatcggatatatctggaacaaaaagggtgcatatgttgacagcagcagcacttttagagttagattttgagcaaccaagtctggattatcatagtttgatgaaattaacgaaaataattacaagagataacaaagatgatgttgaaaatatgttccgacgtatgtgtttcaatgtttttgcacataacagagatgatcattctaaaaatttcacctatttgtatgatgaatctgcagatagctggcgattgagtccggcatatgatctcacatacagcaacacatattatggggaacatacgactacggtagatggaaatggtcgtaatcctggaaagaaagagcttcttgcagttggaactatggctggaataaaaaaagaactctgtatggatatcataactgagataaaaagttgtgtaaatgaaatgcttggaatgtatttaaatagatgagtgatgaaaaatgaatgtcattaagaaaaaagcatattaccatttgccgggattgtttgaattttatgaactgtatagaatattcctttctctttatcaggagcatagagaatatttttatgactggtgtgagatcagttccatttacggtgcaccgacagactgtctctggggcggtgggcgaatcggaagtggagacgaaaatccgcaagaagttttaaaattgataaatgaatatggcatatctgcccgattgactttcagtaattccatgcttagaaaagcacatttatcagatagaaagtgcaacgaattatgtgccttatttgagcaaggaagtgaagatggtaattcagaaaataatagtgtaaaaaatggtgttatcgtccattcggaattactggtggattatttaaaacaaaactatccgaatctttatttagtatcttctacaacgaaagtattgaccgattttcacgaatttgcaaaggaagtaaaacgagaagagtttcagtatgttgtacctgatttcagattgaataaggcatttgaacagttaaatacattgacgcaatcagaaaaagacaaagcagaatttttgtgcaatgagtgttgctggattggctgcactgatagaaagagatgttatgagacggtcagtcgccaaaacctgggggagaactgtccagatcatcgttgtacagcaccaaatgctgcatatggatatcgtttttcagaggcgatgaaaaatccagcatttatcagtattggcgatattcagaatgtgtatgtgccaatgggatttacgaattttaaaattgaaggccgtggattaggtagtgccattgtattagaatttttattgtattatatgaccaaaccagagtatcaactgcaggtcagagaagcaatttatctggatagtatgttggatttattttaataaacagaacaaaaagtatattcttatttataaagatatattcttatccggaatttttatgtatatatcaaaataggaaggaacaaagtatgcaaaaacgtgtattgattatatcaggaagtccgagaaagaatggaaattcacaactattatgtgaaagatttcaggaaggggcaaaagcatccggacatcatgttgatctgattcaaattgcggaaaggcagattggattttgccgtgcatgtgatggctgcatgcgtaataatggaatctgcgttctgtatgatgatatggctgaaattttagaaatatttcagaaggcagatgtgcttgtgctggcaactccggtttatttttatggtgtgacagcacagatgaaatgttttatcgacagaacatatccaatctggcaaaatcttggacataaggatgtttattatattgtttcagcaggacttggaacagatatcattgaacgttcccttggagatttggatggatttgtggagcatttggatcattctgtggtgaagggaagaatttatgcgccaaatatcatggaggccggattggtaaaagaatgtccacaggttttacaacaggcatatgatatgggaaaacatgtatgattgagtggattactatatgatagaatcaaaactgaccgtgaatttgagaaagaaaagttatcagtagaacattgaatctggataataggcttacgttagatgtcttcctggaatggtataggaaggcgaaatgctataaatgattgacaaatacatataacatcgttaatataaaaaaataaatgaataataagtttgtctcaacataaaagaagactataaattttactgtttctgaacataacagtttggtttatagtcttttttggtgtatgatagaaaataggaagtagaggagaggttggaaaatgtctattatttttggaatactggcaggtattggtgtcccgattcaaacaagcatcaatgcaagattacggaaaaaagtaggttccccttatcgggcatcgcttgtatcttttgcagtttcattgatatttttagtattgttattattgattttaggacagggtgtacatattccatttgataaaatgttgcaggagccagtctggatttggtttggtggaatctgtagttttatatatgttactggaaatattttactgtttgcaaaattgggcggaacgcttgcggttatattgccggttctggggcagattctggtggggctggtaattgatcattttggattcttttattcattgaaaacaccgatttccgtatttcggatctttggagcggttttggttgtagctggcgtagtaattgtatctctggcaaaaagagaagccggcaaaaataatccgaaagaaaatgcacatgcggatatctggctatggagaatatttggtgtattgtccggtgcattaagtggtgtgcagactgccattaacggacatctgggaaaagttgtcgattctccgatcaaagcgtctgctatttcatttacagttggattaagctgtttatgcgttatttgcatcggtttacgattgatgcaggggaaatgtgcggtggtggagacacgggaacatatgaataagaaaaatccatggtggatgtggatcggaggcgtattcggtggcatttatgtacttgcaaacgtagagttggcagaaatttttggaacgggactggcagtcatcattattctgattggtctgacaaccggcggcatactggtagatcatttcgggttatttgaatctccgaaaaaaacgatgaatgtacagaaaatcgttggtgtttgcgtgatggtgtttggtgctactttaataaaattattgtaacagtgaaatgaaatcataaaatgatacaatgcagtaaatctttgtacaataaataaagggtaatttatgaaatcaatatctatctatgcattgaccagaaaacagaatatagaacatttacagaaactggagcagcagttatccggtcgagaacacactttgaaattaaaggagtgggaattggaaagtatgcgggcactggtcgatcagctggaacttcatatgcaggatgtatcggcgcttcggctgttttattcttttcagattccacgtctgggtaaagaatttgatttgttacagatcagggaagatcagatcatcaatattgaattgaaaagtggatcagtttctgaggaagcgatacaaaaacaattgattcagaatcgttattatctttccgtacttggcaaaccgattcagtcttacacctatatcagtagccagaatcgcttgatgcggttgacaaatcatgatcatgtgatagaggcaagttggaatcagttgtgtgcggctttgcaaaaagaaagcaaagactattccggtgatattgaaaatctgttccgcgcagaatggtatctgttttcgcctttgacggagccaaaccgatttctaaacaaagaatattttctgacggcacagcagcgggatattaaacgtcagattttaaagaaaatccgcgaggagcagaccggatatttttctttcagtggtctgccgggaacggggaagacattgcttctttatgatatcgcaatgaaactatccaaccgacagcaggtctgcatcattcattgcggggaagcaggaaagaaatgggaaatcttacataaacgtttacagcgaattgattttttgacagataatcagttggaaacacagttttcattagatgattatcatgcaatattggtggatgaggcgcatctgctttctgtcgaaaagttaaacgtattactggatatgagtgaaaatcgtccgatcattttttctagcgattctgaagaaatgatttcgccgaaggaaatggatcagagtaccatgaaacggatggaagatctgccagatttgcagacattccgtttgacaaaccggattcgtaccaatgcggaactttcttcttttattcaaaatatgatgcatctgcctgtaagaaaaaatcaaaatggatatccgcatgtgtctgtggtgtatgcgaatgacgaaaaagaggcagatacgctggtgcaggattatgtacgacagggatatcagtatttccagcagatggaaggggcagaacttggtgttacagcggttcgggataccgagaaaatggttgtgatgctagatgaacgttattattatgacgaagatcaatatctcagatccaggaacccgatgcagaacggtcaatcagaagtgcggagattatttcacctgctgaatcaggcaaaagaaaatctggcttttgtagtcaaagaaaatgaaacgctgtatggcattttacttgacatgaagtaagtggtaaaaatcaaaacagacgggatatctgtattgattaaatagtagtgatataacagttggtttaatgataaagattacgattgcatctgttaaattcaatgatatttattatccgagaaatattattggacaaatcagtttgtataatatagagggcataatatatgatagaaattttattcggtgaaagcgaagctgcttccatgaaggcggcaaaatgtgagcaaatctatgttagttcaaatgatggtccaacggcatgctttggagcaggaaaaagaaaagtaccggagaaaaaagactatagttggatagagggtaattcaacagaagtagtctgccttggatttttacttgatattggagatattcaaaaagagattactggaagttatcgcaagaatctgcttctatcgctttacaatcaaaatcagtgggatggcgaggacaattacgaatcagaattacaggaaatgtttgaacattacacatcggatttatcacgtttgcaggaatatctggaagattgtgaagcagttcgtatctggtacagcgatgcgccgtattccagatgtggattttatcagatctgtcagttattgctgaaatatcaagtagaagttcatgtggtaaaattaccggaacatgttgttcgtgaagattgtattgtaagttatgccaactggggcgaagtggcagcagaagaatttgccggatttttatcttatgagaaaatattgacagaggatgaatttcggatgtatgcacagaattggacggatctggtgagtgaaaatgcgccgttgcgtgcagtaatcagtggacaattgataagtgttccggaagatttttatgattttctgatctggaagcatctgtcagataaaccacgaaaagaagcaagggtaattggtgatattcttggaacttcaatgttgggagtaggagactggtggtatgcaaaacggattgaatattatattgatcgcggcgatattttgattgtggaagattctgcaaatacatatgcgagagttattaagcgttcaagtgaacggatggagagatttaaatgaaaagggatggtataatttatgaattatgaaaagatagatattgaaaattgggcgcgtaaagaacattatcgttactatacagaaaagttaaaaattgaagtaaatatgacagcaccaattgatgttaaaaatttattggatttttgtcatacacacaactataagttttatccgactgtaatttatattgtttccaaagttcttaataaaatagagaattttaagatgtttcgggacaacgaaggaaatttatgcgtatgggataaaataaatccaaactatacgattttccatcaggatgacaaaactttttccgattgctggtcggaatatgaggaagattttgaaaaatgctttcagaatataacaacagatatgcatacttataaggataaaaaaggaattaaagtaaaagaacaacaaccggcaaatttttattgtatctcctgtacaccttggacggcttttactggttatggaagcagagtggcaaatggggaaccgacttttttcccaattattacgatgggaaaatatgaaaaaaatggtaatagaatagatatgcccgtaaatattacgattgctcatgcggtagcggatggctatcatatcgggttattttttgaatatctgcaaaacgaaataaattcatttaaaaattcagattgctgatattctaatggcggacaaacttagtaaagccatcatttacaaagaattggagagaaaaacacatgaaacttggacttgtacaaatgagtatgacaaacgacctaacggcaaatcttgacaaaagcctgaagtattgtgagatggcaaaaaattgtgacttggtcttttttccggaaatacaactgacaccgtttttcccataatatgaaaagcgttgtgtcgacaattattgtatagagatggatgatattgctctacagaaattttcagaaaaagcaaaaacacataattattatttgtctccaaatgtgtatctgcaatcccaaaatgcccgctatgatgcgtccctatggattgcaccaaatggaaaaattttagatattgcaaaaatggtatacattgctcagaatgaaaaattttacgagcaggattattataccccgtcagatgaattacttgtctcttagaagaccagaacaatatataggttagattttatgaaaaagaagaaatttatttttattatacttgtgatagtagtcgtcatagttattggcattttccttcgatatcagcatacttctccgaaaaggttacctgatttatccgaacaaaagtatgagcaagtgcacagctccatagattatgatcaggatgacattgacgatcagacagacatccttcagggagctttggattatattaacacaaaaccgaagtataagagtaaatattataacagtggttattcgaatgataattatggtgtgtgtacggatgtggtagcatttgcaatgcaggctgccggttatgatctgatgcagcttgtaaatgaagacattcagaatcatccggaagattatgatatccaagagccagattcaaacattgactttcgcagagtgaaaaatctacaggtgttttttgccaataatgcagaaagcctgaccaccgatgtttccaaaacagagcagtggcagggcggagatatcatcatttttcaaaagcatatcgggattgtttcagaccgaagaaataaaaatggtgtttcatatgtgattcatcacaatgatccgtggcagaaatcctatgaacaggatattttggaaaaacgggatgatattgtgggacattatcgttggaagtagaatgtcatataaggctaacgtcagctacccggaattaagtcctataagcaggaagttgccattacattttacggtagagcgaataaaatttcttgacatggagtgaactccaagtgctatgataccaacagaaaaagaaatgcacaggaggcaacaacaaaaagacaccacaaagccagattgaccagtggattaaggatgttaagtaatttatttcttagtatgctatctttagaaaatattctatatgagaagcaaaaggagccgaaaatggctcctttttaaaatgtaatacgcatctgataccattctgcgccgccatgatcggattcagaaagtccttcgtttacaaaaccgaattttgcatagtagtgcagcaatttttctttgcaggtcagaacaagtccttttcggccctgcgcttttgcgtctgcaatgcaggatttgatcagttcaccggcatagccatgtttgcgataatcaggaatcgtatttacaccaaaaatcatctgccatgcgccgttagggttgtgcagggaagcgtcatggaacatttcgtcggtcagagtttcttcatctgttacaaatccatccacaaaggcaatgagtttatcttcatcaaacatcaaccagaaatggtcgttataatatgtcagtcgtttggaaaattcttctctggaagccgcttctgccgccggaaaacattctgcttccacagcagtgatcgcatttaagtcattcatagtagcagttcgtatagtcattttttcacctcaataatgttttcgtatcatgtttgtatattataacattgcgtgatagaaatgtgtagaggaatggaaaaaatatgtatttacaaatcatatgtgttataatgttcccatagttttttgattcagaaggagaaaattatggaactcacaatgcttggaacaggaaatgcgcttgtgacggagtgctacaatacctgctttgtattacaggaagatcagaaatattttatggtagacggtggtggtggaagtacgatactgcatcagttaaaacatgccggaattaactggaaagatatcaaaaccatttttgtgacgcacaagcatattgatcatattactggtatcatttggatgatgcggatgatctgccagcacatgagacagggtgaatacgaaggagatgcgacaatctatgcacatgaagaagtaattgagctattgaaggatctgacagagaaacttctgcaaaagaaagatgttgcatttattggaaaacgtttgcatctcatttccgttgcagatggtgagtctgtcgatatattatcacgaaaagtaactttttttgatatccagtcgacgaaagcgaaacaattcggtttctgtatggaactgggaaatggagaaaaacttacctgttgcggcgatgagccatataatccatgtgaaaaacagtacgcagagaacagcacatggttattacatgaagcattctgtctggagagcgaagcagatatttttcatccgtatgagaagcatcattccacagtggcagatgcaagtaaactggcagaagaattgcatgtaaaaaatctgctgttatatcacacagaagacaaaaatctgttgctgagaaaagaactttatcaaaatgagggaagaaagtatttcaatggaactatttttgtaccagaagatttggagacattggttctttaaagaaaatattatttagtaactattattataaaatgcaaaaacataagcataataatatagatttggtaaatacgatacgtggaggaaaatacttatgaaatggatgatcgcatcagatattcatggctccgcatattattgcagagaattgctggaagcatacgacagagaaaaagcagaccggttattattgcttggtgacattttgtaccatggccccagaaatgatctgccaaaagaatataatccaaaggaagtgatcgcacttttaaatcaacacaaacaggatattctctgtgtgcggggaaattgtgatacggaagtagaccagatggtgctggagttcccggttctggcagattattgtgtaatcgcagatgagaaaaatgtaatttatgccacacatggtcatcattttaatgagggcaatctgccacctcttcagaaaggagacattttgctgaatgggcatacccatgtaccaaaatgcgtagagcatccggattatatttatatgaatcccggatctgtttctattccaaaagaggaaagttggcatggatatatgatatatgaaaatggcaaatttatatggaaaaagttacaggggacagaacagatgcggtattgctttaactgattttttcatgtagctatttggtagcatctgttggaggagacatttatgagaaatatcgtatttcacaaagaaacaaaaacatttcatttatataatgacaaaataagttacattatgtgcgtattaaaaaacggacatatgggacacctttattttggaaaaagaattcatgataaggcagatttttcttatctggtcgaagaatgtcagcgtcccatgacttcgtatatatatgaggatgaccggaatttttctctggagcatatcaggcaggaatatccggtatacgggacaacggattacagacatcctgcaattgaaatattgcaaaaaaatggaagtcgaatctcagaatttgtgtatgaaggatatgagattacagcgggaaaggtaaaattacaggggcttccggctacttatacagaatcagacgaagaagcaatgacacttcgggtttatttgaaagatgcattgaccggagtgctgctggaacttttgtatactgttttttctgagtataatgcaattgcacggagcgtttgtgtgaaaaatgcgggaacagaaacggtgcatctgttaaatgtaatgagtgtgagtctggatctcccagatcaggattatgtgtggatgcagctatcaggagcatgggcgagagaacgctatataaaagaaagaacattggaacagggaatcacagcaattgacagcaggcgcggaaattcttctcatgaacacaatccatttatggttttacggagaaagcatacgaatgaatatcggggagaagcaatcggattcagtctgatctacagtggcaatttccgtattcaggcggaagtagacacgcacaatgtgacaagagtaacagcgggaataaatccggaaggatttgactggaaactggaagctggagaaatgttccaaactccggaagcagccatggtctattcagagaacggattaaatggaatgagtcagacatttcataagctttacggaagacgtctggccagaggctactggagggatcgatgcagaccgattctgatcaataactgggaagctacttatttcgattttacagaagaacgtctggttgcgattgcaaggaaagcaaaagaatgtggcgtagaattatttgttttggatgatggttggtttggtgccagaagaaacgaccgcgctggactgggagactggattgcaaatatggagttactgccaaatggaatcagtggacttgcaaatcgaatcgaagaacttggaatgaaatttggtctctggattgaaccggaaatggtgaataaagattctgatctgtatagaaaacatccagactggatcttacagacaccgggacgacgagtatctcatggaagatatcaatatgtactggatttttcaagaaaagaaattgtggattatatttatgggatgattgcaaaattgctttctgagtcaaacatatcctatataaaatgggatatgaaccggagcattacggaatgttacagtatcgcatatccggcggatcagcagggagaaatttttcatcgctatattttgggcgtttatgatctgtacgaacgtctgacttcagcgttcccggaggtgctttttgagtcctgcgcaagcggaggagggcgtttcgatccaggaatgctttattatgcaccgcagggatgggttagtgacgattcagatgctgtagaacggttgaaaatacaatatgggacatccatgtgttatccgctcagcagcatgggaagccatgtatctgtaataccaaatcatcaggtttttcgtaatacaccgttacatacaagggcaaatgttgcgtattttggaacgtttggttatgaactggatttgaataagttgtctgatgcagagatagaagaagtgaaagcacagatccgatttatgaaggaatatcgtgaattacttcagttcggtacattttacagattgaaaagtccgtttgacggaaatgaaacggtctggatggttgtcagtgaagacaaaagcaaagcacttgtgggctattacagagttctgaatggtgtaaatctgccatatagctgcgtaaaactacagggattggatccggataaactgtatgagaatgaactggcaaatacagaacattatggtgatgaactgatgaaccttggattgatcactacggatgtgagtgcaggagaagttccgcaaggtgcagagccatgtacggattttgaatccagaatttatttattaaaggaaaaacagagtagatgtattggggcagaaacagtttccaaatgagaagaaataaactttaattttcttttgcaaggcagacattacattgaaagaggattgatttctatgataattcaagtcgaacgcacgtgagacttggtgcgtgattctggtcagcgaaagctgacatattcttctcagaatcactgcacatccccgcggagcgtttatctcagtcggagattgaactcccactgagaaagatttgttattactcaccatttgcagaagtgggagtctcaactcagactgagataaaagccccggcagcagagtgataagaacattctgttaccgggggaaatttttgaactgtcgttcaagaagttatcgtttgtgcaaagcacaaatttatttctggttttcttttgccagttcctgcattctcattgcacgaacttttaacggcagaccgaataatgtaatgaatccgtctgcatcatgatgatcataaaggtcaccagttgtgaagcttgccagagactcactgtataaggagtatggagaagtagtaccagctttgatgatgttacctttgtaaagtttgaatttaacttcaccggttacatatttctgagtggactctacaaatgcctgaactgcttcacgaagcggtgtgaaccattttccttcgtatacgatctgggccatgcggttacccatatctttttttacatccatagtagcacggtcaagagtcagctcctctaactgtttctgagcctcaagaaggattgttccgccaggagtctcatatacaccacgggatttcataccaacgacacggttctcaacgatatcgatgataccgataccatgttttccaccgagacggttcagctcacggatgatatcagcaactttcatctctttgccgtttactgttttcggaacaccagactcaaatgtcatagtaacgtattccggttcatccggtgctttctccggagaaacacctaatacaagcaggtgatcgtagttcggctcattggccgggttctccagctccagtccttcatggctgatgtgccataagttgcagtcacggctgtagctctgatccatagcgaatggaagatcaatgccatgtgctttacaatattcaacttcgccttcacgggaatcgatggtccacttcggatcacgccatggagcaatgatcttgatatccggagcaagtgctttgatggaaagctcaaaacgaatctggtcgtttccttttcctgtagcaccgtggcaaatagcaacagcgccttcttttcttgcaatctcaactaatttttttgcaatacccggacgagccatagcagtaccaagtaaatatttattctcatatacagcgcctgcctgaacgcaaggaatgatgtaatcctctgcaaattcatcgcagatatcttcgatatataatttggaagcacctgagtactgagcacgctcctcaagtccctctaactctttgccctgtccacagtcgatacagcagcatactacatcatagtcgtatgtctcttttaaccacgggatgattgctgttgtgtcaagtccgccggaatatgctaaaataactttctctttcattgtaatagttcctttctttcttatcattaagcagatctgtctgtcacagaccgtttcttctgaatatttttctgaaaacaaatttaccttttgttttcgacctgattcatcatactacaatcagaatgagattgcaagtgtaaatttatacatattttacttataaaaatacacctttttattcaggacgcacagaatggcaaaaaaagtaaaaagtccttttcatttgaaaaaacttgtgctattatttgatgcagagcaaaaaaaacccgaaaaaggcagaatgaataaaaaactgaatatatgtataattatgcattcttatgtataaaatatgcaaagcagaaaatcaatactttacgaattgcgcgagaagtattattataagaaacagttcagttgaagattaaggaggatgcaaatgataaaagcaggtattatcggagcgacaggttatgcaggagcagagcttgtacgtattctgatgggacataaagaagtagaaattgtctggtacggatcaagaagttacattgaccagaaatatgcatccgtatatcacaacatgtttgagatcgtagatgcgacatgtctggatgataatatggaagctctctgtgagcaggtagatgtgatttttaccgctacaccacagggttttttagcatctgttctgacagagaagattttgtccaagacaaagatcgtggatctgagtgcggattttcgtatcaaagatgttgctacttatgaaaaatggtacaagatcgagcataagagcccacagttcattgaggaagctgtttacggtctgtgtgagattaaccgtgataaagtgaaaggtgcccgtctggtggcaaatccgggatgttatacaacctgttctattttaaccgcttatccgctggtaaaagaaggactgattgatccggacacactgatcatcgatgcaaaatccggtacttccggagccggtcgtggtgcgaaagtagcaaacctgttctgtgaagtaaatgaaaatatgaaagcatatggtgtggcaacgcatcgtcataccccggaaattgaggagcagcttggttatgcggccggcaaagagatcgtgatcaatttcacaccgcatctggttccgatgaaccgtggtatcctggcaacagagtatgcgactttaaggaagaaggcagacggttctcttcctgcttatgaagaagtgaaagctgcttatgataaatattatgcgaatgagaaatttgttcgtgttctggaaaaagatgttgtgcctgagacaaaatgggtagagggcagcaactatgtagatgttaatttcaagattgatgagcgtaccggaagaatcgttatgatgggagcacttgacaatcttgtgaaaggtgctgcgggacaggcagttcagaatatgaacctgttgtttggtctggatgaaagcgaaggattgaatcttgttccaatgttcccgtaaatatatggaaggaaacaggattttatggaaataaagattcgtccgatgacgattgaagattacgatgaagtatatgcactgtggatgacgatcaaaggctttggcattcgaagcattgatgattccagagagggaaccgaacgtttcctgaaacggaatccaaccacaagtatcgtggcagaagctgacggcaaactggtgggcgcgattttatgcggacatgatggcagaaccggatgtttttaccatgtatgcgtgaatgaagcctatcgtaaccgcggtattggaaaacagatggcaactgcagcaatgcgtgccttacagagtgaacagatcaataaagtcaatctgatcgcatttaagaaaaatgaacttggcaatcaattctggcaggaagaaggctggaagatgcgaaacgatgtaaattattatgactttgttttaaatgatgaaaacattacaaaattcaacgaataaaaagcaatgtttttaaatgatttttcagatgaactttgaaatgaaataaaaagataaaaataacagatacaatgataccggatatgcattgaaacatatgtgacaggtatcttacaggaggattggatcatgaaacagattacaggtggcgcgacagcggcaaagggattccaggcagcttgcaccgcagccggaatcaaatatgaaaatcgtaccgatatggcaatgctttacagtcaggtaccatgtcgtgtggcaggaacatttacaacaaatcttgtaaaggcggcaccggtactctgggatcgggatatcgtaaaaaacagtgaatatgcacaggcagttgttgttaatgcaggtatcgctaatgcctgcaccggacaggaaggcttagattactgtcagaagacagcggatcaggcagcaaaagtgcttggtattccggcaagtgctgtttgcgtggcatccaccggtgtcattggaaaacagcttccaatcgaccgtattatggcaggtgttgaggcattagcaccgaagcttgcagacggtgtggaagcaggaaatgcggcagcaaaagccattatgaccacagatacacacgaaaaagaagtggcagtggaatttgaagttggcggaaaaaccgttactatcggtggtatgtgcaaaggttccggtatgattcatccgaacatgtgcaccatgcttgcctttgtgacaacagaccttgcaatttccaaagaattattacaggaagcactttctgccaatgtcaaagataccttcaatatgatctctgttgacggagatacttctacaaacgatactttgcttctgatggcaaatggtctggcaggaaatccggagattacagaaaaaggtgcagattatgatgcattctgtgaggcgctgaattttgtcaacacgacactggcaaaaatgatggcaggagacggtgaaggtgcaactgcattatttgaggtaactgttgtcaatgcagagacaaaagagcaggcgcaggtacttgcaaaatccgttatttgttcaagcctgacaaaagcagctattttcggacatgacgcaaactggggaagaatcctctgtgccatgggatattccggagcgacctttgatccagataaagtagatctgtattttgaaagcaaaggcggcaagatcaaactaatcgaaaatggtgttgcacttgattatagtgaggaagaagcaaccaagatcttatccgagccggaagtgacagctattgcagatctgaagcttggtgaagcacagggaactgcatggggctgtgatctgagctatgattatgtaaaaatcaatgcggattatcgttcttaatgaaaatatactttgatctgttatagtaaaatatgtgagagtgcataaccagctttttgttataaacagaaaggctgatttgacagatgtttgatagataaataagaaatagatatgcataaaaatgtaaaaaagtgatttgttacaggaggacagatagatgaacgaagataaatacgaagcattacgggcgaaagccgaagtgctgattgaggcattaccatatatccagcgtttcaaccgccggatcattgttgtaaaatacggtggaagtgccatgctggatgaagaattaaaacagcgtgttattcaggatgtaacactgctgaaactggttggatttaaaccgatcatcgtacacggtggtggaaaagagatcagcaaatgggtagcaaaagccggaatggagccggagtttgtaaacggtctgagaaaaacagatgccgcaaccatggagattgcagaaatggtacttggaaaagttggaaaatctctggtatctatggtagaaaaactgggtgtacaggcagtcagcatcagcggtaaagacggcggattactgaaagttgagaaaaaattatctcagggacaggacattggatttgtcggcgatgtaaaatctgtagatccaaagatcttatttgatctgttagagaaagattttcttccaatcgtatgcccaatcggtctggatgatgattatcaaacttataatattaatgcagatgatgcggcatgtgcgattgcaacagcagttcatgcggaaaaacttgcatttttaacagacatcgaaggtgtttaccgtgatccgaaagatccgtctacactgatttctgaactgacagtttctgaagcaaaagacctgcttgacagcggttatgtcgttggcggtatgcttccgaaattaaataactgcatccatgcagtagaaaacggtgtttccagagttcatatcttagacggacgtatggctcactgcctgttactggaaattttcacaaacaaaggaatcggtacagcgatccttggagatgaggaggcaagatttgaccatgaataaacagaattatattgaccatgcagagcaggcgctgcttcatacttacaatcgtttcccggttgttttagatcacggcgagggcgtttatctgtatgatacagacaataaacagtatcttgattttgcggctggtatcgccgtttgcgcctttggatatggcaaaaaagagtacaatgatgctctgaaaaatcaggtagataaattattacatacttctaatttatattataatgtaccaaccatggaagcagctgaaaaagcactggctgccgcagatatggatcgtattttctttaccaacagtggtacagaggctatcgagggtgcattaaaagcagcaaaaaaatatgcttataccagagatggacatgcaggtcacgaagtgatcgcaatgcagcattctttccacggaagaagtcttggtgcgttatctgttaccggaacaaaacattatcaggagccgtttgagccgctgatcccgggtattcgttttgcagagtataacaatctggagagcgtaaaagcacagatcactgataaaacatgtgcgatcattatggaaaccgtgcagggcgaaggtggtatttatctggctgatccggagttcttaaaaggtgtgcgtgcactctgtgatgagaaagacatcttactcattctggatgagatccagtgtggtatgggacgtaccggagcaatgtttgcatggcagaattatggtgtaaagccggatatcatgaccgttgcaaaagcacttggctgtggcgtgccggtaggtgcatttatgatgactcagaaagtggcagataaatctctggcacctggtgatcatggaaccacttacggtggaaacccgttcgtaggagctgctgtcagcgcagtttttgatatttttgaaaaagatcagatcatcaaccatgtacatgagatcgcaccgtatctggagcagaagctggatgaactggctgcaaaatatgactttatcacagaccgccgtggtatgggactcatgcagggactggaaatgactattccggttggtcaggtagctgcaaaagcactggagaaaggtctgatcatcattacggcaggttctaacgtagttcgttttgttccaccacttgtgattgaaaaagagcatgtggatgagatgatcgcgaaattagatgaggttcttgctacattttaagcaaatgcagagtgcagtgattctgagaagaatatgacagcttacgctgaccagaatcatacaccaagtcttacatatgtccaatttgaatcgtttgacttgaaaaatcaggcagacagttgtgtttttcttttggaaagcatgactgtctgtttttacgcgtgcataagcggatacgtgctctcaacggaaaggaaaagttctcaagtataaaaaatctgtttcgtgacatgatagtagatacatgcataaaaatatatcagacgtaaatgaaaaaactatatcaataacgcgctttgattatttctaacgattcgtttgatatagcgattggcgtattgccagaatgcgcagaatatttatgcaaatatatcatgtaaagtaaaaaggaagcgggacttatggtgggaattttaattgcgattttatccggaatgttaatgagtgttcaaggtgtatttaataccgatgtaacaaagcagagcagtctatgggtggcaaacagttgggtacagtttaccgcgctggcagtctgcctggcggcgtggggcatttcagatcgaagctcctttgcagcactctggaaagtacaaccgaaatatgtgctggtgggcggtgtgatcggtgcgtttatcacactgacggttgtaaaaagtatgaatactcttggtccggcgcaggcagtactgtttatcgtggttgctcagatgattacagcgtacgtcattgaactgcttgggtggtttgggacggagaaagcagactggtcgatgcagaaactgattggaatggcaattgcaatcacaggcgtagttatatttcagtgggagcggaagtagtaaaactggtgtacgaattcgaaatagataagtacgctttgctaacgcgaaaa

SEQ ID NO: 13088 - DNA, 8857 bp, Unknown
  gut microbiota DNA sequence
aaagcggaaccatttcatatgggatacctgtccggtttctatgcagaaaaacgtgatattgagtattgtgaattgcaggatgaggtacagaatgaagtgaaaaaatatacgctggatatgctggaagatacgattcagggttatactggcgtacatgttctgtcagaccatatccgcacggtggatgagcactggtcttatacgttgcttccggtgtggacagtgacttataaaggctccaacggaaagatttactactattccatgaacggtcagaatggaaaaacctttggtgaacttccgattgaccgtaagaaagtgttggcgatcggtatactgatcggagcaattgtttttgtgatcatgcttattgttggttatcttttctttacataacatatagaagcagaaagagaatcaacaggaaagcaaaataggggatgaaaatgaaacagaatagaaacaaaaagtggcgttatgcactgggagcagttctgggagcagtattttgtctgatgacactgcatcctgcatatgcatcgggacgtcaggtttatgatgatgcggggatattttcagaggatgagatagatgagatcacgaaagtggcggatgaagtagaagataagaccggatgggatctgattattctgacggtggatgatacgtctgtcacctcaaatcgtgattatgcggaagaaaagtttaataaatatacaaaaagtgatgacggagtagtgtatttgtttaacatggacgaagacaaaaacggttggaattggtatatcgcgacagccggagaagcctatgagtatcttggtgacagccagatcgaggagatgctggatgatgcagcaaaatatgacctggatggtgactatgcccagtcaatgatcgcaatgattgaagatacggaaagctattatacttccaacaccgcaaaagatatgacaatctatgatgaggatcagggcatttactatgcaagttctaccaatcatcgattcctttcttatggggagatggcgattgcggcagtgcttggtgtggcagcatgcctgattttctgcctgatcattacaggcaaataccggttaaaatttggtcggtatcattataatccgagagaacatgcaagcgtagatctgcgcagaaatgaggatcactttgtacgtcagtttataacgcggagaaagattccaaaagatccaccaaaaaacggtggaggcggcagcggaaccagtactattcaccagggagccggaggacgttcctttggtggcggaggacgctaacacggttttttgcatttaacaagcacaatcaaatgaaaaatcgcctgctttcttttcatggaaacatgagaagtgggagatatcatcagaagtaaaataatacagagaaaggtgtgtatttgcggtgagcgaagacacaccttttttgaagttaaattctgtattgattcggaaaagaataaatcagtttacatgaattagaatcaggcattcaatcttgcgagtattcgatttgaattgtgccattcgtaaaattgtgaaaaaaacttcaaagtcaggcttgcatacaatgtgcgattatgatactatatccttactgtgagaacagatgtatctctgggaagaacacaggaggaataagatggcagaaaaaacaaaatattttgtcctgaagaaaaaagcggtaccggaggttttattgaaggtagttgaagcaaagagactgctggattcaggaaaagcggcttctgttcaggaagcagcagaaaatgtcggcatcagccgcagctctttttataaatacaaagatgatattttcccgttccatgataatgcaaaaggaaagacgatcaccatggtgattcagttagatgatgaaccgggacttttgtctgtggtattgcgtattgtggcggactatcatgcaaatatccttaccattcatcagagtattccggtcaatggcattgcatcattgacactcagtgtggatgtgttaaacgaaaccggtgatatttcacagatggtaaatacgattgaggaacagcagggcattcattatttaaaaatattagccagggagtgaacaaacgatgattcaaattgcagtattaggctacggaacaatcggttccggtgtagtagaagttttaaaagtaaacaaagacagtatcacaaaacgtgtaggagacgagattttcgtcaaatatatcttagatctgcgtgagtttccgggtgatccgatggaggataagatcgtacatgattatgcagtgatccagaacgatccggaagttgccattgtggtagaagccatgggtggtgtagagcctgcatatacatttgcaaaacaggcaattgagagcggcaagcattttgctacttccaataaagctctgattgcagagaaaggagcggagttgatccgccttgcaaaagagcataacgtgaactgcatgtttgaggcaagtgtaggcggtggaatcccgatcatccgtccgttaaattcctgcctgaccgcagatgtgatcgaagaagtatccggtatcttaaacggaaccacaaactatatgatgacaaaaatgtctgaagaaggttccgaatttgaagatgtattaaaggatgcacagcagaaaggatatgcagaggcagatccgaccgctgatatcgagggacatgatgcctgcagaaaaatcgcaatcctgacatctctggtatgcggacaacaggttgatttccaggatatccataccgagggaatcacaaagatcacagcaactgatatcaaatatgcaaaagcacttggaagaagcatcaaacttcttgcatccagctatcagacaggtgacagctactgtgctctggtagcaccgtttatgctggagccgacacatccgctgtacaatgtaaatgacgtattcaacgcagtatttgtacatggaaatgtccttggcgatgcaatgttctacggcagtggagctggaaaacttccgaccgcaagtgcagttgttgcagatatcgttgagatcgcaaaacatctggatgagaatattccggtggaatggcgcaaggaaaaactggagcttgctgattacagacagctcaaaaataaatattttgtccgtacaacagcagacaaagctgcaatcgagaaagcttttggaagcgtttcctatgtacaggcagagggtgtgacaggcgagaacgcatttgttacagcagaaatggatggctttgcatatgataaagcagaggcagaacttggtgaagtgcttcagtgcattcgtgtaaaataagaaacattctgtttgcatgtgcaaataaaatgtgaaaaagtgtttgtgagagtaaaaaaataaaaataaacagaggtaaaaagtgatgaaatacgtggtggttttaggagatggaatggcagaccgtccgatcgccgaacttggcgatcagaccccgcttgcctatgcagagacgccgacaatggatcagctggcagcagtatcagagattggaatggtacacacgatcccggatggaatgaaaccgggcagtgataccgcaaacctctccgtactgggctacaatccgagaatttattattccggtcgttctccgttggaggcactcagcattggtgtggatatgaaggatacagatattgcacttcgctgtaatctggtcaccctgtccgaagaggaagaaaattatgaggaccgtacgatcatcgatcacagttccggtgagattagtaccgcagatgcagccgttttactggatgcagtcagagaaggactggaaaatgagacctataaattttatgtaggaaccagctaccgtcatctgttgatctgggatcgcggagaagtggtagaactgacacagccgcatgatgtgcttggtcagacgattggtcagtatcttccggaggatgccgtacttcgtgaaatgatgaagaaaagttatgacattctggtaaaccatccgattaatgtggaacgtaagaaaaaaggactcaatccggcaaactcctgctggttctggggcgcaggtacaaaaccggcactttcttcctttgaagagaaaacacatctgaaaggtgcgatgatctcagcagtggatctgttaaaaggaattgcagtgggcgcatccatgaaagtaattgaagtagagggcgcaaatggtggattgaatacaaattatgaaggaaaagcacaggcagcgattgacgtattgaccaaagaagggtatgattttgcatatatccacgtcgaggctccggatgagatgggtcatcagggcagcgttgagcgtaaggtaaaagcaattgagtatctggattccagagtcattaagccggtgaaggaaggactggaagcagcgggagaggatttccgtatgctggtactcccggatcacccgacgccaatctgcatgcggacacattcatccgacagtgtgccatatctgttatatgacagcacagatcttcagcagcatgactggaagtacaatgaagctgagggcgagtcgagtggaaactacgtggcgtgtggccatgaaatcatagattacttatttgggaggaagacatgctaatagtaaagaaattcggcggcagttctgtagctgataaagaaagaatttttaatgtagcaaaaagatgtatcgaagattatgaagcaggaaatgacgtggttgttgttctgtccgcaatgggaaagacaacagatcatctgatcgagatggcacatgacattaatccgaaagcttccaaaagagagatggatatgcttctggcaaccggtgagcagacttctgttgcactgatgtctatggcaatgcaggcacttggtgtttctgcggtatccctgaatgcatttcaggtaattatgcatacaacttctgcatatagcaatgcaaaattcaaacgtatcgataccgagcgtattttcaatgagctggagcagcgtaagatcgttatcattactggttttcagggtgttaataaatacgacgatatcacaactctgggacgtggaggttctgataccactgctgttgcactggcagcagccctgcatgcagatgcctgcgagatctacaccgatgtagagggtgtatacacagcagatccgcgtgtggttccaaacgcaaagaaaatgaaagaaatcacatacgatgagatgcttgaactggcaacacttggagcaaaagttcttcataaccgttctgttgagcttgcaaaaaaatatggtgtgcagttagtcgtacgttcaagtttaaacagagcagaaggaacagttgttaaggaggaaacagaaatggaaggcatgcttgttagtggagtagcagtagataaaaacgcagcgagaatcgcaattattggtattaaagatgagccgggaatggcatttaagatttttgatcttcttgcaaagaagaacatcaacgtagatattattttacagtctatcggtcgtgacggcacaaaagatatttcctttaccgtatcccgtgaccagatggatgaggcagtaaaagttctgaaagacaatgcagcacgcgtaaaagcacagaaaatcgaggcagatccgactgttgcaaaattatccatcgttggtgctggtatgcagacacatccgggcgttgcagcaggtatgtttgaggcactttacaatgtaggtgttaatatccgtatgatcggaacatctgagatccgtgtaaccgttctggtagacgagaaagatgtagataaagcaatgcgcgcagcacatgataaatttatcgaggactaatcaggaaaacaggttaagaagtttaagatagaaagaagatataaaaaacaggaccgttcgaaagaattggtcctgtttttatgcttagaaaatagtttatatagcagggaacgctgcatcttacaagtattacatgtaaacattctgttctgtctgctgctgtgtcagatccagataaaattgtgtatttgtctgggtcatatatggaagaatccataagagaccgattcccagtgtcaggcatcctaacaggatccatccgatgaaggaaagctccagcagaaaatagcgcattttacgtcccttcatcaaccgcatactttcgttcattgcttcgatcacacgcagattcggatgatcgatcagcagatacagagactgtgaaagcgaaatcgtaagaacaatcaggataatacagccgattgccagtaaagccattccaacgatcagtaacacggaaatatcacttgttgtgtaaactgctgcaatgatggatacaattgtgcccggaagggtgcatacaaaggaaatcagaatcaacaaaaactgacagccaatgaatttgtccggacggtttttaaatggaaacagaagatctgcaagcacaggtctgttattttttgctgcttttacatgcatgtacattgttccaatggtaaataatgcaccgaccagactgacaaagaccataccggtatatccccagatgatgcggatgaaacgggtgtaatagacaccttcctgaagcattctggaaaatggcgtttcaagcagggcggagatcagccagctgatcagaccggcaccgatcagggtgctgtagcgtccaagcaaagcagctctggcatttgcttttaaatctgcaaaagatttcatattgatatcatgctccaatctgttaaaatagtgagagaacaaggaggaagcacatatgaagaaacaggaaacaacgttagaaacccagttatatcactggggatggatcgtactgattacagtagcagcgttaatcgctggaaaacgtatcttttttcctgatttttctatttccgggcagatgcccccatgtgtttttcatcgcctgaccggatatttttgcccggggtgcggtggaaccagatctgtgaaagcactgctttctggcagatttctggtatgtgccgtagattatccgatggttttttatgcggtggcagtatatttctggtttatgttcagccagagtgttgaccggatcagccatcatcggattcccattgggatgaagtatcggcatgcatggatttatgcttcacttgttatcgtgatcatacattttatattaaaaaatctgttttatatgaaaacggggattgaaccgtttttataaagcttcctgtgaaccattcaggtcaaaaatggaatcacttccggaattattattaccgttatctgtgttggaatcgcttccattcgggttcagatcgatgccgaagttgtgttccagcgtgtaagtataacgttccagaaacttgtcaaagccaccatactgacgactgacagagataaaacttccgattgtgatcactacactgatgagaacacctgcggtgcccagcaacaatgcggtacgagccggtccggcagctttttttctggagcctctggagagcagggcaaaaataattgccagtccgccaaagacgaaagcaccgtacaggcagcaaacggatacaatactcagaatggaacagatcagtgcagccacagccagttcgttggatgcatttcccggtgcgggattgcggcgaaacggttcctgttgattctgctggttttgcgaatcgttccagggattttcattttgttcgtacatattataatttgcctcctttaagacatgattctaacatgtgcatcagaaaatgacaaccggaagaatgtatgatatgatacgatagaaaatgacgcgaagttacagatatgtccagaatggatgttttgcaaatggagcgtgtgagctgtaacgagatagcgcgtatgagcggagaaatataaaaaagatagaaaggatcaccgaatatggatatcataaaaaaacttgcggaggaattacagatccgtccggggcaggcgcaggcagcggtcaaactgatcgatgagggaaatacgattccattcatttcccgttaccgaaaagaagccaccggcgcattgaacgacgaagtactcagaaatctgtatgaacggttaaattaccttcgcaacttagaagaaaagaaggaacaggtgctttcttccattgaagaacagggaaaactgaccgaggaactgaaaaaacagattctggcagcagataccctggtggcagtggatgatctgtaccgtccgtaccgtccgaaacgccgtacccgtgcaacaattgcgaaagaaaaaggactggaaccgctggcaaatctgttgtccttgcagcagttagatcattctgccgaggaagaagcagaagcttatatttctgaagaaaaaggtgtcgcatccgccgaggaagcgttacagggagccatggatatcgtggcagaagcaattgcggatgaggcagattacagaacttatatcagagaaaagacgatgaaaaaaggtacactgacttccactgcaaaagatgaaaaagcggaatccgtgtacgaaatgtattataattttgaagagcctgtggcaaaactggcaggacaccggattttagcgttaaaccgtggagaaaaggaaaaaattctgacagtgaagctggaagccccggaggaggaaattatccgctatctggagaaaaagacgatccgcagagaaaatccgtatacaactccatatttaaaagaagcggtagcagacagttatcagagactgatcgcaccggcaattgagcgtgagattcgaaacagtctgacagaggaagcgcaggaaggtgcgattcgtgtctttggaaaaaatttggagcagcttctgatgcagccgccaattcgtggacaggtggtgcttggatgggatccggcgttccgtacaggatgtaagttagct

SEQ ID NO: 13089 - DNA, 422 bp, Unknown
  gut microbiota DNA sequence
aatgtgatgggctgaatggcatctcttgctgttcagcccgttgtctatttagtagcatggattctattgcatgtcaagggcacccgataaaatcgggtgtttattaacccttgatatgtgattggatctatgcttagtcgatatccaccggctggatccgatccccaaaatagatgcataactgatccagtgtcagaccccagtcccaagcctttccggtccatttttttgtaacatccatcattgccagatagagcatcttgaaaagggcatcatccgtcggaaaaatagtcttggatttcgtaaccttgcgtagctggcggttaaaattttcgatggaatttgtagtatatattaatttacgtatctcagatggatatttaaaatatgtggataattgtgtccagttatttctccaggat

SEQ ID NO: 13090 - DNA, 7454 bp, Unknown
  gut microbiota DNA sequence
atttcgccatttcagtaattataatattgccaatcaattactaaaactttataacagcacttaatcgtaaattggcatatactatgtaatatctatttttcatagaaaagtctttcatttaaaccacacgcttacccgtacgtttcacacctaaaaatacaatttcaacactttatcgtctgtttttttgccaactatggaaccgatcaacatgcaaaccagtgatacactgattccaatcaaaatctgatgcaaatttgcgatttttaatccaaagagcatagtcacacaatagcataccgttccaccgataatcgcactgacagctccggctttgttcgcttttttccagaacataccaagcaggaaaatccagaaaaatgcactttccagtccaccaaaagcaaacatattgatcttccagattacacttggcggattgatggaaattccgaaaataataagtccgatcaccaaagtacagatctggctcagcacagttgttgttttctcagataccgcatgtccttttttctctttctcatgcatatacacatcttttacgatagaagatgtggtactcagcagcagtgatgaaatggtggaaatggatgctgcgatcggtccaatgatacaaattccagataccagcggttttaaggaacctgcaatggcaagcggaatgatattgtctacgctgtttccgtaaactgccagatttccagtcaacacacctgcggataacacgccaataaagttcattccgatattcatagcaccaacaacgacagtaccaagaataatcgcgtgatgcagggattttgtatccttgtaacttaagcaacgcactgctgactgcggtaatcccaatgtaaagataccaaccagcatccactgggaaatatacaggctcaccggcatatttccaccggataacggctctaacatctccggttttgtcgctacgatattttccatgatattctcataaccgccgccctgacggataatgccaaccagcaggatcaccatacctgccagcataaccattgcgcagaccgcatcggtaatggctacgccgcggaatccaccaacggttgtatagataacaacgaccagaccaaatacaatcagtccggtgagataagaatatcccgttacggcttcaaataattttgcgccgcctacaaactgcgccaccatagttgccgcaaagaaaataacaatgataatggcggaaatatttgccagcgcatcagactgataccgatgtctgatcacatcaatgatcgttaccgcatcaatttttcgtgataccatggccatttttttaccaagaacaccaagcaccagcagtaatgcagttacctgaaccacagacatatagatccatccaaatccgacgctccatgcctgtcccggtccgccgacaaaggaacttacggaactgtaagttgctaccgtggtcatcgccagtacaaaaccgcccagactgcgggaaccgataaaataatcttttacaaagccttcagaggctctttttgcagatgcgcggcgcacataaatacttacaatcagcataatgatcataaaaataaacaccggcatcaatgccagaatattcttattcatcttcattttcctcctccagatcaaaatctttgaatacgcgtttcatcagatatacaacgacaataatggaaaaaatccaggtaccgatgcatcccgtgatggcccataacggagtatggaaaacggtgatatgtaacttacttactccaaaacctgcaactatccagaacacgataattgcaatgactgcccaaaggacagattttgcctcttttgcgatctgccgcaatttttcctttcgcttcatgacgtcctccctcaaattttggctcgtgtcaacgattccatatttttgttttcttaattaatcacaaatcctctcacctctgaatttcagtagacatgagaatctgtgtttgtcacgtatttttattccaattatatcatcaggttcaaacaaattagtcgaataatcattataccttataacaatgcttcccgcaatgctttctggtcttcgtatactgccatagcgccggcattccacatttcttctgcgcctccgaatccatagcccactccgacacagtcaatgccgccttcttttgcgccatccgcatcatagtgtgtgtctccgatcaacacagcattttccttggaaaaatccggacactgcgcttccatacggcgaaatgcttcctgtaatacctgaatctttgtatcgattttaccatccgcactggctcctactacttcatccagttcggaggtcagatcaaatttttccaaaatctgccggcattgtgcttctggtttcgaagatgtgatcacctgcacatatcccgcctctttaaatgcctgaatcgtctcgcgcactccatcaaacaattcacactcgtacacgccaaccggaatgtaacgttcccggtaacgtgcaattgcttcttccgcttttctttcgtcaaatccaagatattttttaaaggataaacgaaatggcggccctataaattttctgatttcctgttctccttccagatggattccgtaaggttccagcgcgtaagccagacagttgctcacaccctcataggtatttgcaaccgtgccatccatatcccagaaaatatatttatattttttcatctactactccatttttgtctttttattttagtaattaacagtgaacatctttttatcagttcccctgtttttccagtctgcatttccatatcggaattcaagaatgctccggcattcttgcttctattacattgtcactttcatccgttctgtgacttgctgatcaattcctgacgaagctgcgccaccgtcttatgcagcaccggatgcacttttcccgggcaaagcataaaaagtggctccagcacaaacaaacggttctgcatatcgacatgcggaatgatcagctccggttctgccacgatctcatcatcgtaaaatacgatatccagatcaatagtacgcggtccccagtggatcacacgttcccgtcccagatctgcctcaatcttgtgaattacaattaataactcctgcggtgtaaacaatgtttccagttcgatcgcaccatttaaaaatgccggttgatccgtgtagccatatggcgctgtctccaccagttttgatgcttttacattgcggatttcggtgcactcctgcagaagtttcactgccgcacgcaaaaactgctgccgctcacccagattggaaccaacggacagatataccgtgtgccagccacggctgatttccaccgatacattttccaatggcagtccgatcggtgcccacggtttctgaatttccagatctatttttttcaaaagtggatattccatcagcattgcctgagccatatgctctgccacagcctcgatcaatttaaacgtgtgattctgcatataacgtgtaataaaatggcagacttcaccgtaattgatggaattttccagatcatccgaatagcctgctgcacgcgtacttgtatatagcgtggcatttaccagaaatttctgtcccagttttgtttcctcagaaaacaccccatggtgtccaaacacttccagattctgtatttttatacgatccattttacgcctccataatcgcttttgtcatctgaatagcctgtttattcgctttgatatcatgcacacggacaaacgcatagccctgctgtaccgcaaatactgttgtcacagcggttccaagggcacgatctgtcacaggcgcatccagagtcagtccgatgacagattttctggatgttccaagaagcagcggataaccaagtgttttcagtttatccatatatttgatggtgatcagattctgctcataagttttcccaaaaccaacgcccggatccagcataattttatcatctgcaataccagctgcttttgccagagtcacgcactctgcggtttcatcgtaccattctttcaaaaaatctgtgtaatcactgttgtcacggttgtgcatcagacagcatgccacatctccttttgcgatcacctctgccatcttcggatcatatttcagtccccagatatcattgatcagatctgcgcctgctgcaattccggcttctgccacggcactcttgtaagtatccagtgaaatcggtgcatcaaatctggcttttactgcttcaatgattggtgccacacgttcaatttcctcctgatccgtgatctgtacatgccccggtcgggtagattctccaccgatatcaatgatgtccgctccctctgccagcatttcctctgtatgacgcagtgccgcatccagacagttaaaattaccgccatcagagaatgagtccggtgtcacatttaaaatgcccataatatatgtctcgtgatctgtgtcaaaattctttgttcctattttcatgttctcattctccttataacaaaaaatgtaatatctctattctgcacaatatatatcaaactattttttaagttttattttaccagataatggtctgattgcgttcctcgtcactccatttacaggaatctgccgcctcacataaaaagcagtttcgtgacaaatggtctgctctgcggatataatattccatgacaccagtttccgcgttttcttcctcgcgcccatgatgtacacctacaatctgcagcgtctcagacatccattctgacggatatccaatgtcagacagcagttgttttgcaatccgcattccggcttcactgtgatgctctccggtctcatactgcgccacccgaccaatatcatgcaacaatccggtcacataaaattgatccttcttttcctgcaaattcactgattcatgctttttttcacaaatatgatctgttcgatcggcatttctatcctcggtaatcttttcattgcttttcaatgcagattctgatccataagtattttccagacttgcttctaatccagattcaaatttttcctgcatctgatcttccagatacatcatccatgccatacgacagacatccagtgcatgcgacagttcatgatgacagtaaatccgattctgttcaatctgctgcacacgcttctgcaaacgcagaaattccgggtgtttcagtaatttttccgtaaatttcataaatctttcttttcctgttccaacgcaatcattacagctcatacgcttcccgcacatttcgcaaataagataatgaaccaaatgccagtatcatatcgcctttttgtgcgtcccgtaaagcatataataccgcatcctgcacattttcacaatatcgcgctgcaatcttttgcgctaaaagctgcttttccagctcttttccgtccaaagcccgtggattttgcggagtaaccgtatacacatgatctcccggccgaaacatcatccgaatcattttttcataatctttgtctgccagcacgcccatgatgtacacgattctgcggtcagaaaatccttcgttcaatgtttttcggagtttgcgtactgcatcctcattgtgtgctccatccagataaaaatccggctccgcgccaagctgctccatacggccatgccaggttgtgtgcgccagtccatgttgaatggattctcttgtaatcttcggatagtttttctgcaaaatctgtaaaacgttcagaacgcagactgcattttccacctgaaatgcgccacagagagaaagatttatctgcatttcctgtgacgttttgttctctgctattccttcttctgttttctgcaaaagttcatcagagcacccaataatttctttttcgttagctttttcattctgaactgcatcaaatgcgttccatgtaaatgcatatcttccatttttctgtgtgatctgctgcgcctgatctgctttcgccacaaccagctctgcatgcatctcttttgcttttttctcaatttgtataaaagcatccggcttctgctctatggtaaccaccggaacctgcggtttgataatgccactctttactgttgcaagctctcctaaggaatttcccagaaaccgaatatgatccatgctgatagatgtcaaaacacttaccagtgggtgtttgatcagattcgtagcatctgtttcgccgcccatgccaacttccaacagagcaatatcacatttttcctcataaaaccacaaaaatgctgccgcggtctccacctcaaaccgggttggatgcggttttccctgacttgtcagtttgtcacatgctttttttacctttgtaaaaagctgtgccaatcggtctttttctatatttacacccttcatctggaactcatcttcgtagacaaatacatccggcgtgcaaaatctgccaaccttatatcctgactctgtcaatacctgcgacaacatggctccaacggagccttttccattagttccgccgatatgtaccagcggaatttcgtcctgtacatttccaagctcttccatcagattctgaatactagtcagaccaagctgactgccgtatttttttgtttcttccagaaactccattgcttctatataattcatacttctattctgcgctcctctttttgtaccgttcacacttttatcttgtacatagctttcccgtgctgtacgtacatcatctaataagattctctcgtttcttctgaaaatccgataataatatctgtaattccagactgtgtacctacttttcttccaaacatacactagctatttattaactactaccataagtttttttctgtcacaagatatgacattggcagatcattttcttccgttggaagctgttctgccacctgaagttcatatgccaccccaagctcgatgcaacctgattttccttcaaaaaatcgatcataatagccttttccatatcccatacggtttttctttcggtcaaatgccacccccggaaccagtaccaacgcatctgaccagtctatcggatgatcttccttcggttccatcacatgaaatgttccctcttccaattctgaaaaatcactgatttcaaaatatttcatggtatcgccaaatactttcggaaacgcaatatgcttgttctgtttccatccttcttctattacaagtcggatatctacttcattgccaagcggcgcataagcaagaattttttctgcattttgaaacagttcaatggaaatgattcttttgcagatctgatctgatttttccctgacttcactattactcatttcatttcgaagggttttatatttttttctgatttgttgttttgctgtcattttattcaactccttactgagtcaagcggatattcgcaatccgcttcgctacttgctcataaccgaataactgctccgcagtttatcagaa

SEQ ID NO: 13091 - DNA, 5562 bp, Unknown
  gut microbiota DNA sequence
atacctcaacacttacagaggtatcagtcatctctatttttgatatccaagaaaagctcttacacagcttaactgttcaaattcttttgtgccgaaaccatatccgatttcttcaatttccatattcatctgtcttgtgaatgtttcaacaaagtattttaaaatagcggcacctgtcggtgtcagtaattccccgtcaaagctgctgcaatataccggcatgcctttgatgatctctgcggttgccggagccggaacaggaagtacaccgtgtgcacagcgaacagtgccatttcccacgcagaccggagaagcctgaatctcatccacgccaagcatctcgatggcaagactgctaccaaccacatcaattaacgcatccacagaaccaacttcatggaagtggatctgctccatatcggtacgatgaacggtactctctgcggctgcgatagcgcggtaaatgccttctgcatgtttctttacgatatcgctcagatccagtgaaatgattttttccaaaatggacgcaacacttgtatgtgcatgatgtccgtgacgatgtgcatgcatatatccatcttcatggtgagggtcgtgggtatgtgcgtcttcatgtgcatgatcgtgtccatgaccatcctcgtgagtatgtacgtgtgcatcttcgtgagcatgatcgtgtccatgaccatcctcatcagtatgtacatggacttcctcatgggtatgttctgcacaatgactgtgttcatgggtatgctcatgcatctctccatgatcatgatgatgctcatgagtatgctcaacgccttcttcttccccgttgatctcaactttcatatgaatgccaccgattccctgtttgcatgtttcctgcggaattacgtgcacttcttcgctgattgcatttatttttttcaaaaatatggttttctgttcctctgtgagcaggctgtataatgcccccatcagcatatccccggctgctcccgtcttacattccagatataatactttcttcattttaaattccctcactcaaaaaaatctacttcacgaacttctggatcgcatctccaaactctttgatcttgtcgtaatcctcgtcctcaactgcttctatgatacaatgattcagatgatccatcaaaattacttttccggcattattaatcgcagaacgaaccgctgccagctgcgtcagaatttccgaacagtcatcttcccggtctaccatccgttttactgcctccagatgaccaatggctcttgccaagcggttagaaactgccttggaatttggatgatgatgtccatgaccatgctcatgagatgtgccttcctcatgcaaatgatcatgatccagtccaagttcatgtgccagtctgtgcgcctgttctgccgcatcggatctctgctgtttttccacctttgactcttttacctttgccatgttcctacctcttcatgattttgtttgccagacatgctgctccatatccgttatcaatatttactacaccgattccattcgcgcagctgttcagcatggaaagtaatgctgccagtcctccaaaacttgcgccataacctacgctggttggtactgcgatcaccggcacttccaccagaccaccgacgacacttgccagcgcgccttccatacctgcgatcacgatgatcacatctgcactctggatccggtcgatcttgccaaacagacgatgaatacctgccacacctacgtcgtatacacggtctactttgtcaccgaaaaattcagcggtcagtgctgcttcctctgccaccggaatatcggaagtacccgcagtcactactgcaatggttcctttttccgctttcggctccggcatcgcgccaaccatgatgattttggaaagtttttcatataccgcttccggggcaaccgcttttactgcctcataagcttctgcagatgcccgtgtcaccagaatccttgcattgtcatgcatcatatggctcacgatacctgcaatctgctccggtgtcttgccctgtccaaaaatcacctctgcctctccggtgcgaagatttctgtgctgatcaatattggcatagccgatatcctcatacggcaaatgtttcaaagactccagtgccgtatccacatccatgctcttttccgaaactttctttaatatatctgataaatatgttacatccatgatttaccctccaacctgtaaacatacctttactgttattttttcttattataatacattgcaaatttcatgccagttttgttttttccattttttccggattttggcaggaaatcaggcgatttacagtaatctctgttccatttcttcaaaagaatatcatttttgttgcaatttttaaacacccttcttttttcctttgttgcatttttcgaacagacctgcaacgactgtttacaaaattgttaaaaattgctataataacagaacagttaaaaccccaggggagggattgtatacatatgaatcaatatttagccatttaccaggttcggcaaatgctgcaaaagctgatttcggaaacagctgatgcagatcttgctgacaaactgaaaaacattgatcaccagttaaattattttttagataagggaatcgattttaaacaagtggtagacgggattgacgacagtatctttatcacagacaacaaaggaaatgtgttatatgtaaatcctgcctacacacgcaacacagggattgaatcggaacgggtaattaaccataacatttatgatctgattgaaaaggacaagctgtacagcggcggcgcgattccggatgttttaagcaccggaaaaccggcattccgtctctctacgacttatgccaacggcacaccgctgaccggatacgcttccggaacaccaatctttgactctgacggatcgcttaagcaggtcattgccagcagccgaccgattgtgtccctgcagtccttgaaagaagatttcaacacctttatcaaagagattcaggagatgaatccgcaaaattcctgtgcagaatcagaaaaatccttaaatgacgaaatgatcggcaaagacggaacccttgccaatatctggacgctgatcagtcatgtagcaccatctgatgccaccgttctgattaccggtgaatccggtgcaggtaaagaagtcatcgcggatgaaatctaccgaaacagtaaccgaaacgataagccgtttgtaaagatcaactgtgcagccatcccggcacaccttctggaatccgaattgtttggttatgagaaaggtgctttttccggcgcaaatgcaaaaggaaaacagggactttttgagctggcaaaccacggaacactgatgctggatgaaatcggtgatatgccgatggatctgcaggttaaattgctgcgtgcgatccagcagcaggagatcacccgaatcggtggctcccgtccaatcaaattggatatccgtttccttgcactgacaaattccaacttaaaagagaagatagcaaacggaaccttccgacaggatctctattaccgtttaaacgtaattccgatctatgttccgcctctgcgggaacgtgttgcagatatcgaagcattgtgcaaccgctttattgaagtcttttctgcaaaatacaaccgtccgttctctctgaccgaacagcagttaacctacctaaaacaatattcctggccgggcaatatccgtgagctggaaaatattattgagtatctggtgctttgcagttccggtatcggacaggtagacgattccatcattgcaggactgttaaatatttctcaggaacaggagccgacaatcaccgcagacatggatttcagcagcgcggttgcccagtttgagaaaaaccttctggagaccacattaaagacctccggaaaccttcgggaagcaggcaagaaactgaatatcaatgcttccaccatttcacgaaaaataaagcagtacaatattgactatccaaacaaaaaggaataatgcgtcagaatcatgatgaatcagcaaattattatatccaatgtgtgtgaacagcttgccgacatctcagcgtctactcagaacgaatctgcacagcgcaaaattcaggacattttacaggctcttcatacgtttcagttacgaaatattgattacaaatctgccatcgatcatctgaccgatggcattttaatcagcgatgctgccggaatggtattgtatataaacaatgcctttacccagagcacacacattctcccggaagaaatcctgcaccacaaaatacaagacttacagggccaggacaagctctacaccggcggcgtcattcaggaaattataacaacacacaaaagtgcgtttcgactatgcacgacttataaaacagatccgccattgcgtggatatctggcaggaacacctatattcaacgaaaacggcgaacttcatttaatcgtagtctgtcaccgttctctcatcacacttcgcgaccttcaatcagatttccagacatttctgcaggaactccgacaagtagctcctaacagttcaagtaactccaacacaaatgacaattccatagtctcatcggaaaatattatgatcggaaaaaacggatctctggccaatatctggaatctgatccgacatattgcaccgacagatgctaccgtactgatcaccggcgaatccggtgccggaaaagaagtagttgccgatgaaatatttcaaaacagtgcacgaaaaaacgaaccctgcatcaaaatcaactgcgcctccattccggcagacctgctggaatccgaattgttcggttatgaaaaaggtgccttttccggtgcgaatccaaacggcaaaaagggattatttgaacaggcaaatcacggtacgttaatgctggatgagattggtgatatgccaatggaactacaggtcaaactgctccgtgccatccaacagcaggagattacccgggtcggcggttcccatcccatcaaactggatatccgttttatcgcattaaccaactccaatctgaaagaaaagattgtaaacggcaccttccgacaggatctgtactaccggttaaacgttattccgatctatgtaccgcctctgcgagagcgcctgcaggatctggaagcactgtgcaacacctttatccggaaatatacggaaaaatatcattgcgcttttgctttcacaaatcagcagcttaatctgttaaaaacctatcactggccgggaaatatccgtgaactggaaaatattattgagtacgtgatattatgcagtgccggagaaggcacgatcgaagattccgttctgtccagtctgttgaacttaagtcttccaccgatgcacaccattctggatacagatttctacggtgcggtggaacaatttgaaaaacagctgattgaagaagcgcttacttcctgcggaagtctgagaaaagcggcaaagaaattaaatctgaatccatccacggtttcacggaaaataaaattgtataacattttacccccccc

SEQ ID NO: 13092 - DNA, 454 bp, Unknown
  gut microbiota DNA sequence
ggggtaaggggtttcttttttattaataatcattcataatagtctcatgagtaatgtattacaggatatttttaaagaccattatgaagaaatgctttatattttacatccacgcaaatccgtcatcgaaaatgttgaccgtatgattaattgcggtgatccatcttttggtggtgcaatgtacggttgtgctaaatgtggtactttcaaattcgttccattccgatgtcacagtcgtttctgtcctacctgtggaacaaagtattccattgaccgcactacctctatgtcctttaagataatcaatacacaacaccgtcactgtgtttttaccattgattctgaactcagacatttctttttagaaaaacgtaaactccttggtcttctttttgatgctgttcaaagtgttattttccgggctttctataaagataataagtctgaatgtttt

SEQ ID NO: 13093 - DNA, 23616 bp, Unknown
  gut microbiota DNA sequence
atgtcacgaagcgttgtattgtgaagaaaaaataagataaagtaatgcatgatatttacgatatgggatcaaaccttgccagttgtaatggattgacgtataatgaaaaaggttgtttcaaccagaaaaagataaatgaggtaaagttatggatcgttatttagaaaatatagagcataaagcggcagtcctgtgtgatgcattgccatatattcgtgattttgttcacaaagtgatcgtgatagaatatgactgtggcgaatggctttccggtgtggaagagaagaaaatgatcaaagatattgttctgctgaaaagtataggtgtgattccaattgtggtacatcgtacccagatgggagtagacaagttccgtgaaaataaacgtattgcgaaattattagagttgtgcgatacaaaggcaatcggtatctgtggagtagacattgagacaattcagatgatgatcaaaaatgattatattccggttattgtgccgaatgatattgataacgagatggaaaatattgatccccgtgatacggcactggaagtggctgtaaagatgcaggcggacaagttgatctatctttccaggtatccgggcatttatacagatgatacgcgaagtgacgtatatccacgtatcaccgtgcatgaggtagaagaattaaagaaaacacgtcattttcaaccggatttcatggattatctgcagcattgcattgatgcggttaatcagggagtcaaccgtgcacatattctggatggcagaatcgagcatgtacttccaatcgagtttttcagtattgatggagcgggaaccgttctgattaaagacgaaaaaacgttgtatcaacatgaactgtaaaatttcgcttaagatggcttaaaatttactatttaagttttgataggaactcctgtaattttatctcagtcgctaccaatcgctccttgagagaaaattacaggagttcttactttacacagagctattgtaaatttttgcgccatctttcactatgtgtcatgcatgtagcgtgttgggatacagaacgtagatatcggtgtatcgtgccattgtgatataaaaatttttggtgccacgtacgtaaatagggtctgagtttattttctctcagcgagcgattgttagccgcggagatataataaactcagaccctttcaataccctaaattttttattacacaaacaagtatttcaccagataagacgccagccacgccatatgctgtttcctgtcgttttcaaaatccagaaatttcttttcttccggcagtgaatcttgcagattctctgctctggtagacagcagataggatttaatgatcagttgatcgatctggtggcgccgcatatcttctccaggtgtggtatgagcatccacttctgtcagttttgtacggatgcttttcaacagttcgaacagatactgcatctgcttccggatacgaaccgggaaaatatatttattggcaagcaaagcaattcccgcacctgtaagagtatagaccagacgctgcagcaggacaatgggaacactgctgtctatggactgaagtgccagtgccgagcaggtgataaaggcaaccatcggaccgtagccgtcggcggcatagatcataaagtttgccactgtcatgatgacaactctggaaccgaaatctggaaacagtgtgaaaaatacaaagcacaacacgattcctgccatggtgccaagtacacgctgccgaactctctgcacggtatgttccgtaaatggaatcatcatgaaaaagacggaaattacaagccagtaaatattattgctctgccacacgtaggaaatcaccagacatggtgtcagtatgatcacctgacggagtgcaaaacgaagccgcatatttcgaatatccggtttgcgtacacgaaacgtcagcttacggtagtccgcagtaggttctgtggtcagaaactgaggataaaatttcgcataaatttcttctgcgcgtgccagatttccttcctgttccgggtgattggtcagatagttgatgatctgaaatacaagcacaaagcggcagtaccagttgattttccctttgtggcgcagtgccgcgcggttggaggaataaatctccatactacatttctgattaatctcacagagttttttatgaaccggaagcagttcgttcacattttctgcaaaagaggaagcgtcgccgtccttggcggtaaggtctagcagctgtctgcatacctcaaagccttcctgaatcaatccaattaagcgtttttgcgtattttccttgcaggaaagaagccaggaaaataaaaatacaatggcgaagcttgccagcagggcaagtaaacgatttccaagtgctgaaaaggtatgcactggtgcaatctggaaaaagatcagggccatgcctgccggaaaataattgttcggattgtattcgtcgatcagcagataagccagccagaacagtgccgccgcattgatcagaatgcagagcggaaggttgatgacggcaagaaaggaaaatactgccatgatcatgtagacgataaagttccggattagacattcgtaatgattgcacatatttcgatagcgcaggaacgagagcgttgcaaagggaccgatcatcgtgttttccatgccaaagaaaaaatatgtgataaaaaatataattgtagcaacaatggttggcgcgatcgccgaacgcattaagtttttctgtttttctgaacgtttcaaaaaatcacctcatatcaattttaagaagaaaaaaacagtaagtcaatggaaattttttgagaagtgtggtaaactaaaaaccaaataggctcttgtggtatgcatattggatttttgaggaagatggcaggtagatcgtgtgagatgagatatgaaaaacagaacgccaaaaagctcaatgaacttcgaaaattgcagaagcaggcatgacaggagataaatatggaaagaaaagaggtgcatttatcatatgagaataggaatgggttatgatgtgcataagctgacagagggacgcaagctgatccttggtggggtggagattccgcatagtctgggattgttaggtcactctgatgcagatgtattactgcatgcgatcatggatgcattgcttggggcagcggcactgggagatatcggaaaacattttccggatacggacgagcggtatcgtggaatttccagtctgaagctgttggagcatgtggcagaattgctggaggaagaacactatattatagaaaatatcgatgcgacggtgatcgcgcagaaaccgaagctgagaccgtatattgagcagatggagcagaatattgcagatacgcttcacatttcaaagagccaggtcaatgtcaaggcgaccacggaggaacatctgggctttaccggcagagaagaaggcatttcttccaatgcggtgtgtctgttgtctacgatttatgaaaacagcgtagcagttggggacagcgcggcaggctgcccgggatgcggaggatgccattgagtatgcgctatctgacacagggcgaaaaagagaacagtcgcagactttatgagtgctgtttcccggaagacagtcagaaatttgtggattattattatcaggaaaaatgcagggagaatgagattgcagtgattgaagaaaatggaaaaattatttccatggtacatgccaatccatttacggtaagctgctgtggtacacaggcagaggtgcattatattgtagcagtggcaaccgatcctgaatatcggcgcagaggctatatgcgtcagctgatgcagcaggttttgcgtgattgcaggaacagaggcgaagtattttcctttctgatgccggcagatccggcttattatgaaccattgggatatcgttactggaacaatcagtatgtgtgggagattccgaaagagcaggaattgctgctaaagggattctgccaaaatccagaatatcaatctgatgctgatccgaaagcactggcacagatggcagaccgaatacttgcagatcagtttgacctttacattctgcggaatgcatcgtattatgaacggatagagaaagaacaggaaagcgaagatggcggagtatatgtctggtatgatgagcaaaaaactccggttggaagcgttttttatgctaaagaagacggatttgaacttcgggaaccgatactgccagatgtgagaaaacagcagattcccgataaagatagtttaggaaaagctgatttggataaaggtaattctgataaggacaaactgtcggttggagaaagaaaagatgacagtttttatgtgacagagcgaaaagaatctgtgatgatggggagaattacagatttaccggtatttgttcagatgctgcgctcagaaaagccctatgaagaaatattacagatcagggatgacatattaccggaaaataatggcatttttcggatttatatagataaaacaggcggaagggcagagagagcagaggcttgcgaaaatgccagagccatggatatagcaacatttggtcaactgatgtttgacaggttacgaatttttgtcaacgagttggtctgaccatggaggtaagaaagatgttaaagtttgaagagattatcagtaaatttcagatagaaggggaaattaccgatgtaaaaccgcttggtcatggaacggtaaaccatacgtatgagatcgtttgcggtggagagcattatgtacttcaggaaatgaaccatattgtgttcaaatatccgacagaagtcatgaacaatcttttcctggtcacagaatatctgagagatgcgattgagcgggaaggtcgtgatccggaactggaagcactgacgtttatccgcaccaaagcaggaaatcagttattacagactgaggaaggcagttatttccgtctgtatcgtatgatctgctgtggtgaggagatgcagaaaccgacgacaccggaggaagcttatgaggcagcaaaggcagtcggtgagtttcatcgtcgtctgcgtgattttgacagcagccagcttggtgctactgtgccaaaactgcacgatatgcgaaatgccatgagacagcttctggatgcggttcgtgcggatatctgtttccgtacttcagactgtcaggagcagattcagttcgtactggatcgttccaaacagcttaaccagattcaggatgcgatggagtccaaacagattccgcgtcgtgtgacacataatgatacccgttacagtaatgtgctgatcgacagtgacagcaaaaagtccatctgtctgattgatctggataccgtgatgtccggtgcatcgatccttgatttcggcgatgcagtgcgtgcaggagcggctacatttacagaagatgaaaaatttggcaatattgagctggatcttgatctgtaccgcggttatgtacagggttactgccatgagatgggaagaatcctgaccgcaaaggaaaaagaactgatggtatacgccgtatggctgatgacgatggaaagcggaatccgttttctgacggattatctgagcggtgatcggaatatcacgaatttttccgatgagcgtcagaatctgtatcgcgcggtcaaccagtttttcttagtgcttgatattgaagaaaagaaagaacagatgcaagagatcacagcagccgttctgatgaaaaaataaggaaatatatatgagaaaggagagcggggcaacctgcttacatggaatgaaactatataatacactgacaaaacagaaagaagaatttgtacctttacacgaaggaaaggtaagcatgtatgtgtgcggaccgaccgtatataactttatccatatcggaaatgcacgtccgatgatcgtatttgacaccgtgcgcagatatatggaatacaaaggttacgaagtaaattatgtatccaacttcactgatgtagatgacaagatcatcaaaaaagccatcgaggaaggacgtactgcagaggaagtttctcagcagtacattgaagagtgcaaaaaagatatgcacgacatgaacgtaaaaccggcaactacccatccgctggcaacacaggaaattcagggcatgctggatatgatcagcactctgatcgaaaaaggatatgcttatgcggcagctgacggaacggtttactaccgcaccagaaaattcaaagattacggaaaactttcccataaaaatatcgatgatctggaagcaggacacagaaatatccaggtaaccggtgatctgaaggaagatccattggattttgtactctggaaaccgaaaaaagacggtgagccgtactgggagtctccgtggtgtcagggacgtccgggctggcatattgagtgctctgtgatgtccaaaaaatatctgggtgatgagattgacattcatgccggtggcgaggatctgatcttcccgcatcatgagaatgagatcgcacagagtgaagctgccaacggcgtaccatttgcaaaatactggctgcacaacgcatttttaaatattgataacaaaaaaatgtccaaatctcttggaaacttctttaccgtaagagagattggtgaaaaatatgaccttcaggttctgcgtttcttcatgctttctgcacattacagaagcccgttgaacttcagcgctgatctgatggaagctgcaaagaacggtctggagcgtattgtgacagcagcagaaaacctgcagagattatccggcagcacaaccggtgagctgacagaggcagaaaaagagcttctggcacagtctcatgtatatcaggaaaaatttgaggctgcaatggatgatgatttcaatactgctgatgcggtatccgcaatttttgagtatgtaaaattctgcaacaccaatgcatccggtgagagcagcaaagtgtacattgatgcattatatgcaaaattaaaagagctgtgcgatgttcttggaatcattgtagaaaaagaggcagagattctggatgaggatatcgagaaactgatcgaagagcgtcaggcagcaagaaaagagaaaaactttgcccgtgctgatgagatccgtgatgaacttgcagcaatgggaattattctgaaagatacaagagaaggagttacatggaaaagagcgtagatacagcagcactgccgattttcagtgcaatccgtgaaacatttgacattcgaaaaggagatatccgcacctattcgccgctgactctggcatacatcggggatggcatttatgaccttgtgattcgttctatgatcgtggcgcagggaaacacgaaagcaagccagcttcatcagcatacgagtcatctggtaaaggcacactcccagtcagcgatgatggagtacctgcttccggtactttctgaggaggaagaagccgtatacaagcggggacggaatgcaaaatctccgactatggcaaaaaatgccagtatgagtgattaccgccgggcgacggggtttgaggctttgatgggatatctgtatctggcagaccggtttgaccggattctggaacttacggttctgggactggacggtctggagaaagaagaaaagttatatcagcatcattagaaaaatgacaggaatggaacgaaatcaggagaagttccctactttattagaaaaatgagtaaatggggatggcgatctgtttgacaaagttcctgtaaaaatagtgaatgaacaggagattataaatctatatgagatacgaagaattaaccatcgagggcagaaatgcggttctggaagcatttcgttccggcaagaccattgataaggtatttgtgctggaaggctgtcaggatggtccgatcaagacaattttaagagaagcaaaaaaacatggcaccatggtaaaatttgtttccaaagaccgtctggacaatatgtctgagacaaagaaacatcagggcgtgattgcctatgcagcggcatacaattatgcgacggtagaagatattctggcgaaagcggaagaagccggagaaccgccatttatctttctgttagatggcatcgaagatccgcacaatcttggcgcgatcatccgtaccgcaaaccttgcgggagcacatggtgttattattccgaaaaaccgcgcggttggtttaactgcaacggtagcaaaaacttctgccggagcgttgaattacacaccggtagcaaaagtaacaaacttaagcgcaaccatgaaagaactgaaaaaacagggactctggtttgtttgtgccgatatggatggtgaagtaatgtaccgtcagaatctgaccggaccaattggactggtgatcggaaatgagggtgacggtgtcagcaaactggtgcgcgagaactgtgattttaccgcatccattccgatgaagggggatatcgattccctgaatgcatcggtggcagcaggtgttctggcttatgagatcgtgcgccagcggttacagaaaaaatagaaacggaataagaatatatggaaaaacagtatgaagccttgacggacgaagaactgatagaaaaattacgcgccggggaatccggtgtcatggattttctgctggaaaaatataaatatctcgttcgtaaaaaggcaaatgctgtttttttattaggcggagatacggatgatctggtgcaggaggggatgatcgggctgtttaaggcagtccgtgattttgaccgcagtcagggaagtttttattattttgcggatctgtgtattggcagacagatttatcatgcgattgaggctgccagtcgaaagaaacatggaccgctaaattcgtacatttctctctcagaagatgcatcggatacgtcaggtgttcctctggcggaaagtatttcctggcgggaagataatccggaacagattttgatcgaacgggagaatgtggaacagtttctggaggaaatccgctccaacttaagtccgttggagcagaaagtattaacggattatctggatggtatgaattaccgccagattgcggaaaaatggaacaaaccagagaaatccattgacaatgcattgcagaggatcaagtccaaggtacaaaagctccgatcctgtaagtaaaaaattggatttaaaaacagctgaatgtgcaacggatcaagctcaaagtccagaaactccgatctcgtaagtaaaattaactggattaaaaaatagcggaatatacagcaaatcgaatccagagtataaaaactcagatgccataagtaaaatcaactggatccaaaaataattgaatatgtggcggaaaaaaggtaaatgtcaggaatgctgccagtaacgcgaagaggagcagaaaagctgtaaaggttgttaacttcagtggatgcgccagaaaacgggtgctggcataaaaggtcaaaaatacactgacggcaaagatggcaatgtcaaccgggaaaaatcccttgccaatcacaccggtataggtatagaaactgaccggaataaaggcaagtccacaaaaaagtcccagtgtccgggctgtgagcaaatccttagaggaagaaccgtattttttgtattccaagagaaaatacagaaaagaagggaaaaagaggagcttcatatgttcccaggtggattcgttgacggcactgaacaatcctgccacgggtgcttcccgaagccatgtaaaactgaaatgcagcagggtgccaaggatcagaacaaagaaaaaaccgattttgtttgacttttttagaaaattgtttacaaactgaatcataacaatgcctccatatacgataaataatgtattttaaaaagtgtattttttcatacatttcctgtatcagtatatgcaggcattgtttgtatcagaacctataaattaggatttccagatttttttctgaaaaaagaagtttggtagttgttattttattcacataaagaaatcattcgtgagggaaagtcgcttggtttacagcagctcccgataaatacgtaaggtattctggtaacagattttttcaatttgagtcggtgttaagccggccgttttcattgtctgaaccagttttggaagaacgctgcaatctggaatgtcatcgtagcggtggattccgtcgaaatctgaaccaagggcaacgaaatcttctccgccaagatttatcatgtatttcatgtgctgcacggccagatccagataagactcatccgcgttttgtttaccaagaaaatgctggtaaaagttaataccggcgatgccgccacgctctgccagtttgcggatcatatcatctgtgaggtttcgtggggaagcgcacaggctgcgggcattggaatggcttgcgacaaacggtttttttgtatgagcaaggacatcataaaatccggtatcagacagatgggagacatcaatgatcattccgagatgttccatttcctgcagaaaacagatgccctgttcttttaagcctttttcctgtttatttggataaccaagggaattttcatgattccaggtaagtgtcatcatgcgcatgccaagacgatacagaatgtgcaaaaattctggttttccaagggtgatttcgccttcttcaccggttaacagggcagacatgacaccatcggactgatttttctcaatatcagcaaaacagcggactggacgaataaaatcgcggtgagcctccagttccgagtaaaacagatcaatcatttccagtgcatcctgcagaggtgtttgggtttcttccagattgacaaatacggcaaagttttgaagcagatagccgctttgctgcatccaatccagtgagatctgtgtatggtgctgatccagaccgtaggtctgcccctgacgtttgcgattcagcatggcagagagagtatcacagtgcatatcaataattttcatggtaaaaagcctccgttatattgaatttgttttcattcctgtttataaataattatagtgatattcttaaaaaattcacatatagctattatactaaaagtaatgtaaaatagacagaagaaatatgacacaggctatattgaaaaataagcagataaatatggcgttagatgtagtgtgaaataagaagtataatgctagaagtaatgtgaaaaagcagaagaaatatgatgccagaaataatgtgaaaaggcagaaaaaatatgataccagatgtaatatagaagaaatgtgataataaaagtagtgtagaataaacagaagaaatggagaagatacacttatggatgacagaagatttttttcaaaaataggaatgagttactttgtgatggcactgttgacgacggggatacagatcgttgtatcattgatcctggctgtggcagcaccggagtggaccgatctggcaattgtaaactggctggtatcactgataccgttttatctgatcgcgattccggtttgctttaagatgttacgttcgttaccggcgatgcagttgtatcagagtaaattgaaaccgggtcggtggtttcggattctttgcatcagcatttttatcatgtatgtaggaaatattattggaaatatcgtatgtgcgctgatcacgcgggcaaccggactggatctgacactgggattggatagtctgatgacaggcggaagtgtgtggtacaacctgttgtttaccgtgatccttgcaccaatcatggaagaattgatttttcgtaaagcgttggtagatcgggcaattgtgtatggggataaagcgacagtattgttatctggattaatgtttggtttgtttcacggtaattttcatcagtttttctatgcgtttggattgggctgcgtgctggcatatgtatacattcgtaccggaaaactcagatatagcatcgcattgcacatgtccgtgaatttcttgggaggatttttatcttcctggcttttgcagaaaatagattatgcttcctggctttcacagaatccgtatgattccattgacttggtctttaatcatatgggaccacttctggcgttaattctgttagaaattggtatgatcggacttgccattgctggacttgtattttttattatgtcagtgaaaaagctggagtggcgtagtggagaatacgaaaaaccgacaggaaaaatggcatcggtgatgtttggaaatccgggtatgctgttgtttttcgctatctgcgtgggattatttatcatgtcgatgctgtaatgaaagtaagaaaagtccggcagatggatcagagctccatcatgccggacataatgcatccgcctgcggcaccggcggattctaattcctgccattgggcaggatcaaatttaataccgccgatgccatagaccggcagcgatacggacttgcacacagtctgaaggaacttcagaccgcggggtgcaagtccttttttgcaatcggtcacataaatgtgcccggcggcaacgtacgttgcgccgagcctttcggcttccagcgcttcgtccacggagtggacggaggtgccgatgacggaaaaacctgccagtttttccaaggcggttccatcggcacctgcaaggctgcgaagcagcggcagcggcaggtggatgcaggtacatccaagggcaagcgcatcctgccagaatgtatgcaggatgcaggaaacattgtattgttggcagatgggcaaaacccttatggcaagggttttgtaatcctctgccggcagatctttttcccgcaggatcagagccgcggggtgtgcctggcacacccgctcaatctgatccagaaatggatgcgctgccagatgccggttgctgaccgcgagaattggaaaatttgaattctgtgttgccatatttttggaaatatctattttggtgttcataataaatgtatctcccttaataatatataaatatcctaggatatgagaactataactcatatatggaaatattatatacatttgagaactatagcatatctacagcataaatattgggtattatagtacttatacataaatataatcactcataaccggctgcaatttatgctgcaacagcgcatgataaatctcatccaccgaacggccatctgcaatctcaaactgatcatcgcccttgtcctcaatatcttccacatggcttccgataccggtgctgacaccggcagaaattttcgtggcagcaatatccaccagatgatcccggacacgttcgcattccctggtagaaaccgtaatgcttgcaaatggcataaacaggcggtaagcacagactacctgaagcagctgacgttcgtgcacatccattggattaatgcggtcattgttgatgatcggacgaagccgcgggcaggaaaaggcaatctctgcatgcggatatttgcgctgtagcagataagcgtgatagccggtggcaaaggcatctttgcggaaatcatcaagaccgagcagagcggcgaagccgactccacgcataccgcccattaaggcacgttcctgtgcattgacgcggtatgggaaaatacgcttgtgccctgccagatgcagcgtttcgtatttatccgaattataggtctcctgaaagacggtgacgtaatcagcaccgcaggcatgcagataagcatactgatcggaattcaccggataaatttccagaccgatgactttaaaatatttttgagcgatcttgcatgcttctccgatatattccactgttgacattgtcgggctttctccggtcaggatcagaatctcctgcagaccggtagcagcgatagcagccatctctttttcaatttcctccggtgtcagacgggcacggtggattttgttgtgacagttgaaaccgcagtaaatgcagtaattttcacaataattggcaatgtagatcggtgtgaacatgtagacgctgttgccaaaatgcttttttgtctcaatttgagctgcctgtgcaatttcttccagaaacggaagtgcggcaggagagagcagcgcctgaaaatcttctggggtacgttccgaatgtgccagtgcacgttttacatcttctgcggtatatttggcatagtcatagtgttccatggcatcaatgacctgatccatgatatcggagccgatattttgcatatccggcagataggtcatgtggtcaatacggtttttcttctgatcttccagaatttcttcacttaaaatactttcgttgatatgtttgttttccatgtctgcatgcctcctaatcctgtaaaaatccagttaatggggaggatgcgcttgcgccccgttcgatggtgcgtccaagaccggacagataagcacttcttccggcttctatggcttttttgaaagcttctgccatcagcggcacatttccggcagtggcaacggcagtgtttgccatgacagcggcagcacccatttccatggcgtcacatgcctgagacggacggccgataccggcatctacaatgatcggaagatcaatctcatcgatcaggatctggataaaatctctggtggaaagacctttgttggaaccaatcggagagccaagcggcatgatgcatgcggcacctgcatccacaagggctctggcagcgttcagatccggatacatgtaaggcatcacgacaaatccttcttttgcaaggatttccgttgctttgatggtctcatagttatccggaagcagatatttggaatcgtgaacaacttcgattttgacaaagtcaccacagcctaaagctctggagagacgggcaatgcggaccgcttcctctgcgtttctggcgccggaagtatttggcaacagcgtgatattttccggaatatagtccagaatgtttgccagaccgccttcgttggcacggcgcagcgccagtgtaatgatctgagcacctgctttttcgatacaggcttgtaccagctccagtgagaattttccggatcccagaataaagcgggatgtgaattcatgtcctccaagtacgaatttatcttcggttgtgttcatagtaaattaccttccttttcttaaaaattttaaccgaatcaagtaagtcccctgcttcaattgcgaaaagcaataagcagtgggtggggacttgcttgtatcaggaggagtgcaagctccttctgataaactgcggagcagttattcggttatgagcaagtagcgaagcggattgcgaatatccgcttgactgtttgcatgatgtttggtttatggttttaaaatccgcctccacccataaacataacaatctccatgcagtcgccttctttcagatatgtggtggcatactgctcctttggcagaatttcttcgtttagttccaccacaatgcggttttcacggtactggttggcttccagataagcggtgatcgttgtttctgtggtcagaacgacttcttttccgtttacagtgagtgtcataggttctcctttctaagttcgtgtgatcgcacacattttacgaatcggcagaaaatataatgtaatcccttgatttctgtcaaaaaaagagttcatgaaagaaatacacccgtggtggtgcaccccttcatgaactcttgtgtgttcactctcaactttactttatttaatttagttttgttcctgattcatttgggtcataaaaaagagagatacgcggtcatgtatctctcaaatctttcattccttatacattcctacgttggcattatccaaatcaggttcatgggtcgaagttccaaacttcctctcagcctagcatataagctccccgtatgtgattacaggtctgagtataaaaataaacgtcgaaaatgtcaatggatttttgaaaaaaagatagaaaaatatgagttgtgtcaaaattctgacaaaagcatttttttgaggaaaaagacaaatgggaaaagtgttgacagtgtggggaaaatattgtatattaaacaagtcagtgattactgaacaggctgccgtggcacagtaggtagcgcacctcattggtagtgaggaggtcacgggttcgattcccgtcggtagcttaaagccggaaactggagtgatatcagtttccggcatttttttttgacagcaaatcgtatggaagaaaacagggagaaaagctatggcagtaaaaattgatggaatgacaaatgtactggtagtgtacaattcggaggatgcagatgagatagatgttcgtctgcgcatggagaagattgcgtgcgtcagaaaacggatcggtgccggaaaacacggcaattttctgatggcaatgaataattttggcgaagaactgtatgtgcagccggaggatgaagctgctgcccgcgaggtgatcgcaaagtggcgtcgggagagacaggaagagcgtgaaaaccagaaacaaaatccagagacagagagctccgaaaaaacaaataaaatgattgttccgcggattctggcaggaattctggttgtagttgttgttgcattatatctcacgcatatcaggtagcattatgaatgatcttcagattgaatattttctggcggcagccagaaatatgagtttttcaaaggcggcacaggaattatttgtgtcgcagccggccatcagccgtcagatcctggcactggagcaggaacttggatgcccgttatttgaacggttaaaccgcgggatcgtgctgacagcaaacggcgaaatgttttatgatttttttgagcggtatcggacggaactgtcagatctgaaactgagggcaaaattgtctctggaaaataaaaaccgggtgattcatcttggtgtgctcaataactggaatatttccggaattattttgccggtactgcgggaatttgcccggcagtatccggatatcaaggtggaagtaaacagctatgagccacggagctcccaggaagcactgcaaagcggtaaggaggatgtgatcgtcactattgaaccgaagattttgaacattcagggcattatgcatgcaaaggtgatcgatcttcccagagttttgatctacagcacggcgaatctgccggattcgggaaagaaactgacgccgtatgatttccgcgaggatgagtttttgacggtggcgggagaagataatgattttgtaacagatctgatccgaagcgtgtgtaagccttacggttttacaccgaagattcaaccggttcacagtacggatgccatgatcatgggcgttcagtgtggacttggtgtggcagtgacggatgcctggagccgggcgctggataatccgggatttgcgtcgctggtgctggaatccactcatccgctcagtgtggtgtggaaaaatgaggagaaagatccggcaattgattgttttgtggaattgttaaagacttcgattcagcagtatcgttaatgttttccaaaagtaattttttaatatttggaaaacgtaaatccatctggaaacagaaataggaaaaggagatctgatataacaaaatggttataacagtctcctttttattctatttgacgtatgaaagaatgtgttttaaaatagagtcactaagaaaagaaggaggcagaattatggcagacaaattttatgccaagggaccgggaaacaacggttatatcaaaaacctggaagttcttgatttcaacccttggaatggtaaaagtggcgctttccagatgcaggtttacaaaactgcagaaggaaaatactatctgtatggttcctgttttggcggtacacagaatggtgtactgattgctgatattacagatccggagcataccagatttgtaaaacatctgcagttactggatccggaagagtatccgactacctctacaccaaagattcaggtagcagacgatcttctgatctgtgcaatgaccgcaggctcaggtccgggggcattagtagagcagagcgaacttatgaacatgaaatgtcaggcaggtatccagatctggagcctgaaagaagatccggagaacccgaaatatctgggttactgggattgtggagtaccacactccatcggtgttcatcgttttatgtataacggaggtccttacgtatatctttcctgcgaatccgagcgtttcgaaggtatgatcatgcgtatcgtagatatctctgatccgacaaatccacatgaggttggtaactggtgggctcctcatcagttcgtagacggatatccttgcagaacggttgatcatcatgcaggacatgttccgtccttcatggacaaaggatggatgcatggaccgccattcagacgtgacgacggaattatgttctgtggttacggcggagatggtctgtatgttctggatgcaaaagacgttacccgtccgcatctgttaggacagctgaaatttatgccggcattctcaagccatctggcaggagcacgtactcatacagcattaccgctgccgggtcgtgatttctgtgttgttacaaacgagggcgagagattccagttcttcccggaaggatctatcaaagaggcacaggctatgaataaccttcatatggttgatgtcagtgatccgacacacccgactctgatcgcagagttcccgtatccggaagtaccggaagacttcccatatccaaacttcaacgtaatgaaccttggatgccagggtccgttcggaccgcacaacctgcatgagccgatgagcaacaagccatggctggagcagagaggcgacagagtatactgctgttactttgcagcaggtctgcgtatctatgatgtatctgatccttactacatcaaagagcttgcatactttatcccgccaaacccgaacaaaaaaccggaagattccttcttccctggattaccgggtccgcgtaacgcaatgacagaagattgctgcgtagatgacagaggatatatctatgtaacctgcttcgatgatggtttctatgtattaaagagaaccggagcagctgacaactaggaaaatgtgcagcattttgctggtgtcaaaaaagaatagacgctgaaaacagcccatcgtcgggagaaaatcctgacgagggttgttttttttcaccgtattgtgtatgatggatagcgagagaaaaagtgatacgacaaggagaaaacaaaatgaaaaaagaaccatttgttaccaaagagcagattgaggagattgtgaaatcttatccgactcctttccatttatatgatgaaaaaggaatccgcgaaaatgcaaaagcagtgaaagaagcatttgcatggaatccgggcttccgcgagtattttgcagtaaaagcaactccaaacccgtttttattaaatattttaagagaatatggatgtggcgctgactgttcttccatgacagagctgatgctgtcccatgagatcggaatgtccggcgaagagatcatgttttcctctaacgatacaccggcagaagagtttgtatacgcaaatgagatcggtgcaaccatcaacttagatgattttacacacattgattttctggagaaagccatcggcaaattcccgaaaacaatgagtcttcgttataatccgggtggagtgtatacactgagcaacggtatcatggacaacccaggtgatgcaaaatacggctttaccaaagagcagctgtttgaaggatacaaacttctgaaagaaaaaggtgtagagcgttttggtatccatgcattcttagtaagtaatacggttacaaacgattattatccgacacttgcccgtactttatttgagttatgtgtagagatcaaagaaaaacttggtatcaagatcagttttatcaatctgtccggcggtgttggaatcgcttacaaaccggatcaggttccaaatgatatccgtgtcatcggcgcaggcgttcagaaagtatatgaggaagttcttgttccggcagatatgggtgacgttgccatttataccgagatgggaagattcatgatgggaccgtatggctgtctggttacaaaagcaatccatgagaaacacacttacaaagagtatatcggtgtagatgcgtgtgcagcaaacctgatgcgtccggctatttacggcgcatatcatcacattaccgttgcgggcaaagaggatgcaccatgcgatcacaaatatgatgtagttggttctctttgtgagaactgcgataaatttgccgtagaccgtatgcttccgaaaatcgatatgggtgattatctggtgatccatgacaccggtgcacacggattttccatgggatacaattacaatggacgtctccgttccgcagaggtactgctgaaagaggatggaagcgcacagctgatccgtcgtgcagagacaccgaaggattactttgcaacctttgactgctttgacattatcaaaggattggtataatctgttgatatagttcactcatcacatacgtatcatcttcttgatgtagactcaagaagcagtcttcgtttaaaagctcagttggtaataatctgccagaaaaaagggttggaaaaaatgtaaaaaaatcttgcgttatgtatacatgtatggtatgattagcgtgttcggtaaaaaccgaacacaatgccgctgtggcggaattggcagacgcacttgactcaaaatcaagcgggtaactccgtgccggttcgagtccggccagcggcatttgttttgataaaaaggtgtgctgtaatggcacactttcttattatcacaaagaaacattaaagaaaatagaaaataatccgatattggaattatttgtaatggtagttcgatatcgggttttatattctataaaaatgttgagaactaaaaaatgaagcatcaacgcaagggggcgaaagcatgattgacagaacgaacaaatattatttgacaacagcggaaatgcttgtaatgcgtgcaatctggctggcagatcacgatctggttctgaatgaggtagtaagagattgcaatgcagcttacggcaaggactggaaaccgcagacggtaagtacctatttaagtcatttggttcagaaacagtttttacggatggatcgtaatggaaagatctacagttatcatccgattgtaaaagcacaggattatatgaagtataacgtgcagaatttcgtagaattttggggattatctccggcagagatgatgaaaaattatctccagatcagaggatcaacaaaagaagaacgtgatgaagtacgtgcatatattgcaaaattagaggaagagaacaaaaaataactctgttttggtattttgtaacgtgtgaaaagtcaggaaatgagcatttcttgactttttttgttttaccgattaaaataatagtgtttttaaccaataaatggaataaaaagaaaggcagactagaagaatgaaaaaagtaatagtagctattttaatggcagccatgatctgttctttgacagcctgtggtggaaataataagacaggcgacacttcttccaatacctctgcatccgcagagcaggcagatgcgtcagtcagtgcagaagaggaagcaaagaatgaaccgcagtatgaagcaggagtatggacagacaatgtgtataccaatacttctcttggaatgacatttactcttccggaaggatggcagatcggcacagaggaagaaatgaatgcagtacaggacaaaggacaggaagttaccggtgatacaggaagtgcggatgcatccgaagcatatgatttgtatatttacaattcctcaactggttctaatattgctatgatggcagaagatatgagcgcgtttggcgatattactgcacaggagtatatagagtctctttctcagcagctttccagctatgcagatcagggaattacttatacgatgaatgagattggaacaaaaaccatcggaaatacagagtttgtttctctggatggtattgcagagtatcagtctaataacatttatcagtgttatgcagttactgagatgggtggaaaaatgatcactatgatcattaccggtccggcagatcagggacaggcagagtgtgaggcagtacttgcatctatccaaccgatagcacaatagtggtgatggaataaatattagcgacatttcataatgatttatcgtaaatggtaaaaggttaaaaaagatgaagcagctgtttgcatagacaaacggttgtttcatctttttgtgctttcggcaaattatactgtatttgccgttaaatatcgtttccttttatttctcatataccgtgtaatggtattttcgtaacaattctaccgcatgatcgtaggcatctgcctcataaaactccacctgcaaaacaccctgctggaactcacggttgtgaatgataccgatgtttttgatactgatattgttggaggcaaggatcgtagcaatcgtagcgattcctccggcttcatcaatcaggtcacagaacagctggtaaaccgggcggatcggaccgcggtgggagatattgaaggaatcgcggtattccttggcagaactgaaaaattctttgatctcctccggatggctttccgcaatggtatttcgtgtctgctgcagagctttaacataagtatcaatcagctctaaaatctggtttcggtttgccacacagatattttcccacatggtaggatctgaggatgcgacacgggtgatatccttgaaaccgccggcagcaatggtacgcagcgtttcgtcagagtcatccaggtttttcaccagattgaccagtgtggaagcgatgaccgtcggcagatgactgatggaaccaacggaaaaatcatgttttttgtaatctaggattagcggaactgcaccgatggatgccacaaacttttcgaattcctccacttttttaggcgaaaccgtgcgtgtcggagtcagaatatagtatgcattttccagcatgtaagcggtggaatactcatagcctacgtgctccgttccgcacataggatgaccgccgataaaatgtcgttccagatccgggtatttctggatctgctcatggatgccggttttgacacttcccacatccgtcaacagcatatcatcatgcagaatgccggataattcccggacatagtctgcattgtcgagaacaggggcacacagatagatataattacaatcggaaaatcctttgcctacctgatccagtgcttctgtgataatgccgtcggataatgcggcatccagagtggcacgacaggtatcataagcgacgatctgaatgtccggatagatgcgatgcaccgtctttgctacagaaccgccgatatgtccaaggccgataaagccgattttttctggaatcataatgtacctccttcataactttatttaataaatgattcactttacatgtcacttgaaaaaaacagtacttttttgatacgttttttaacacatttcaaatgtattccagtgacatcttttgccatgataacgcatttgcatgaaaaagtcaacactttaaagtgtaaaagtaaaaacagaagatggaagaacattggcgggaactgtttttcgaagtgagtcatagaagtgttttgcctgagactt

SEQ ID NO: 13094 - DNA, 3221 bp, Unknown
  gut microbiota DNA sequence
gtaaaaaacacaaatgatattttccagagttttgttacgaaaaatagtatataaaatgagtaaaatattgtagaataaagaggtggaagcaatttcatctcttttttcttttgggttatgcagtttttagtggaaaattgctttatattttatatatagaagaaactggagggacatggtgaagcattggtgctgattatgcatataaaagtttgtttccataatagtataagtgaatggtaggaggacttgtgatgacgactgcagaattacaggaacagggagcaatttattttgataaaattacagagggtttccggaactataaagatattaaactggtgatggatgaaaaacgtgcactggcgcattttaaaaatctgaaaaaagaatatggaaataataaggcatttgccgatttctattattacagactggatctggattcccgtgagatggtggatgaggttctcacagatgcagaaaagacatatttgaacctgatgatgccggaagatttagatgaggatattgtatttccacttgatgataaacttctgaatataattgtaaaattgaatgcggaagaaattctattttctacaatttattttctgccgagtgaaaaagcaggcggaagaggacgcacaacatggtggggaaactatgagaaggagtatatctgcttctgtgacaagtaagtcttgtttgtgtgtcatattgttggcggcatgctttttcggtattgccctagtgtggtattgtaatattcccgaaatagttcgcaaaagtagctggtattggaaaagccacaggcatatgctatctctgtaatcgtcatggtcgtggtttgaagaagaaaaatggattttcctaaacgatagtggctcaggtatagcataggcgaagtggacagatatttttggaaaagtgaagtgcattttgttttgcagcaatttccggcagatgaaatatttttcagcaatattttgtttgcataatttttttgaacatatccgatcattgcagtcagagacataagatcggcagtgtttttatcgtggtctggaaaatgattcatattttcatagagtaatctacagatgtgggcaaatttttccagcacgataaaagcctgtattttttctgaattactgtcgtagagtatttccagatcatgaagaataaggttctgccattgaactgttggactcaattttacataaggaaaatgaacattttgcaataagggattaaaaaaatactggttaaaatatgtattcgcagaaagaagtgccggagataacaggagacagagaaagtaacattctgtatgtgcaccagaataaccataatgcaggcagcggctgttgacaaataaaccttcacctgtttgcagagggattttttctccgtttacattgtagaccatcgtcccatctaaaatcagaataaactccaagtcgtcatgccagtggctgaccgcacgaaaatcagaatagcttgaaagctgtcttttttttatataggcaggaaagtcaggatggttgtaagcaacgttttcagatgcatctgaatttataatgagattttgacaggtttccataaaaaaataaactcctttgcgaacgattgttatataattatgattaattttggtataaaaatcaattggaaaagtttatttttgtataaaacatcataaataagtgaaaaaactttttctggcagcgtattgccggtaatgtgaaacaggaggagacggaacatggatatgaaattgagaagagacatgcaccttgcatatgttgcggacgaagctgttatggcagaacagataaaatgcagaaagattttgcaaaaattgaattttgcagatcgctcagattttgcgggaattgcagagattgtaaaagaacttttgggtaaatcagacgatgcgtggatcaatccgcccttttactgtgattatgggttcaatattgaggtaggaagaaatttttttgccaattataattgtacgatcatagatgttgcaaaagtaaaaattggagattattgttttatggctccgaatgttgcgatttatacggcaggacatccagtttatccggatacgcgaaattctgcttttgaatatggaaaagaagttattatcggtgacaatgtctggctgggaggcaatacagtggtgtgtcctggtgttcatatagggaataatgtagtcatcggagcaggaagtgttgttacaaaagatattcctgactggtcagtggcagcaggcaacccatgtcgcgtcattcgaaagataacagaacgtgataagagaaaattgtttcgggatggggaaattgatgatgaggcgtggaaaatgataggggggagataaatgcagaatacatgcaatccatttacagttactgctgcccaagtaccggaagatacttatattattacggaaaacgtagatgaaattgtggaaaagacaggatgttctgggacatttgtgtagaagtggaagggatgatccaacaggttcagcaaaagaaaattttaattgcaattgacgatgtatcaaaatctccgcaaatggtaaagtttatttctgaatatggaagatggttgagagcaggttatcccgtgtatttcatgtgcacaggttcttatgaaaatatgcatgagttgagcagtgttaaaaatctgacgttttaccgaagggcggcaacactaaatacagaaccattaaatgtggtaagaatgactgagttgtatagacgtaaaatgcatatcgatagcattccggcgcacgagatggcaaaagttacaaagggacacgcgtatggtggagcaacactagcgaaaataaaaattgcgcaaataattggcacaattcacacaatagcggtaaaaactgcaagatgacctacttcgacaaatccgcccgaaatgtgttgacttctgccggcagcagtgctattataagcaagctgtcgctgatgcagcggcacatacagaagaaaagtaaggacaacagacggcatgggatgcgacagtcagttcttgaaaaacttctggatgggaagaaaaaagttgttgacaaagccgatcgctggtggtaggataaacaggctgtcgcttgaaacaacaacaaagaaaaataaaaaagttgttgacaaagacaaatgcttttgataaaatataaaagctgtcgcaaagacaac

SEQ ID NO: 13095 - DNA, 241 bp, Unknown
  gut microbiota DNA sequence
aattgcgcaaataattggcacaattcacacaatagcggtaaaaactgcaagatgacctacttcgacaaatccgcccgaaatgtgttgacttctgccggcagcagtgctattataagcaagctgtcgctgatgcagcggcacatacagaagaaaagtaaggacaacagacggcatgggatgcgacagtcagttcttgaaaaacttctggatgggaagaaaaaagttgttgacaaagccgatc

SEQ ID NO: 13096 - DNA, 3288 bp, Unknown
  gut microbiota DNA sequence
aacccggttgggaagcgtgttttttctgtctcattgatcggtcacctccttattgtgccggttccggacaataatccgtttccatggaataaatgacagaggcatcatccgcatccgaagcagaacgtgcggtaaacgtaccgtgcagcagagccccctgaggatctatccggatctgaatctcataagttgcgtctgacgaactgcaaagctgccagtttttatcgtaaaatacgagatattctgcagaaccgtctgcattttctgagacactggcatcttccggcagcagagcggaaaaagaatccccggcaagaaatacttcggaaaatccggataccttttccaatgccgtattcagttcctgtgtctgacgactgatcagatgtgcccggacaaaaatctgcacacagaccgctgaggtcagactgaaaaataaaattgcaatgatcagttccagcaaaaacaagctggaacgttttgcaggtgttcctttcatagcattctcctatgcgttacggcgtacttttgatactgacataagtatcggaaatactgccgtctttgtttgtacaatacagatgaaacagtccgtcctgagtttcatcaaaggaaaaacagtccgatgcgagaatcttgcgtccatcggaggcttttgcatcgacaccatcctgaataaaaagctcccgcaggtagccgtcatattcatagagataagtcacataagtctgctccgaataggtctgtcggatcacaatggcatcctgcccgtcaaaagttcctgcatagacagcaccatattcgtctgcctgatgaatcttttccgtcacatacgacagcgccgtgcgactgacaaaagaatcctcagagtcctgcacctgacggctgtaagttcccgaagccagaacaaccagcgcgaccgaagtggcagtcagtacaaaaaagagcgcaagaggaaacagaaaatcaatgacatgtttccgttcagttcgttctctcatgttccttcctcctaacgttcaataactgtaatatccggcagaagattggctccggcaatctgataatctacaaaaaaggaatccgtatcatattggattccacaggtgtctttcaactcctgcagggactgtggatagcgcccttctaatgcataatattgcgagacaccgcgccagagtgcgttttccagactatttttctgctcctgttttgcctgcgcggacagatgggagatcccaccgaaaaacaatccacagacacataaaaatatcagcagtgacagacacagattccgcaggggatgggagcgtctgctgtgataaaatcgttcatttttccgctggaacataccagacacctcctataatccggccatgatgccaagcagcggcagcatgacagacagcaggataattcccacgatcacagacaggataatgacaagtgtcggttccagtacggagatgaaggatgtgatacggtcatttaactcatcttcgcagcggtcagcaatctgatccatcacctcatccatcctgccggatttgccggcaatggaagtcatgcgggcatagacaccggtgaaaactttggatttaactagtgccacggagagatctgtaccctgttccatttcttctacacaatttttgatcttttcacggaaatatgcatcttcgatcaggttccgggaaaactccagtccgcgttctggtgtcagaccactttttaatgcaagtgccatagctcccgcgaaacggcagacagaagatttttctgtgatctctctggaaaaacaaaacgcgtgtccgagttttctaagctgttttcgccctctttcagtacgtgtcagataaatgccggcaatgacgatggcgacgatcaggacaacaaatgccagcgcatagcgggaaagcccgtttccgaccattaaaatgcctctggataaaccggtcatttccgtaccgagctgctgaaatacctgctggaaaacaggcattacttttgtgatcagaatcacaatgacaacaagcatcataatgatcatgatcagcggataggtcagggaattacggatatttttactcaatgtctcctcacgggtgtagtgggcagccagagaatctatgacgtcgtctaagcgaccggtttcctctccaatctctgtcatatggatcagataagccggaaatacatgggtctgttccagggcatcggcgaaggtgtgtccctccagcattgactgatacatgctgttgatcagttctttttccagttcgttctgggtatcttccatcagaagctccaacccttccagtgctgagatacctgatttcaggatcatcgacatctcaccgcagaatgatgcgatctccggataggctaacgatttttgctgcgtctgcttttccattcttttgtatcctccattttgatttcgtgcatatggtttctgtataggttctgataagtacaatatttgaaaaaatagtgtttacaaagctattattttcagagatattgttttcggttatgagcaagtagcgaagcggattgcgaatatccgcttgaccaggtagattaataggtatattttgttacataattgcttccgtcaccgacgtattttttgacattggaagcactgttactggcagccagtgtaggatccatgatggaccagctttttccgtcaaattcaataatattgtccacccatccaacttccgtcacatagcagctgatccatgcgtggtaaacgtcaccggaatagccgacatccaatttggttggaatccgctgagagcggagcattgccgacatcagggatgcgtagtcaaagcagattcccgtgccggaggaaagggtgtcatccggaaccgggatataaccataaggaaccgatgcggcttttttctcatcgtaagtgatattttcgatgacatagttataaatatttgtgatggcatccagatctgtattacaaccctgtgccagttcttctccctttttgacgcaggcagaatcagaattgaaatttacataaaaattcgggtataaaaatggtgaaaatgcatcagagatctgaacgtccaggtcctgtgtaaaagaaaccgcatacagatgatcctctgcagataccgattccagcagcgtgatcttgtacgtgccatttccaccgggaagggggtagacgaaataatcctccgaagctgttaccggataggtgtattctgtgctgtccggcagcgttacctgaactttgaccttttcattgttgccact

SEQ ID NO: 13097 - DNA, 5964 bp, Unknown
  gut microbiota DNA sequence
tacaagcaagtccccacccactgcttattgcttttcgcaattgaagcaggggacttacttgattcggttaaatttttaagtcatccctaaacaagaatccctaagcaagaagttcctgcaaaatcgcattcaccatagccggatttgcttttcctttcatcgccttcatggtctgtccaacaagaaatcccatagccttctttttaccattatggtaatcttccaccgactgcggattctccgcaatgactttttcaatggtctctctcagagccccctcgtcattgaccactttcaaacctttttcttcgacatatttctccggatcaacgtctgatttaaacatctcctcgaatacttcttttgccacggaaccattgatagtacccgcatctaccagctcgatcaatgcagccagatgctccggtgcaaaacagatttcctctgcttccatgctgttctcttttaacagacgcatggtctcacccatgagccagttggatacttttttcggcttgccacagatttttgtagtctcctcaaaaagatctgccatatgctttgttccggtgatgatctctgcatcgtaatccggaatatcgtactctctgtggtaacgctccagcttctgcggacgcagttccggctgacggcttcggatctcgttaatccactcctcggaaatgacgattggtgccagatccggttccgggaagtaacggtaatcctgcgcatcctctttggaacgcattgcatgagaagattccttattgtcatcccaacgacgggtttcctgcacaacttttcttcccatttcaagaagctcgatctgacgctcacgctcaccctcgatagcatgtgcgatcgccttgaaggagttcaggtttttcatctcggtacgggttccaaatttcggtgaaccgacctcacgcacagacaggttgacatcggcacgcatggaaccttcgtttaatttacagtcggatgcccccagatactgaatggtctggcgcagtgtctccagataagcgatcacctcatctgcggaacgcatatctggctcagatacgatctcaatcagcggcacaccggaacggttgtaatccacgatggatacgtcctcccactcgtcgtgcaccagtttaccagcatcttcctccatatggatctcatggatgcgcacctgctttttgcccgccggtgtctcgatctccacataaccgttgcggcagattggcagatacagctgtgaaatctggtagttctgcggattatccggataaaaatagttttttcggtcaaatttgctatatcgggtaatgctgcagtttgttgccagacctactgccatggcatattctaccacctgtttattcaacaccggaagggaacccggcataccggtacaaaccgggcaggtgtgtgtgtttggttttcctccgaactctgtggaacaggaacagaagatttttgttttggttgcaagctctacatgcacttccagtccgatgactgtttcataattcttactcattatcttctcctccttcctacgccagactcagcgggctgtgctgatatggacgtgtctgctcaaaactgtatgctgcctgaataatttttttctcctggaaacagtctcctatcaactgtaaaccgatcggcagtccctgactgtccgtgccacacggaagggaaatgcccggaagtcccgcaaggttgacggaaattgtgtaaatatcgccaagatacatgctgatcggatcctgcaggctctcgccaagctttggtgccgtggtcggtgctgccggtccaaggatcatgtcatattttgcaaatgcatcgtcaaaggcttttttgattaacgctttaacacgcagtgctttcagataatacgcgtcataatatccggaacttaaaacgaaagagccaagcatgattcttcgttttacctctggaccaaatccttcggaacgggattttttatacatgttgtgaaggccttcgtattctttggtacgataaccgtattttacgccatcaaaacgtgccaggttagagcttgcttctgcgcaggcgataacgtaatacgccggaatcgcatattttacaagtccaaggtcaaattcttctacaatggcacctttttcttccagtacttttgctgctgccagtactgcatcctttacttccggatttaaaccttccccaaaataatctttcgggataccgatacgcatgcctttgacatcgtccaccagtgcagaagtaaaatcggtatcatctctttttacggaagtagaatcctttttatcataggaagtgattgcttccagaatcgttgcgcaatcggtcacatcttttgccaccggtccgatctgatccagagaagaaccataggcgatcagtccataacgggaaactgttccgtatgtcggtttgataccggttacgccgcagaaagaactcggctgacggatggaaccgccggtgtcagaaccaagagcaaaggaacactcctcggctgccaccgctgcgcaggaaccgccggaagatcctcccggaacatgctctgtattccatggattttttgtctcgccgtaagcggaagtctctgtggtacttcccatggcaaactcatccatatttgtttttccgataatgaccgctccggcttcctccagttttttcactgcttctgccgtataggtcggtataaagttatataaaatttttgaggaacaggtggtcaaaaggccttccgtacacatattgtccttgatagctaccgggacacccgccagcgggccggtcagctctcctgcatcgatttttgcctgtacttccttcgcacgggcaagggcgccttcctcatctacggtcacaaaactgtgtacctgttcttcttttacgtgtaccgcattcagagcttcccgaacggcagcttccacggtcacttcttttgcttttatcttttttcccagctctacagctgtcaaactcatcaaactcatttccatgtcctccgttcttattcgccgattgtcttcggtactttgaatccgccatctttctgctccggagcattcttcagtgtcgcttcactgccgtctccgtttgtcacaacatcctcgcggaatacattttcaatcggaaatacatgggacattggctcaatgcctgtggtgtcaagctcgtttaagagatcaatgtaatccaacatatcttccatgtctttttttgctgattctgcctcctccggactcaactccagttttgccagaatgccgacatattccatggtgtcatcggaaatgacatttttcatggttccgtcctctgccatcacttttgtgacagatgcaccactggtctgctcctcttcttccggttcttcgtccagtgctacatggctgatttttgcataaacagcggaatccacgatgccctgattattctttgcggactgacgcagggttccttcgtaatccatgccggcttttttcatcacttcaccggaatttggatttgccacatcatgctgtgcccagacacgtccggctccgacttctgccatcagaaaacggatgactgcctccactgcctccgtggtgtagccctgatgccaccaggattttccgatgcagtaaccaatttctgcactctgtacatcttcattcagcgataccacgttgatgcttccgatcggctgctcgatgtcatttacctcgatggcccactgataaaaatcatttttgctgtaatcttcttcccactgctgcagaatctctgtggtctcttccacacttttgtgtggctgccaggtcagatattttgtcacttccgggtcgctcgcccagttgtaatacatattttctgcatcttctatcgtaaaacgccgtaaagtcaggcgttctgttgctattgtctgtgttcctgtatgtctcacgttttttctcctcctatggctctaatctgctcaggtctctcgggaacaaggttgcttcccggacgttatcttctccgatcagctgcatggtcagacgctccataccgataccaagtccaccatgtggcggcataccgtatttgaacgcggacaggtaatgctccattccctctgtctccatgccacgctgggcgatcttttccattaatttatcatactgatgaatacgctgtccaccggttgtaatctccagacctttgtaaagcaggtcaaaacttaaggtgtaggtcgaatctgccggatcatccatcgcgtaaaacggacgtttcttggacggataatgtgtgacaaatacaaaatcactgccgaattcttcttttgcatactgaccgatcagatgctcctcctccggctccagatcgtatggattacggaactgtctgtcatatttttcagccacgcgctgttttgcctcatcgaaacggatcgccggaatctggcttacatccggaagctcgatctgcaaaatatctaactctttcgcatagtcttttttcagcagttccatggtatactgcaaaaatccggtctccatcgccatgatatcttcgaatccgtcaatgtaacccatctcaaaatccagactgttatattcgttcaaatggcgttttgtgttatgtttttccgcacgaaaaaccggtgctgtctcaaagactctgtcaaacacgcccaccatcatctgtttgtaaaactgtggactctgctgtaagatcgcaggtctgtggaaatactccagcttaaacaggttggctccgccctcggcactttttgcgccaagctttggtgtgtggatttctgtaaatccctgactatagaggaaatcacggaagcctcttacgatgccttcctgaatccggaaggtggcacgctctctgatatttctcagagctacggcgcggtgatttaatttggcttccagggaagtattcatcttccatttcgcaattggaagcggcaggctttctgtcggctcggaaaggattttgacctctttcatgcggatctcgaatcctcccggcgcgcgatcttccttatttaatacaccgctcacctcgatagctgcaccttctttgagttccttcaggtcaatggcagtcacgccttcttcatatacgcactgcagcaggccttctctttttctaaggactacaaaggcgacttcgcccatgtcacgcaccgtatgaacggctccgttgacgctaatcgtctgcccatacaggtcagacgccaggatttcgctgatttccatggtctcttttggcattacaccggtcatcattttcattgtttcgtacactccttttgcataaaatgttgtaaggtgcgggacggaacaaactcccaaaaaagcaaaaatcgccctaaggatacgtctttgtatcccaggacgaaataatgttcttttatattattccgcggtaccacccgcattgagaaaaacaatactacaaaacactcatgatctgtgtctttccccactcaggcacgtaacgtgtgcgatccgtacagacctactaaatttctcgttcaatctgtctgctccagagtgttcccttcatctcctccgccaaacagcgttctcagtcggtgacgccgtattcctgtcggtttctgaagacaagagtctccttctacgcatttgctcatgattttgtatcttagcacaacatttttcggtttgcaagccttaatcatacaataatggtatctttttctgtaaatttcatgtgaaaagcattatctttttccataaatacaacccaaattttatttttcattccattcattatctgacatcttaagaaattatttactttttctttcaaaagtttccttattatataatttataatacccaaaaaataagataaaaatctgtttactgcttatttagtaactcataaagcacgttccaatacaaataggaacgttccttaaattcaagtcgaacgcac

SEQ ID NO: 13098 - DNA, 14770 bp, Unknown
  gut microbiota DNA sequence
ataatttcacagcaatggaaatcagcattacaacaatcatcagtacattgcaatccacctctgatggatgaatgacttttaaaatactttcttttgccagagacaagccgatagccacgataatgacacagaccacaagtcccgccagatactcataccgcgcatgaccatacggatgctcctcatctgctttttttgatcccagtttaaatccaagcagactgacaatattgctggacgcatcacttaagttatttaccgcatctgctgcaattgcgatggatccgaataacgttccgataatatattttccagcaaacagcagtacattacataaaatacctacaattcctgccagatttccataggccagtcgaacctttgtatctttcgtgtccttactgtttttcacaaaaagtttcaccaataactcagtcataatttttcacactccctttttcaagaatactcttagcattctttctgcaaatctacactccgttagggacagcgccaatccagagtccatattatttcagttattcctgtcctacctttttttcagtctgcttacctttctttcatatttcttacaaaagatacgcatttctaacttcccgtatactaagaaaagcacctcagatgctgctctgagatgcttcgtatttctattcgtttttatgatagtaaaaaagtcatccaatcggatgacttacaatgcgccttcagggattcgaaccctggacaaatagattaagagtctactgctctaccaactgagctaaaggcgcatacgtctttaacgcaagtgctattataacggatataaaactaaaatgcaagtatttttggaaaaaagttgttatttatgatacgatacgattaatacctccaagtaaaggagcatttactcttatggataagaaaaagcggaccctcatctcctgcgccatgcttgcagatgaggtcaatcatattttacaacaaacggacattgatcttcccgtcatctgggtggaacgcggtctgcacagcacgccggaaaaactgaaccgaatcttgcagcattatattgatgccttgcaaaatcaagatgaaattctgttgacttttgggctttgcggcaacggaaccgcaggacttatcagcaaacatacgctgcttcgtctcccgcgttttgacgactgtattaatcagttactttgcaaaaagcctcgaaccgaacgcaaacagaccgaaacagatgcgatctacctgacccgcggatggacgctggataaagaagcgattttacaacagtaccaaattttatcccgccagtatgaacctgaaatgcgcaatatgatcctacaaacgatgtatgatggctatcacaccttatccgtaatcaataccggatgctttgatttaaaaccagtggaacaatatgcggaccaggctgctgcctgcctgaattttaccagaaatacggtttccggaaacatttccacactggaacatctgatcgtcggaaccaatgatcctaacattttaacgctgaatcccggcgaaatgatacaggcatctttatttgaactgtaatttttcatacaaaataacaaaaaaatatcatttttttatgagatacaataggcaaagtagcttgcaatttaaagcaaaacgtataaaatagaaatgacgagtatattaaattattaatggaggtaaacgaaaccaatgttcaaaacattaatacagaaattaaaagacaaccctcgtacaatcgtctttactgagggaacagatgcacgtattctggaagcttcttcacgtctgcttgcaggtacattcttaaaaccaatcttagttggtaatgaagctgaagttagagctgctgctgaggaagcaggctacaatatcaacggtgcagagatcatcgatcctaagaactatgaccgcatggatgagatggttgcacagatggttgaacttcgtaaaggtaaaatgacagaggagcagtgccgcgaagcattatctcatggtaactacttcggaacaatgcttgtaaaaatgggcgttgctgactgcttacttggtggtgctacatattctacagctgataccgttcgtccggctcttcagcttatcaaaacaaaaccaggcaacaagatcgtatcatcctgcttcatcctcgttcgtccggctgctacaggcgacaacgaagtactggcaatgggtgactgcgcaatcaacatcaaaccgtctgaggatgatctggtagagatcgctcttgagacagctcagtgtgctaaaatcttcggtatcgatcctaagattgctttccttagctactcaacactcggatccggtaaaggtgaggacgttgacaaaatgcgtaacgcttgtgcaaaagcaaaagaagctgctccggatcttgctatcgatggtgagcttcagttcgacgctgctgtatctccgcgtgttgctgagacaaaatgcccggattcaaaagttgccggacatgctaacacatttatcttcccagacatcaacgctggtaacatcggttacaaaatcgctcagcgtcttggtggattcgatgcttacggtccgatccttcttggtctgaatgcaccgatcaacgatctgtctagaggatgcaacgctctggaagtttactccatggctatcattactgcagctttaagctaagttgtgaaaacttgtttttaaacgataggttgtgataaagaaaagaagaaatttacctccgcagctaataatcgcttgctgaggaaaatttcttcttttctttcatttacgttacatatccctatttcatatcgatacttatttttctacaatacttgtaacattttccactatttacaactggaaagtttctttctggcacgcagcgccgtcgtggcgtaaaattttatgattgccgtaacgtaaatagcgtcagtcaggcaatcttacctcggcaagcgattgttagctacagaggtaagattgctgactggcgctttcacaacctaaaattttcatccaccaagcaagatcttaaaagcgcttccggtcccgttgtgccatttcgtacatcatcttctcgcgctgcgcctcgaaatatacgtgcagaacatcccaggaggcgtttgtagccgtcataatcattttatagtctatctttaccttatggtttcttaaatccatcagaagccgatctagctgcttctccgtaaagtcacacattatgatcatgctgcccttcggatactcaccgccgaaatacccaccatcatcttttcccctggcaagatcccccaatgccatatgaaatttcgtcttcgggacagacaccgcctgtattttcattggtgtcagaatctgacggatctcattctcattttcacactgaaataataatactttcgccattttttagcagtctgcctttcctgtaatgatccatggtgccggctgctgctcgaaagaatttttgctgttcaatctggctacggaaatctggataacctcagtatctttgataccgtatttttcaaaaatgccggaaatagatgccgctacgccaaaatctaatgtatagatcacaatgctgatctgcggatttaattttgtcaggtactcaatctcctgctccatacttgcggatgccaccataaataccagtgacggaaccggacatcctttcatcgtctcctcatccacatgatcgatcacctgaatgttgtgcaagccaaaatggtcaatgttctcttccatggtcgcacggtcgtctttgttgtattctacagcgatcacagtgccctctgtagcgatgattgcagcctctaccgcaatactttctccactgatgacacaaatgtcatcctgacgccctacatgcatcttatttaagatgacggaacggatctcgcttcctacataatgaatggaaccacgtttaaaattatggttgtccataccaatcttgtaggtgttacgcgcatgctcatttacgatcagcatgcctgcggatgcgttgatgccacggttgatcatattgctcactttatcgtgttttatctcgcctgcaggctctgagccctcgttataccatacatcgcagtcccccagtcctgcgttccacatccggtaaaaaatatcgtcaattccagcttccgtaaacaccaatactgctttgtgtgactcaactgtcggaatcaggtttttattttttcgggtgatatcaagcatctttactttttccagatcaatggctgtgtttttcgcaaaatactgcagccaggataaaatgctctcgttggtaaaaatctgctgttccataaaaaatacctcccaatacattaatcaaaaatgccttcagcatctaattatgttaattttaccattatcaaaaacacacgtcaataaatccatgcttttcgaatacatcccagaatgttctccgttacagttcactcatcacatgtattcaggtaatgatcatgcttgcatgaggaattagctggatacatagtgatgaagggagcgcctttttatgagcaaaagtagtagcgaagctacggagaagcccgaaagggcattttgcgaatggcgcgtgtgaactgtaactttttgagagagcgcgactggtatggcggcgggaaatcgttgcaatttgcggtgattttcattataatgttggaataggtgggatcgtgatggaaacaagagaaaaggacatgaaaaagatatcagaaaatgaaaaaatgccgcagaccaaagatgtgacagatgaaattgcggtgaaatcaatagaaccggactctattttggattcggcaaaacttgtgccgatcaaagattttgtaagtccggaggaactgcacaaagatctgattcagatcattcgcaaatatcatccgtcagcggatatttccatggtggaaaaagcatatcagatcgcagcggaagcacataagacacaggtgcgcaaatccggagaaccgtatatcattcatccgttatatgtagcgatcattctggcagagcttgagatggataaagaaaccattgttgccggtttgctgcatgatgtcgtagaagatacggtgatgaccgatgaggagatcaaggaagaattcggaccggaggttgctcttttggttgacggagtaacaaaacttggtcagatttcctataaagcagataaggtagaagttcaggcagaaaacctgcgtaagatgttccttgccatggcaaaggatatccgtgttatcattatcaagctggcagaccgtctgcataatatgcgtaccttaaagtacatgaagccggaaaaacagaaagagaaagcccgcgagacgatggatatttacgccccgatcgcacagcgtcttggtatttccaagatcaagatcgagttagaggatctttccctgaaatatctggagccggaggcatattatgatctggtagagaagatcgcggtgcgcaaatctgcccgtgataaatatgtcaattctctggtgaatgatgtggaagtctgtatgaaggaagccggtattgaggcgactgtcatgggacgtgcaaaacatttcttcagcatttacaaaaagatggtaaaccagaataagacattggatcagatttacgatctgttcgccatccgtattatcgtaaaagatgtcaaggactgttatgcggcactcggtgtcattcatgaaaaatacaaaccgatcccgggacgttttaaagattatattgcaatgccgaagccgaatatgtatcagtctttgcatacgacactgatcggaccgactggtcagccgtttgaaattcagatccgtaccgaggagatgcatcgtacttctgaatacggtattgctgcacattggaaatacaaagaagcaaataacggaaacagcatcaacggtgaggaagaaaagttaagctggctgcgtcagattctggaatggcagcgggacatgtccgataataaggagttcatgagcctgttaaagagcgatctggatctgttttcagacagtgtattctgttttacaccgagtggtgatgtcaagaacctgccaaaaggttccacgccgatcgattttgcctacagcattcattccgcggtaggaaataagatgatcggtgcaaaagtaaatggacgtctggtaacgatcgactacaatatccgtaacggtgaccgcatcgaagttctgacttctgcgaattccaaaggaccgagccgtgactggttaaatcttgtaaaaagtacacaggcaaaaaataagatcaaccagtggttccgcaatgagtttaaggaagaaaatattgtcagtggaaaagagctgctaaacaattactgtaaagcaaaatccattaattttggtgatatcaataagccggaatatcaggcaaaagtacagcgtaaatatggattccgtgactgggattctgtattagcagcggttggacatggtggactcaaagagtcacagatcgttaaccgcatgatggaagagtaccgcaaggatcataagaaagtaattactgatgaacaggtactgtttgaggcatcttcttccgaacagaaggaaaaacacgaagaagaagcacgtacttcgcataaaaagagcggaattatcgtaaaaggtctgacggatgtggcagttcatttttccaagtgctgcagtccggtaccgggtgacgagatcgtcggatttgtcacaaggggacgtggtgtatccattcaccgaacagactgtattaatatcatgcagctaccggattttgacagacagcgtctgatcgaggcggaatggcagcagggagccgctgatgaggaaaacggcggtcatggcaaatatctggcagagcttcgcattttcggaaacaaccgtaccggtctgttggtagatatcacgaagatttttaccgagcgtggcattgatattaattctatcaattcccgaacaagcaaaaagggaattgcgaccattgcagtttctttctatacaaaaggtaaagatgaactgagcatgcttggtgagaaaatccgtcagatcgagagcgtctttgatattgagcgtacgaccggttgataggcataaggagtataaaaaatatatggcagatttaagaattgaagaatataacgttggtgatattggaacaaactgttactttatcgtaaacgcggacacaaaagaaatggtaattattgatccgggcggagacggagcagatcttatccgccgcatcaaagagcgtggattaaagttacaggcagttttgctgacgcatggacattatgatcatgcgcatcatgcacgtatggtagcagatgcatttggtgtttccgtatatgcaagtgaaaaggaagaagccaccatgcatgacattcagaaaaatgtatccgcaatgtttggcaatccggagacttatgatgcagacgtgtatacaaaagacggtgatgtgcttgagttagccggattcaaaattaaagtgatttccacgccgggacacactgagggtggatgttgttattattttgacggcaacaaagtgctggcaagtggtgacaccctgttttgtggttctgttggcagaacagatttcaagggcggcagcatgtcagatctggtgcgttccgtaaaagaaaaactgtttaaacttccaaacgacactgcggtattgccgggacatgaggcacgtaccacgattggttacgagaaacagtataatatgtacttagcataatttagtgtaatgatttaaaaggaattttcatgaaacaggtagatgaatttgtatttgtggaaattccttttgtgacgtaaaaagatactataatggataacatttaaaagagattggaaaaggaaataagtatgattacagtacagttaaatgagccggattttgaatatgatattcattctctggtaaaggcgttttatccacagcatgacgtgcttgtaaaagccatgccgcgggaggagttcccagaaagcgtatttcatcttgtggtaaattatgaccggaagaaccacatgattgattttaaattttatgagcgggaacagcaggaaaatggtgcagcagaagaaaaaatgacgctgggcggtagcgttctggttgattttgctgaccggaaaaagacaaaaaatgagttaaagcagcagttgtattatttgctgactctgtatgcaggaaagacacttccctggggaactctgacgggcatccgtccgactaagattccgatggaattactggaagaaggaaaaagtgaagacgagatccgttcttatatgaaagagacgtatttcgcatctgacgaaaaaattgaattgagtctggcagttgcaaagcgtgagctggaattgttgagccgtattgattatgagaatggctacagtctgtatgtaggtattccgttctgtccgagtacatgtctgtattgttcatttacctcatatccgctggcaaaatgggcaaatcatatggatgagtatctggatgcattggagaaagaaattgcgtttacagcagaggcttgcaaacataaggttttgaattctgtatacattggtggaggaacaccgacgacactttccgcagagcagatggatcgtctgttgactatgatcggaagctattttggaattgcggatgaacagggcagaatgatttatgcggatgaatcggcagaaaagcagacacagcttttagagtttaccgtagaagctggcagaccagacagtatcaccagagaaaaactggaagtcatccataaacataatatttccagaatttccattaacccacagaccatgaaagaagaaacactgcgtctcatcggtcgtcagcatactgttcagcagactatcgatagtttcaacctggcgcgagaggttggttttgataatatcaacatggatctgatcgttggacttccggaagagaccatcgaggatgtacgtgagactatgagacagttagaagaactggatccggataacatcactgttcattcactggcaatcaaacgtgcagccagacttcggatgcagaaggaacagtatgagaatctgcacatcgagaataccgcacagaccattgatctgaccgcagaatgctgccatgagatgggactggagccatattatctgtatcgccagaaaaatatggcaggcaatttcgagaatgtcggctacgcgaagccgggaaaagccggagtgtacaacattttgattatggaagaaaaacagaccattatggcgcttggcgcaggtgctactacaaaagttgtttttgaggatggcaagcgtattgagcgtgtgggaaatgtaaaggatattacaaattatctggatcgtgtggatgagatggtagagcggaagcgggaattgctgaaaaactgtggtcagctctaaaaaataattttatagataaaagaatacacctgagaaatgattcgagcatgtatgttttcggagcattttcaggtgttttttataatatttcagccagaaaacccatggtctttagaccgtgggatgaatggcgtcagatatagaatatatatttaccgaaaatatggtattttggtaaaatatatggcataatatacatacagaagttcaaacttcgagtttgcgaaaggagaaaaactgtatgtatcttactattaaacaacaggtaaagcatttgtccaaggaagattatctcaccattaaagaactgtgtcataccgctaaaaaccttgccaatgaggcaatctataatgtgcgccagtattactttacggaaggtgagtttcttaaatacgagaagaattacactcttttaaagaatagtcctaattacaaagcacttaattctaatatggcacagcagatattaaaagaagttgatggttctttcaagtcattttttggtttgcttaaacttgccaagcagggtaaatatgcttttagggactgcaaactgccacactatcttcccaaagatggatatgcgacacttgttatcggttttgtaagactgaatggaaataagttaatacttccattttccaacaactttaagaaaacacacaaggccgttgaaataacgataccgcctgtactgcttgataaaaaggttaaggaaatccgtatcataccgaaagctggtgcaaggttctttgagattcagtacacatatgaatctgaatgtatccaaagaaatcttaataaaaacaatgcacttgcattagatttaggtatcaacaatcttgtgaccgcagtatctaacagtggaaaaacgttcatcattgacggaagaaagcttaaatccatcaaccagtggttcaataaagaaaatgcacgtttgcaatccataaaagataaacagcattttggcaaaaagaccacaaacaggcaaaaagcgattgctcgtgaccgtaacaacaaggtcaatgattacatgagcaaagttgcacgcaaagtcgtagattactgcgttgccaatgacataggaactcttgtagtcggctataatgaaacattccagcgaagcagtaaaataggaaaacaaaacaaccagaattttgtgaacatttcttatggcaggctgcgcagcaaactgaaatatctgtgcgaactgaacagtatcgtatttgaaaaacaggaagaatcgtatacatcaaaagcctcattctgggatagagatgatataccggtttacaacgctgacaatcccaaagagtatcagttcagtggaagcagaatacatcgtggtctgtacgaaacggcaggtggcaaaacagtcaatgcagatgttaacggggcattaaacatcatgaaaaaaagtaacgttgtggatatgaatatcctatacggtagaggcgaagtggatacgcctgtaagaataaggattgcctagcttggctaggtggaaacttaaatatcaaacttcttaaacagagccgtaaggctcttagaagcccattacctttaggtgatgggtagttcacaagcaaactgtacttaaaaaacacttgctatatcaaactcacaaacgtataataaactatgtatgtgaacacagaaaaagtgaagagatctgtgtttggcaatggatacgaaaacagacatcggatatctgttttttaggaatataaaatacagagcaatctgtatggaatggaggatatacagtggctttaaagaaaaaaccggtaaacggtatgaaagatattatgccggatgagatgcagatccgcgattatgtacagagcgtgatcaaagagacttatcgtgcattcggatttaccccgatcgagacaccttgtatggaagatattgcaaacctgagcaacaagcagggtggagaaaatgagaaactgatcttcaaggtattaaaacgtggtgagaaattgaaactggagactgcacagagtgaggcagatctggttgattttggtatgagatatgatctgactgtaccgctttgccgttattatgcaaaccatgcaaatgatctgccgtccccgtttaaggcacttcagatgggaaatgtatggcgtgcagaccgtccgcagagaggtcgttatcgtcagttcatgcagtgcgatattgatattcttggcgagccgtccaatctggcagagatcgagctgattcttgctactacaaccacacttggcaaacttggattcaagaattttgaaatccgtatcaatgagcgccgtatcttaaaagcaatggcggcttacagcggatttacagaagaagagtttgataccgtatttatcattctggacaagatggacaagatcggtctggaaggcgttgcagaggaacttgcaaaagaaggttatgcacaggaatcaatcgataaatatctgtcactgttcactggtgtagagcaggcagaagatggcatcagctatctggcagatactttaggtgactatctggatgccgagatcgttcagaatatgaaagagattgcctccgcagtaaatgcaacaaagacagcatcctttgagctggtatttgatccgactttggtacgaggcatgtcttactatacaggaactatttttgagatcgcgattccggagtttggcggaagctgcggtggcggcggccgttacgacaagatggtcggcaactttaccggaaaagatgttccggcctgtggtttttccatcggatttgagcgtatcatcctgcttctgatggagaatggatttaagattccggagcagccgaaaaagacagcatatctgatcgaaaaaggatatccgggagataaactgagcgaagtaatcggacaggcacagcaggctcgcgcaaatggtgagcaggtactggttgtccgcatgaataaaaataaaaaattccagaaagagcagctttccaaagaaggttatgaagagtttgtagaattttttaaataggaggaaaaagttatggcagagtccatgtgtggattaaagagatcccacagatgtacggaagtatccagtgcggatatcggaagtaccgttactgtgatgggatgggtacagagaagaagaaatctgggaagcctgatttttattgatctgagagaccgttccggtctgcttcagatcgtatttgatgaaaatagtgtaggaacggacggatttgcaaaagcggagacactcagaagtgagtacgttatcgcagttgttggaaaaattcagaaacgttccgcagcagtaaatgagaatttaaaaacaggtgatatcgaagtgatcgcagagagcctgcgcatcctttctgaatccgatacaccgcctttccatattgaggagaattctcagacaaaagacgaaattcgtctgaaatatcgttatctggatcttcgtcgtccggatttacagcgtaacctgatgctgagaagtaaagtggcttatctgatgcgtgatttcatggcaaaagagggctttatcgagatcgagacaccggttctgacaaaatccacgccggagggagccagagattatctggtaccgagccgtgtgcatccgggaagtttttatgcacttccgcagtctccacagctgttcaaacagctgctgatgtgctccggatatgaccgttatttccagattacaaaatgtttccgtgatgaggatttacgtgcagaccgtcagccggagtttacacaggccgatatggagctgtctttcgtagatgtagatgatgtattagacgtaaatgagcgtctgttaaaatatgtattcaaagaggcaatcggtgtggatgtacagattccgcttccacgtatgacatggcaggatgccatggaccgttatggttctgacaaaccggatacccgttttggtatggaattacatgatgtatctgatgttgtaagaaactgcggattcggtgtatttaccggcgcattggaaaacggcggaagcgttcgcggtatcgctgttccgggtaaggcttccatgggacgtaaacagatcgacaagctggttgatctggcaaaaacatacggagcaaaaggtctggcttatctgtgtgtaaatgaagatggcacatacaaatcttcttttgcaaaatttatgacagaagaagaactggcagctttagtagaagctaccgaaggaaaaccgggcgatttgctgttattcgctgctgataaaaataaagtcgtatgggcagttcttggcgccttaagacttcatatggcaaaagaactgaacctgctggatccgaaccagtacaacttcctctgggtaacagagttcccgttactggagtggtccgatgaagagaatcgttatatggcaatgcatcatccgtttactatgccaatggaagaggattgggataagatcgattctgatccgggcgctgttcgtgcaaaagcatatgacatcgtattaaatggtactgagcttggcggcggttctgtccgtatccaccaggatgacattcaggagaaaatgttcgaagtacttggatttacaaaagagcgtgcatgggatcagtttggtttcctgctctccgcattcaagtatggtgtaccgccacacgcaggactggcttacggcttagatcgtatggtaatgcatatggtacatgcagattctatccgtgacgttatcgcattcccgaaagtaaaagatgcttcctgtctgatgacagaagctccaggtacggtagatgagaaacagttagaagaacttggacttgcaatcaaacttccggaagagacaacagaagaggagtaattgtaaaattgcataaaaatgagtaaaaagcgggagtggaaaatctgaggattttctgctcctgctttttgcatgccttgaaaataaaggatttgtgggaaaaaatgcgtgttgtgcaatttgtatagtgtaagaaatgcagaaaaatttatggttgacggtcagggggaagtggtatatattcatgctatcgttcttcaaacaaatctgattcagataaaattgcatagttatcagagtggtgatatcttacgagcagtctaaatattgttgcaccgattcggtaaatatcaagaaaaacagagtgatacattgtattagttaaactatgaaaataaaaagagaagaaggctaatgaaacttgaacgcagaataagcatttccccgattcaagcgcgtagagcactaagcggtgggtaagggggatgcttataccagtgggagttaaaagctcccactgacaggtcgcaaagcgactgcgttcatgagcaagtagcgaaagcggat

SEQ ID NO: 13099 - DNA, 5796 bp, Unknown
  gut microbiota DNA sequence
aatatgtaaatatttcatatggaggaggttgtttgcatgacaaaaaagttacgagattattttcctatgctgcagaccagagaagtaattttgaaagaaatcaataataacgaaaagatgtggagtacgttttattcgtgggaagaagaacggcaggaggaatttcttgatttttgcactggagcgcggggagtaaaagtgatgtatgattttgtgagtaaagagattttgaatccagagtcaacaccagagcgtattgatgaattattgtctctgttattaaatcaggaggttcatgtgatggaagttttaccaaatgatggaacacgattggcagatgaatcatcacttgttattatggatattgtagtgcagctttccgatggcagcattgcaaatctggaaattcaaaaaattgggtataagtttccgggagaaagaagcgcctgctattccgcagatttgctgttgcggcagtataagcgggtgcgaagtgaacgaaagaaaaaattcagttacaaagacatcaaagatgtatatacaattgtgctgtttgaaaacagtcctgcagaatttaaaaaatttccagatgtatatattcattctttcgggcaaaaatcagattcgggattggaatttaatctgctgcaaaaatatgtattcgtagcgcttgacaattttaaaaatattcagcaaaataaagaaaataagtatctgataaacagtcgacttgatgcatggattgcgttcttttgtatagatgatccggaaatgattgttgcgattatcgagcagtatcccgagtttagagcatactatgaacaaatctatgacatctgtcgaaatatcgaaggagtgatggatatgttttcgaaagaattacaggaacttgaccggaatactgtgcagttgatgattgatgagatgcaggaggatttgaaacaaaaaggaaaagaactggatcttataaatcagaaattaggtgagaagaatcaggaactggatgagaagaatcaggaattgaatgagaagaatcaggaattgaatgaaaaaagtcaggaattggatgaaaaaaatcagaaattacaggcggctttagcgcgtattcatgagcttgaagaggaaaagaaaaaagcaaatcaataagatggaaaatgaattcctaacagaaagccggcaattgccggctttctgaaaaatatgctaaaactatactattcataatccacccggaaggctgcaaagtccagatcagtttcagttccgtctttaagatgaacataaggtgtgacttccagagacgtgaagtcctgtgttaatgctggaagcaaaatattagtctggaagcaataatttccgtcatcatcaacatatgtgctttctccggaattattccaatgttcatctccggagtcgtttgagtcaaagtagacggaggagaaggtctctgaatctgtctttgtatcaaagatatttccattggaatcgataatgtggcagtaaatccagttatgaattgtatcaccggaaatgatcttatcgaactgatcataggaagctttatccttgccaaaattccatgtcagactaagataagttccggaggcagaagtcttgctttctccaacagttaccgttgcaccatttgcggcagatgcagtgattgctggtttgacattggtattaccggaaatataaaagctgatcgtctgcgtgtagaaatatccggttttgggatctctgacggttgtcaatggaatctgtactttacagttgtctggaagatctgcatcggaaagttccactgtagcatgaaatgcaccgcgtttatattgtggatcaccttcgtcaccatagataccgttgatgtcccaggtagccagataaactgtatcattgataacaatacggtcaggaagaaaccagtctccaagtgtaattagaccatattcggttgcttcgccataaatggaaagcagaccgccatcataataagcatcgatcacattcatatacggggttgacagtttttgatatttaccgtcctgatcatacagttctaacataacatccggccaggtatcagaaaaagtagtaacaagaccgctttcttctgatacaatcgttgctggtgccacagaatctgtcgtgtcagaagcagcagatgtttcttcttcggaagaactttccggagtagtgatacgtcctgtttcctgcaaatactgctgtgatcttgcctgatactgtttaattccggcataagcgccggtggttcccatagtagcgcatacaataattacggcagcaacttttgccggcatccatttctttttggattttataggagaaatattttttttctgctgttcctgagctacctgattaacaacaagctgtttaaaatgttccggtgtttttggaaaagtttctttttcatattcgaaatcattgtgtttagagtcgtgattcatatggcggcctccttttcaaacattgttcgtaactgaagttttccgcggtttaaccgcatttttatggcactttcactcatttccagaatgtctgcaatttcccgtattttaaatccgtcaaaatagtacattaccagtggaagacggtaggaaatatctagctgcatcagatgctgatacaggtctgagtaatcctgctgtgcggcttcttcggtcagtacaccttcctcataagtgacttcccgtttgcgtttccgcaggatcatctgacattcgttgatcaatatgcgtgaaaaccatgttttggcatattcctgtttttttagtgtgtgaagttttgaaaatccttttacgatggcagacgacatggcatcctcacagtcggcatcctcttttaaaatcgcctttgcaatgcggtagaagtcatcggtaaaagaaatgatcaaatctccgaaatcctgttttgtcataacttccctctttttatctcaatatgtttttataaatgtgaaatgagatttttatactctgtaatagctattacacccattagatgcagtttaacataaaaaagtcacaaacatatgataagaattcatctcagtctgagttgagactcccacttctgcaagtggtgagtagtaacaagtatttctcagtgggagttcaatctccgactgagataaatgctccgcgagggcgcacattgtctggaagacaatggttttgcgccgaccggaacggagtgtagagtgcagtgattctgaaaagaagatgtcagcttgcgctgatcagaatcacgcaccaagtctcacgtgcgttcgacttgaatcaaagtagatttgttctccttgttggtttggtttccggcagaattggagacatgtgcagaagaattatgtcatgtgttacacaatgtgcatgttgtgataaaaatgatgatggcatttgggaattttacctgcaatttacagaaatctggttctggattttacccggtggtcataagctgaaaatgttgcaaatctgagaaatattttttctggaaagttaatcagaaaaaataagtcataaatcagaaatccacgcatatagtatagagtgggctaagaaaggagagatgtatatttgaaagaagaaaaagaaaagagaattgataccaaaaaagaaaaagagataaaaacaggggacgtgacaatgcatgaaacagaagaacctgccgatgtgtttccggagaaaacaggggataatctgatatttctggatgatccgaaattacgaaaagaatatctggattgtatgagatatctgctgacgcagattacagattttggatttgcgcaggaagaagaactgggacgcagcattatcagtcatacaaaatatcgtttaaaaacaagagagagtattctggcaaagatggagcgtaagaaacgggaactgacagaggaaaatgtatttacttacataaatgatctggcaggaattcgtgtaatctgtctatttctggatgatatctaccgggtgagagattttgtccgtgaactaccgggaattacaattgtaaaagaaaaagattttgtgaaaaaaccgaaaaacagcggctatcaaagcctgcatatgatcgtgcaatttgctaatggaaaaaaagttgaaattcagttgagaaccatcggaatggatttctggtcggtgctggaatatcagctacaatataaaaagcatcataagaaaggaaaacaattgaaaaaggagctgttttcctgtgccattgatgtaagaaatatggatcagcggatgctggatctgagacagtcaattgaaaacgtataaaaaggtgtgccttccaggaaagcacaccttttttattactcaaagtcaggggaatgggtacattctctttacctgcttcaatgtattcatttgttaaactgtaatcgaatcttaagcctcaattggttttagatcgtcagcgatgatcagttttgcttctgtagctgcctgaatctcttcaacagtgaattccggattgtactcttttaatacgattccttccggagttacttccataacacccatctcagtaacaatcaggtttacctgagcttctgctgtcagaggtaatgtacactgttttaagatcttcggtgcacctttctgtgtgtgctccatagcaacgataactcgtttagcacctactacaaggtccatagctccacccattccaggaaccatttttccaggaatgatccagtttgcgatatttcctttctcatctacctgaagagaaccaaggatcgtagcatctacatgtccaccacggatgatggagaaagatgtagcactgtcaaagaacataccgtctttctcgataccagccggttgtccacctgcatttacgatgtatgcagcatccggatcttccggatcaacagctgcaagaccgatgaatccgttctcagactgtaatgtaagtttaacagatggatcaaggtaatccggaaccatagtaggaagtccgataccaaggtttacaacatcaccatcatgtaattctttagcgacacgtttcgcgatatatggtttgatttcgcttctttccatcttatgcttcctcctttactactaaataatcaacataaatgtgtggagtttccacatagtttggaccaatctcaccagccggaacgattttctcaacttcagcgataacgatatcagctgcggaagccatcatcgggttgaagttacgagtagatcctttgtaacggatatttccggattcatcagcaatatatccctggatgattgcaacgttaccacggattgctttctcaagaaggtactctttaccatctaattcgataacctgtttgccttcaagagttgtcggtgaagtgctgtcagcaacgatagtaccgatacctgttggtgtaaggaatcctgcaaggccagctccgcctgcacgtacctgctcagcaagtgtaccctgtggctgaagttttaattcgatctcaccagcattgaattttgctgcaacttctttgttcagacctacgtgtgtagcgattaatcttttaattaatccgttgtgaagtaaacgacctgttccttcattttcgaaacctgcgtcgttacatacaactgtaaggtcttttgctgttacttcgtttacgatagattttgctgttccgtttgtcatgaatccgccgactaatactgtatcgccatctttgatcagtgcggcagcttctttagcagaaataacttttgttctagccatttctttccctcctattaattacatgataataattattgtgct

SEQ ID NO: 13100 - DNA, 6167 bp, Unknown
  gut microbiota DNA sequence
aaccaaacaatgagttgtattgatacacaatttcaggtagacgaaagtaaatgcgtcggctgcggtttgtgccagcttgcctgtccgtctatgctgattgagatgaatgaacataaaaaaccaggcctgaaaccggtaaaaagtatggattggtacggttgctggggatgtcagcattgtctgactgtctgtccgaagggcgcaatcagtgtacttggtaaaaagccggaagacagtcttcctttaccgagtgatgcgatcgctacggatctggagcgtctggtctgcagccgccgttcctgtcgtcattataaagatgaaaatgtagatccggagcttttaaatgaactgcttgcagcattggaggcaactccgactggcggaaataagcagaaaatggagtttaccgttattgatgaccgtgcagaattggacaaactgcgtaagatgatctgtgaaggagtggaagatctgaaaaaacagggaatttatccgtattcctgggatgcagagtcttatggaattatggaagatcgtggaccgcaggctatgaacggagatatttatttctgctctgcatcacatgtcattattccacatatgccaaagaaatttggttccgctgcagtagaagtgggaattacactggcttattttgaactgttatgcgaatcaaaaggacttggctgcgtgtaccttggtttcccgatgaatgttatgaaactgctgccggatgtatgggcaaaacttggcattccggaagatcacttcgtggcaacggccatgggattcggttatccgaagtttgactatgcccgcggtgcacagaagagtggaaagcaggcaattcaccgcttgaaattctagcaaaacgcaataagaaaagaacgatacagaggaacaatatcaaaaagcaaatgatattgttcctctttttattgacattattcctgaaagtgagcatgctataaatatatatataagcaggataaacagaaatgagatcaaaatatattattatgggtaccagaaagggttaaatcaggaggggaaacatttgcatttttatattacaggagatacacacaaaaaatttgaccgggtggaagaattctgcctggagtatcacactacgacagacgatgttatgattatccttggagactctggtattaattactggctgagtccgaaagatgaaaaactaaaagaacgtgttgccagaataccgattacctgtttctgtatacacggcaatcatgaaggccggccatgggaatctccggcggattacaaactggtgccatggcatggcggtcttgtatacaaagaagaaaaatatccgaatattttgtttgcaaaagacggggagatttatgattttaacggaaaatctgtgatgccgatcggtggcgccggtacggtaaacaaggattatcgcatcagtcatggacttcagtggtttgcatcggaacagccggacgatacgattaagcagtttgtggagcaacagctggaaaaagctgggtggaagatggacatcattttgtcacatactgttccaattaaggctgagccaacctgggcgttcaagccgcgaaaggaaccgattactgtggataaagggacagaagagtggctgcagacggtttatgatcgtttggatttttcagagtggtatgcaggacattatcatgtggagacagaatccatggggattcgaattatgtttgaggattttgatgagatatagctggataattaatgaggagaataaaaagtaaaccaatgggttaatgattagaagagaaaactggagtatacttgtcttataaacagaatttgtggaaaatcgttgcatattttagagaaatttataaataacaggccggagtgtaatgatatgggaagagatacaaatgtagaaatttttagagatactgtggatttagtaaaaacaaatccagctttaagagcggaagtagcagcttcaacgaagaaacaggaaataattttagaaacagataaagtagaggttccatcactaagcaaatatacagaaaatgtcagagtaattgtttcgaaaaaaagaagctttgaagcagcaggggcatatcggggaaaaaaagttgctgttcttaattttgcatctgctacgaatccgggtggaggtgtaaccagaggcgcatctgcgcaggaggaatgcttgtgtagatgttcgggattatattctagtctgaatgtaccggaaacatgggatctcttttataccccacatagaaaatcaaaaaatccaattcacaatgatgatattatttatactccttcggttacagtatttaaaacggatactgttaatccagcattgatgcaggaaaaggactggtacaaagttgacattatcacttgtgctgcaccgaacttgagagaaaaaccaggcagcttgcaaaatgtatgattcgttatatatggagacacggggggagggaaagggtattgcatttttacataacaggggatacacacggaaattttgacagaatcgaagaagcgagaaaagaggttagagaaaaatgaaatattatatcagcgatctgcatttgtttcatgaaaatgcgatccattttgaccagcgtccctttgagtcggtgcagcagatgcatgatacgattttgaaaaactggaatgaccgggtgatgaatggcgattatgtgtatattttgggtgatgtgagcatgcggggcaaaaacgaagacctgattgcatttgttgcacgcctgaagggcagaaaggtgctgatcaggggaaatcatgatgatgtatcggattatcgttatcaacagctgtttgcagaaatttgtgattataaagagattcatgattctgttggaaaagaaaagtttggcttggtgttatctcattatccgattttttcatggaaaaatatggggcgtggaaaaattttattatatggacatacacatgtgagtgcagaagatcaattttatcagcagtgtttaaaacagatgaaagaaaatgactgccgtcatgtatatgataaagatttgagagcattcaacgtgggatgtatgctgtcttatatggattatacaccacgaaccctggaggaaatcatgacaggcgcagaaaagtagagttggtaggtacttttttatgaggagaaatatattatgtcaaacaaaacaataaaacctaaacaggaaaaaatgatagaacaggttatagcgactatggctgtagaaaacatgatgttatcacgcgattgctacaaaaatttatgggctatggcatctggtgaaaagactcgtgaacagattactcatgagattaccgagaaatacaaaaagaaggtgttagaaacgggatgaggcttggtgttatcccattatccggtttttctggaatatgagactgagcagagtagtagcaattctgctcagtcttttgaaaaattatttagtcgaggtgcatggcagggtgttatgactggatttaatttttcctgcgcagcatctgtaatacccggtcgattcgttgctgttcggcgggatttaatccttgtcgtaaatgttggataataaaatcggtttcgtctgtggtaaacgagagattctgatttttggcttttgtgacaaaattcataagaaatgccatcatatctctggaagaatttggtttttcctgattcatgaaattcatgagaaatgccagtttttccggtgatatgttctgaaatgccggattttgtgaaaaaaagttctgatccatgaaaaatgctccttttacaaatttaaaattccagtcacggaggtaatgtcgagaatatttaaaatcatatctatctgatcccgttcctggggtgtacagtattcccgtagtacgtttaaaatctgatgggtacgctctgtggaagattcattggaacagattcgcaattcctgtgcctgcatttccggggctgcatcaaaaagctgcatggtacgctgcaattcaatcattctgaccatcatggagatcatacgctgctgtggaccatagaggtagggcacaatggcttttaacatctgaatcggtctgttttgaatcaatgtatccagtacaggtggcgtatgtccggtttcatgttcattcatatgaaatatcacgtccatatctgatgttttttataatgtatgaaaaaaatatgcaattatgagtaagaatttgcgttccataaaaggatgttgaataaaaaagacattgtgattgtggggaatatgatgaagcatttgaaaatatagcgcgaaaggaaaaaaagggagttggatgtgatataaggcaggcaaaaatggttttatttcatataataatagggaatccatgatgaaatatggagaacatagcatatgggaaaattggtctatgacggtaaaagcgtttatgaaatagatgaagactgcctgcggaaaaaggaagaacgggaacggcaaaaagaaatggagtggcaaagaaaaaatctgaaacaaccacccggagtaagaaggcagatgaataaaacaaatgaaaaataaaaactaacagtattagctaaaattgatttcatatataagaggagacagaaagaaccggaggcatcatagcccccggtttttgtcgtaccaagatgtgtagtcagatttgattttgacttagaagcagccacagccgtttccgttgttgtttccgccgcatccgccacagcagcacagaagcaggatgatccagattgcttcactgcagccatttccacccaggaaagagccattgccatttccgcatccaccgcagcagcacagaagtaagataatccagataatgttgttgcatccgcatccgttgtcgttagagcatccacagtttgtagcagctaaatcactcatgttgatagcctccagatttttatttacaattcatagtatgtatgcggcttgtcagtgtttctttaaaaagaaataaattttcgaaaaattgttcattcatgcagatatagcatacctgtttttataaactctgataggaacaaaataaggaaacagaatatattaagaaaaaattttatactttaacttgacaaagtgataacaagaatgtattattgtatgcaatgagagcgattgcatacaatctaatatattgtatacgagtatataaggtgaggagcgaataacatgcgtaaagtagtaatgaataagcataataatctgttacagctggaagaacatttttatcagctggttgatgtagatgaaccaaatacatttagaaatctgtttccgtatgaagagattccgaaaattgcgttcaacgaccgaatcgtaccgcataacatgccggacgatatctggatcacagataccacatttcgtgacggacagcagtcaagagctccgtacactaccgatcagattgtaacgatctatgattatctgcacaaattgggcggcccgaaaggaattatccgtcagagtgagtttttcctgtacagcaaaaaagaccgtgatgcagtttacaaatgtatggaacgtggatataagttcccggaggttacaagctggatccgtgcaagtaaacaggatttcgaattagtaaaagacatcggactgcgtgagaccggtattctggtaagctgttccgattatcatattttctacaaaatgaaaatgaccagacgtgaggccatgaaccactatttgagtgtcatccgtgagtgcctggagacaggtatcagtccacgctgccacttagaggatatcacaagatccgatatttacggtttcgttattccattctgtgtggaactgatgaaactgatggatgagtacaagattccgattaaagtgcgtgcctgcgataccatgggatatggcgtaaacttcccgggtgccgttattccgcgaagcgtaccgggtatcatttatggtctgacgacgcatgccggtgtaccgtctgagttgattgagtggcatggtcacaacgatttttacaaggcagttacaaactctaccacagcatggctgtatggcgcgtgcggtgtcaactgttctctgtttggtatcggagagcgtaccggtaacacaccgctggaagctatggtatttgagtatgcacagctgaaaggtacattagat

SEQ ID NO: 13101 - DNA, 1595 bp, Unknown
  gut microbiota DNA sequence
agtgggattgcggtagccttatttcaatatagactctgtcagttctttcggcgttgacacaatctgtattgctccattttcttttaaaaactctgtagatttgaacccccagtttacactgacgcacggaattcccgcatttgctgctgtctggatatctacttcagaatcaccaatgtaaatacaattttccggtttgacatttaattcacgcattgcctgaaataccgtatccggagctggtttcttatgaatagcaggtgactcaccgatagcaacttctatttcatccgcaaagaaatctttgcaaagtccttttacagcagcatcaaatttgttggaaacaatagccagtttatagccatgttctttcaacgtatgaagcatatcaataatcccatcatatggtttcgtgttatccagcatatgttctttgtaatgcaccggaaaatctttcatgcaggcatcataatttggattactacgtccgtccggcaatgctttttccatcagtacataaattccattgccaactttttctctgatttcttcgcatgtataaacaggaccgccatattttttcatacaataattcacactgttggtcagatcctgtattgtatttaataatgttccatcaaggtcaaatattgctgtatttcgtgtagacatttcaagttcctcctatgtcactttagccatattaaaagcgaattgaattaatccgtttgatttcgttgccattctagcagaaaaaaaaagtttcgtcaaaaatagcattcagagtcatttaaaaaatttactgcacgaaatggatcttcccgatacttcttgtcagtagtctctttcttgaacatggaaaatttcatgtacttttccattccgtgctgttcacagaagatgtaattgttgtaagatacatgaagcggagattaactttacactgatcctccagttcacgcaatgatatatagccattcgccataaatccgaacaaaactgttttcaacatgctgaccgggtcatatctgagtcttcctgtataatgttgaggaatatttttcagatatttctccagttcgatttctcccataaatctgtcaaaagtcagcactggatcacagatgtccaaataatcttgaattatcattggcaaaactgcctgttttgggttagaataaattgtgttattattttttttacaaattaattataacagaaagaaagaccttgagttcattataaactcttggtctttctttttttcgggactattcttttttcacagccccttaaaattattccagatactgtcgcagtgctgtcacatattcctgaccaagtttactcaaaatcagattttttctggtcacatacccaatctccatctgattttcttcctgtgaatcgtcaaaccgtccatcattccgaaacggtaccgcacgataatcactgccgtttaattcttcacagatcagaccggaacacaatgtatatccattcagtccaatcatcagattcagcatagttgcacggtcatttgcatgaatgatctgactgtattcatctcagtctgagttgagactcccacttct

SEQ ID NO: 13102 - DNA, 17454 bp, Unknown
  gut microbiota DNA sequence
atgaaagaaatgagtatagaaggctcagagatatccgataaataaaagcgagagggttaaaggggaaaatatgattcagacagaacaggtaatacaggaagtaaaaaaaatgattaaaggaaaagatacatctatctgcaaagtgtttgcggcaatgttggcgggtggacatattttgatcgatgatgtaccgggagttggaaaaacgacactggcggttgctttttcacaggcgatgcagctggaaaatcacagagtgcagtttacaccggatgttcttccggcagatattcttggcttttccatgtatcagaaggagacaggacagtttgtgtattatccgggggcggtgatctgcaatctgtttctggcagatgagattaaccggacgagtccgaagacgcagtcggcgcttctggaagttatggaggaagggtgcgtcaccgtggacggagtcacacgggaaatgccggagccatttctggtcatggcgacgcagaacccgaagggcagcgccggtacgcagcttttaccggaatcccagctggatcgattcatgatctgcgtcagcatgggatatccggatgtggcgacggagatcgagattgcccgtggaaaaagtgcgtcggaggggcaggagacaatttccccggtcattgatgcggcaggtttgtgtgaattgcagcgagtagccggagaagtgtttgtacaggatgaaatctacaattatattgtgcagctggtgacggcaacccgtaacaatcagtatattgatctggggttaagcccgcgcggtacgattgcatgcacaaaaatagcaaaagcatgggcttttttacagggaagggattatgtgcttccggaggatgtggaagaagtatttccagatgtggcaagacacagaattgtgctgaatacgcgatcccgtgcggcgcatgtgacggaacttcaggtgattgcgcagattttaaaagaagtaccgcaaccgacggcgcagaaataaaagtgcgtaagaagtattctatgtaatggtatggaatggaacattgaatctgaaatgtacttggaatgcatttgataggaaactgctatattcgtaatttatctcagtcgagaagactcccacttctgcaagtggtgagtaataacaagtctttctcagtgggagtacaatctccgactgagataaacgctccgcgggggcgcacattgtctgggagacaatggttttgcgccgaccggaacgaagtgtagatgtgcagtgattctgagaagaatatgtcagctttcgttgaccagaatcacgcaccaagtctcacgtgcgttcgacttgaattatagagaaaataaggaatagcaataaagatagtttttggagaagaatttatggggcgtttggggatagcgatagcagttattgtatggctgttttatatgtcaatgatctacggaagtgcagccatggcactggcaggatttgccttgatcttttttatgatcttcagctatgtggagctactctggctctggaaaaatagcagtgcgcggctggagattccacttgcaatggcttcacagaatgaaaagattacgataaatctgccggtggagacaaaaggaaaattacagccgggaaaagtgcgttgtttgctggaagtgcgaaatacattttccgggaaaaagaagaaaaaatggtttttgggaaatgcagcgtatccgtatgagctaaaacaagcgggaagatatgaatttggactgaaaaaagtgcggatttacgatttgacaggatttttttatgtggttcggaaagtaaaaaaatgtgtatctgtggatgtgttaccggaaatctgttatgtaccggtgcatctgacggatgcggtgcgcaattttttcggagatgcggacaggtatgatgaatttcgaccggggtatgatccgtcggaactttttgatgtgcgggaattccagcggggtgaccgtgtgcagaacattcactggaaactgagtgcaaaagcggatatgtggatggtaaaggaacacagtatgccaaaggcatgtgccattacgatcctgacggattttttaggaaagaaatctggtgcagaccggaatgcatacctgaaactggtggcaggtctgtccttttccctgatggatcagaaatgtgcgcattatgtggcatggtacagtgaggaagatgcgggaattgtgcggagcagagtggatgacgaggagagcttctatctgtttttgtaccgctttttaagagcgcagacgcagcagaaggtggacgtggtgcagatgtataaggaaaaatgccggtatgaaaatctggttcacctgctggtggtaacaatggatctggaaattaaatgtgaggatgaaattattggaaaagcggagaaagaaaaactcagcaagtctatgggggaaatggaactggtgctgtaacgttgttttacaggcagttttttcgtgtgtgatcgcgttagtggtgctgtggagtactaaacggctggtgaccgcgttatttccagtgttgcagttttctacctgggtgtttgtatttggcggagcagtggctgcaggaagcagcatatggaataccgtatgtagtgagcggtttcagaaaaaatggttgcggcatattggaaatatgctgctctttgtgattcttgcgattgtgctgcttcgggtggcatatgtgcatgcagatcagctggagcaggggttctggtatgtggaacagttgatagcagaaaaaatcaatcattataaagaaatcagtgatgtggttcatgatgctgcaggcagtggaactgtggttgttgcacagggggcaaatgtcctggaagcctgtgggattatgttcttgaatctggcggcatcggcagttttccttgttttacagacggtatcggcagagcggaaaaacggtatctggatggcattgctgccagtagctgttgtgatatttggacttttcgtggggaaaggaccggattttgcaggacttgccggaaccattgtctgcctgatcttgctggcttctgtcagttggaataagaaaaaaaagataggaatgagcagtctgctgaccggcatgcttgtaggttcgctggtgctctctgtagcggtctgctccgtggcggcggattggtttgcatcgaaggaaaatcaggtacttccggtgcagaaaaaagtagaacagcagattgcaaagctgttttccggtgcttcggatgtgcaaaatggcaaaatttccaatcagtatccggtgtataccggggaagaagtgcttcatgtgcagacggatgaaaaaccggaagatactttatatctgaggggaacctatgcggacacgtataaaaatggcaaatggacaagggaaaaggaatttacgctgacagcagatcagttttcccagtatgaagattgtcaggatctggatcctgtaatggcggtggcagatgaatccagtcggaaatatctggatcttctggaaagcggctccagtctgataggatatggactgaaggagacgctctatgatatcgagtatactgggttaaaaagcgacattatgtacctgccgtatggtctggaaaccgatacgctgacatgggagtatacggcagaaggagattatcagttccggaaaccgaaaaatatgttggataccagcgtgattgcggcaggtggaagcgcggaagaattgtggacagatgtgatgctgtcccaactttattataacagtgatcagacattttccaggtacgatgcattttataatgcatataaccggtatgtgcaggaaaattatctggatgttccggagaatatgcctgctttggaaaaagttgtagctgaacttcacggattatatgtggatacagagaggatgttgaatgatccggagcagggaaattctgccagactgaccatatgcaataacgtggcagatgcgttaaaaagtgcatattcttaccggaaagatattccggattccggtgacgcagatccggtagagttctttttaaagaagaaaaacggtggtttttgtgtgcattttgcttcgacaggtgtcttgcttttgcgaaaacttggagttccggcgcgctatgtcagtggctacaaagtggatgcttctgaatttaagctggatacttcgcaggtggagaaaagctatgaatgttccgtgccggattccgattcccatgcatgggtggaagtttatctggatgattacggatgggttccggtggagatgacaccgtcagcagaagaatctgcacagtgggacaaagtgagaaataaagataacgatgccagccagaatactgcaacagatcagaccgatcaggaagcgaatcatcaaaatcagcaggagacacagccggcagatctgtcgtcacaggaggaaaccactggttctgacgcacaaaacaatcagacatccaatggcggagcagatggctccggcggagacgaaaaaggacagggtacatctctgagtgcacagattgactggaaaaatgcagcgaaggtgtttcttccgattgcggcagcagtatttgtactgatttttattttccttgaaaagaagcgcagagcagcgcgttggagaaaggcactgaaacgggcagagagaagtggccgttacagcaaggcggcgcggatgcagaaccttagattttaccggtggctggtgaagcacaaaaaactgtcaggaaaacggatgagagaccgtgaatatgcaaaaaatctgaaaagcctgtatccggaacagaactgggcgttgtatctgcagattttgcaaaaagcggtgtacgcagatgtggaactgacggaggaagaatatgtgacactggagacaatgatccgggagagcatagctacttcgcaaaaatagttctttccacaacgtaaaaaagggtaaattcgtgcatgatttaagaaaacttcatgaattattcagaaaaatcatcttgcaacgttaagatagatgatataatatgtatatttagcaaggaaaatataacagggactttgcgcgcttttttgacataaatctggcagtttctgccagaaatggagaaagaaggacggaaagtgcccgtcaggatgttataccatgggagagatagatatgttaaattacaaaaaatataaaagagttccggtattacattacccggatcgtgaatggccggacaaagagattgagcatgcaccgctttggtgcagcgtggatctgcgtgatggaaatcaggctctgatcgacccgatgaatgtagaagaaaaaatggaaatgttccagttactgttaaaacttggttttaaacagattgagatcggtttcccggcagcatctcagattgagtacgattttttacgaaaattagtagatgagaacatgattccggatgatgtacaggttcaggttctgacacagtgcagagagcatctgattgaccgtacttttgaggcaattcagggaatcaggaacgttatcgttcatatttataattcaacttccgtacttcagcgtgatgtggtattccataaagataaagaagcaatcaaacagatcgccatcgatggaacaaaaatggtaaaagagcgcgcggctaaatttgacggaaatattcagttggagtattctcctgagagctttaccggtacagaagtagaatttgcactggatatctgtaccgcagttcaggatatctggcagccgacaccggaaaataagatcatcttcaatcttccggcaaccgtagagatgaatacaccaaacgtatatgcagatcagattgaatggatgcataaacatttcaaaaacagagactctataatattaagtgttcatcctcacaatgacagaggaacaggtatcgcagcgacagagctgagcctgctggcaggagctgaccgtgtagagggaactttattcggaaacggcgagcgtaccggtaatattgatgtgctgaatgtggcatacaatatgttttcacagggtattgatccggagttgaacattgaagatatcaaagagattattgatgtatatgagagatgctgtaagatggacatcgatatgcgccatccgtatgcaggaaaacttgtatttacagcattttccggttctcatcaggatgctattaataaaggtgtgcacgcgttgcgcgagcgcaacacaggcatctgggaggttccgtaccttccaatcgacccggcagatatcggcagggaatatgagccggtagttcgtattaacagccagtccggaaaaggcggtgtagcctttgttatggaatctatgtatggttataaattaccgaaagagatgcacaaggaatttgcagacgttatccagaaaatgtctgagcagcagggcggtgagatcgcaccggagcagatttttgatgcattcaagcatgaatatatcgcactggatgatccgttcgagttcaagaaaatccgtgtggaagatgtcaatgacaaagactgtgtcacaaccattgattttgagtataagaaaacaccgtatcatattgaagcaaaaggtaacggaccgttggatgctgtcaagacagccatcaacaaagaatttgaccttgatgtacgcgttatgaactattccgagcatgcacttggatccggttcacatgcgagagcagctgcttacatcgagatgggagacaaccgcaccggaaaagtactgtttggtgcaggtgacagctccaatatcacaaaggcaacaatccgtgcattcttcagtggattgaaccggttagcgaacaaataaagtataaagattagaatctaagacgagggatgctatgaatcgaaagaaaaagtatggttggtggaagcatatagatttcatgatcattgatctgctctgtatccagattgcatatctggtctcttacttcttccggcatgacacactgcggctttatcgagagacaagcctgtatgcccatgtaaatattttgctgattatcattgatatctgctatgtattgctgcgtagcacatacaaaaatattctgaagcgtagttttatacgtgaaatagagtctgtactggttcacaatattgtaatgtggggactggttatggcgtatctgtacgtgacaaagcaggctttctggttttccagacaggtatttctgacttcctttggatttacgatcatttttatgctggtcggacgttttctgtggaaactgaatgtgcgccggattgtatggaaaggtaagaatcagccgaatttcctggttatcagtacacaggaatatgcgacagaaatggttcggcaattttcagaccgtatgtataacggatttaatctggcaggtctggcaattatggatcgtgatcttgaaaatgaaaagatcgaagggatttcggttgtatgtaataaggacaatctgttaacttatgttcagaaaaatgtcatcgatgaggttatgatcaaactgtctcaggatgataaggaagtaaatgaactgacctggacattgcttcagatgggtgtagttgtgcatattgcactggattacacggacaatgcacttccaaaccgaaccattgagcgtatcggcggttatacctgcatgacgacaagtatcaatacggcaagcagtattccgatgggattaaaacgactgacagatattgcagcaggtattgtaggctgtgcgatcaccggaattgcttttatttttgtggcaccgttgatctataaggcatcaccgggaccgatcttctattgtcaggagcgtgtcggcaaaaacggacgtcggtttaagatgtataaattccgttctatgtatatggatgcggaggaacgaaaaaaagagctgatggcacaaaataaaatgcagggtaatatgttcaaaatggataatgatccgcgtattatcggcagtgaaaaaggtccgggtaagggaatcggaaatataatccgttctttgagtatcgatgagttaccgcagttttataatattctccgtggagatatgagtcttgtgggaacacgtccgccgacagtggacgaggttgcagcatatgatttgcatcacaaagtccgtctgagtatgaaaccggggttgacaggtatgtggcaggtaagcggacgaagtgagattacagatttcgaagaaatcgtgcgtttagatgcatattatatcgaaaactggagcttaaagctggatctgaaaatcattttaaagacatttaaagttgtatttgccaaagaaggcgcagaataaaaaggttatgtatcgtacatgatgtacaggaggtatctgatgaaaaaatatgattatctgattgttggagcaggattatttggagctgtatttgcacaggaagcaaaaaaagctggaaaaaactgtctggttatcgataaaagaaatcacattgcaggaaatatttatacggaaaaagtacttgatatagatgttcatcagtatggtgcacatatttttcatacatccaatgagactgtgtggaattatgtaaacagctttgcaaaatttaaccgttataccaattcaccggtagcaaactacaaaggtgagatttataacctcccgttcaacatgaacactttcaataaactctggggtgttgtaacaccgaagcaggcgcaggagaagatcgaggagcagaaagcagcttttcatgtagaaaatccgcagaacctggaagaacaggcaatcagcctgatcggaccggatgtatacacaaaactggtaaaaggctataccgagaaacagtggggcaaacgtgccacagagcttccggcatttatcatcaaacgtctgccggttcgttttacttatgacaataattacttcaacgatgattatcagggaatcccggtagagggctacaccaaaatgatcgagcgcatgctggatggcgtggaagtgaaactggaagaggacttcctgaaaaacaaagactcctggatggagcaggctgacaagattgtttataccggtatgatcgatgagtattacaattactgctacggagaattagagtaccgttccctgaaattcgagacagaagtcatcgaaggcgaagaaaactatcagggaaatgcagttgtaaactatacagagtacgaagtaccgtttacacgaattattgagcataaacattttacttacggcacacagccggataccgttatcaccagagagtatccaaagacatggagcaaaggggatgagccttattatccgatgaatgatgaaaagaacctgaaactctatgagaagtatgcggatctggcagcaaaagagggaaatgtaatctttggtggtcgtctgggcatgtataaatattatgatatggatgataccattgaagctgcattaaactgtgtgcaggcagaacttgcaaaataaaaacagaacagaaatatatcaggcggcaagacagatccaagctgtattgacgcctgattttatgtaaaaagcattgcaggagcagagaaaaatacgctctaagacaggagaaagatgtgacaaaattatcattgattgttccatgttacaatgaagaacagaatgtggaagctttttatgccagatgtcaggaagtgtttccgacggatcaatacgaagtagtgtttgtaaatgatggcagtaaagatggaacatataagaaattacaaaaattacatgaagaacatgacaatattctggttgtgaatttttccagaaactttggaaaagaatcagccatttatgcaggtctgcattatgccagtggaagttacatttctatcattgatgccgatttacagcaggatccggagattgtcagaaatatggtaaatattctggaagaaaaaccggatatcgatgtggtagcggcttatcaggcacagcgtcatgaaggaaagcttatgagctggtgcaaagatcggttttacaaatttatcaaccgtctcagtgaagtagatctgcgggaaaatgccagtgacttcagaacattccgggcaagtgtgcagaaagcattgctggatatgccggaatatttccgcttttccaaaggattattttcctgggtgggatttgagactgagtatattccgtatgaggcggcagaacgcttcgcagggactaccaaatggagttttacaaaattactgaaatatgccatggaaggaatcatttctttctcaacgctgccattgcagcttgctacattttttggggcaatcgtttctgccattgcaatcatttatggaatcgtgatcattgctcagacattgatcactggtattgatgtacctggttatgcgaccacgattgtggtggtattgttcctgggcggtgtgcagttgctggtcatgggtattctgggagaatatctggcaaagacctatattcagggaaaacacagaccggtatacattgccaaaaacgtattggaaaagaaaaatacaaaagaggagaattaacgtggaacagaaaaaagaagatatttttgatcgcctgatgcatcttccggggcttcgtatttttgaaaaattttataagaaaaataaagaagtattgttatatttactctttggcggactgacaacaattgtcagtattggaacatttgcctggtttaacgtcggcatgcacatgaatgagctgattgccaatgtaatctcatggatctttgctgttacatttgcttatgtgacaaataaaatctgggtatttcagtcccaaacgacctgtttcagagatttatgtatggaaattggaaaattcttcggaggccgccttgcaacgcttggtgtagaagaattaattttgtttgtgtttatcagtcttatgcactggaacagcattcttgtgaaactgatcgcacaggtggtaatcgtgattttgaattatattatcagtaaaatatttgtgttcaaagaaaaaaagtaaaagtaaatggcagcagttcattggttacatgatttatggtatcaatgaactgtaacatgatttctaaaagaaaaataaaatcaggcggtaataaattgacaccctttgtttctggtgctataattcctccccgatgtatgaaaaatacattggggatttttattttacagagaagttacggtaagataaaatcgctttgcgacagagaatatgcactatcttataaacaagtatgaagggaagaaattatgacattctatcaggaattgcagctcaatcaggctggatcgaaagcactgattcgaagctgtacagataaaaaagaaaaaatgcgtcataccgccatttatcttttaaaaatttttattacaatggttttttgcatggctgtagtaattgggttcagcaaaatttttggcaatgacaacagtattgtgggtgttgtggtactgctttgtgtgatggctttccgctttgcagatttcggtatccgcacaccgcatgcgatgggtgcgcttgcaatcatgtttgcaattctgaccttcggtccccgtctggcaaatgcaggaggtcttggacaggaattcgttgtaaataccatctgtattttaattctgatggttttgggatgccataatgttgtgatgtttaatcattcaacgcttctgctcagctatctgcttttgtatggctacgatgtaaccggtgatctgtatacacagcgactgatcgcgatgggaatctgtgcagcagcaacaatgatcgtatattatcgcaatcatcataaaaaagtatacaaacgcagtctgaaggatatctttcatgaatttgatgtgcattccatgagaaccagatggcagattacaatggtgttcggtgtgacaacggcaatgctgattgccggcttgctgcatgttccgcgtcggatgtggatcggaattgcggccatgtccattttggtgccattccatgaagatgccaaacagcgtgccaaagccagagtgccggggaatattgtcggatgttttatatttctggcactgtactatttccttccaccatccatctacaattacgttggcgtgattggaggaatcggtgtgggactttccgcaacctacggatgtcaggcaatttttaatactttcggggcgttgtctatcgcggttggaatcctgggacttccgggggcgatattcttccgaatctttaacaactttttcggagctgtgtatggagtgattttcgagcgcggcttcggaatgatgctggatcggatttcggtggcttcccatttttgtaacaggtaaaatcgtagttgtgtaaaaagtgtaattagcaaaacgtaaatggcgccaggcaggcaatctttccacggcaagcgattgttagctgcagaggtaagattgatgactgacgccttcactaactaaaaatttaaactacacaattacccggaattattagctgcgagccgtccggaacgttacgaaacggaaatgtttgtcaagtttttcaccaatgattccaatgacttttcccatggtgaacgctgccaatatcgttccaataccaagtcctttgatacgtccaataccgataaacgtaatcaatgccgtcgttgccaaacagatgacatcgaaggatatttttacttttgaatatttaaagtttttgataacagacagttctcttggaaagaggtctgtcggaatgatcggcagtccacatcggttggaaagagcgattccgaggcagagcagcagataactgatgacaaagtaaaggattcgcattggaatgttataaggaagaatggaaatccatccttcgtgaacatccagcatcatgctgaacgcgaaaccaaccacgaaactaagcagatattctgctacgaagcgtttacgaagaaccatcagtgacgcaattaggattgcctgaaaaatatacgtccatgttccaagggaaagaaacggaaatacttcggaaaatgcgtaaggtacactggaaatggcagaaattccggaaccggaataaagcatcagtaccacgccaaaactgttcattataattaccagaagcagggcaagttccccgcgaaaaatatgtctttgatcttgcgaatatgtatcgtccatgatcatgcctccaattagtttttatctcagtcgagaagactcccacttctgcaagtggtgagtaataacaagtctttctcagtgggagtacaatctccgactgagataaacgctccgcgggggcgcacattgtctgggagacaatggttttgcgccgaccggaacgaagtgtagatgtgcagtgattctgagaagaatatgtcagctttcgctgaccagaatcacgcaccaagtctcacgtgcgttcgacttgaacagtataatccatagcgtttgctatcctatgatgaatagatgcataggctgcaaacacgatttgaaatcaattgcacacccgagtttagcactaaaggaagatgtgttcaagtccctatttggtcactagtgcatccgccgaaattccaatggtgtcatgccagtcgcttttttgaacatggaaataaaatgactggtatcggaaaaaccagtcatactggcaatgtcctgaaccttcaggtatgtgttgaccagtaaaagttcctttgctttattgatgcggtgcatggtcagatattcgtacactgagcaggagaaaaagcgtcggaatagacgtgaaaggtactgtggcgacacgaatactttttcacttaatgcctgtgcagtcagatctgtggcaaagtttgtttctatttcctgcacaacgggtacaatatatctctgatagagtggatcctgcatatgagccggtccattgacgcagtctgtaaagtttagcagaaggttgtagcagttgagagacagaaatttgctgtcctgctgaccgtgtgcagcaatctcatctacgcaggtggcaatctgagcggcaatctgctgtccttgttcttttcctatccagattacacttctattttgcagcatggcaggaatacttgattctaatgtccctgtaaaggttgcaaaagcgttgatccatagatcagatttctttttgtaggagtgcggaatggaaggcgcgatcagaaaaccttcattttcccgcagttcgtaaattttcccctgtatttcaatctgcccgcaaccggattctgtctgtagataatgataatgcggatagccttccggacggcaggttcccccttcaatccaatgatttccgatggagtcaaacatgaatggagcacttactggcgtatttctaaagtagattggcataataacctccacttgtttcaaaatgttatattttttagcgaaacatattatacacctatagcgtaaaatctgctatactaaaaatacttaatgtagtagagagcacgatttatcaggaggaggaaataatgaaacagtttgattatgcaaaagtaaaagatccggagtatttccgcgatggccgtctggatgcacattctgatcatgtgtattatgcatcggaagaggaagtatgggataaagagacttcttatcgtgagtcattaaacggactctggaaattccagtatgcgagaaattatgagagtgcgattccgggatttgaagcagaagattacaactgcaaagactgggaagacatctatgtaccggcacatattcagatggagggatatgatgcaccacagtatgcaaatgtgcagtatccgtgggaaggacatgaggatattcatccgggcgagatcccgacacattttaacccgacggcaagttatgtaaaatattttaccgttccggagcagatgaagggaaaacgtttatttatctccttccagggagcagaaagcggactggctctgtggctgaatggaaaatttgtaggatacagcgaggattcttttacaccgtctgaatttgaactgaccgagtatgtaaaagaaggcgaaaacaaactggcagcgcaggtatacaaatggaccgcaagcagctggtgtgaggatcaggatttctatcgtttctccggtatttacagagatgtatatctctataccgttccggaagtacatgtaaatgacctgcgtatccgtgcaattccggaagaatctctgcagaccgcagatctggaactggtgacaaagacttggggcagtggaaaactgaaagtggttctttccaaagatggtgaaaccattctggaggacgaaaaagagatttccggtgaagatacattttcatggaaaattgacgctccggcactctggagcgcagaagatccgcagttatatgatctgggactgaccgtatccgatgcaaatggaaatgtgcaggagatcattccacagaaagtcggcttccgtcgttttgaaatgaaagacggcatcatgacattgaacggaaaacgtatcgtattcaaaggtgtaaatcgtcatgagttcagttctgtcagcggtcgtcacgtatccgaggaggagctgcgcaaagatctgacaaccatgaaattaaacaatatcaatgccattcgtacctgccattatccggatatgtctaaaatctacgagctgtgcgatgagtttggtctgtacatgatcgacgagacaaacctggaatcccacggttcctgggatgtggcagagatgacaaaagactttacctacaccgttccacacaacaaaccggaatggctggaaatgatgttggatcgtgcaaattccatgtatcagcgcgacaaaaaccatccggcaattctgatctggtcctgtggaaatgagtccttcggcggaaaagatatttttgaaatgtcacagttattccgcagagaggatccgacccgtctggttcattacgaaggtctgttccatgaccgcagctacaatgacaccagcgatatggaaagccagatgtatccatctgttgagtccatcaaagagttccttgcaaaagatgacagcaaaccgttcatctgctgtgagtacacacatgctatgggaaattcctgcggtgcaatgcataaatatactgatctgaccgatacagagccaaaatatcagggcggatttatctgggattacatcgaccagtctatttacaaaaaagaccgttacggcaaagagttccaggcatacggcggcgattttggcgagcgtccgacagactacaacttcagcggaaacggtattgcatacggcggtgaccgcgaggcttctccgaagatgcaggaagtaaaatttaactatcagaacattactgcgaaagtaagcgaagataaagtaaccgtcatcaacaagaacctgtttgtaaatacagatatttacagtgcaaaagtaacactggcaaaagatggaaaagttgtttgtacaaaaccgctggcaactgcagttgcaccgttaagcgaagaaacctatgatcttccgattgcaaaacaggagcgtccgggcgaatataccgtaaccgtatccttccatctgaaagctgatacagtatgggcaaaagcaggacatgaagtagcattcggtcagtatgtatatcaggtagaaaaagcaccggttgcatgcacagatgaaatagaagttatccgcagcacacataatatcggtatccgcggagcgcattttgaagtattattctctgtattaaacggaggtctggtttcttataaatatgcaggtcgtgagatgatcgagtccattccaaagccaaacttctggcgtgcaccgatcgataatgactgtggaaacctgatgcagatgcgttatgctcagtggaagattgcaagtatgtatctgaatttcaaagattatcgcgatggtatttatgtaggtggacatcagccacagcttgaagtaaaagagcattccgcagtggtatcttatacttatgtaatgccgacgactccgatggcagagtgtcatatttcctatgaagtattcggcgatggacgtgtaaaaacaacccttacatatgatccggtcaaagagctgggcgatatgccggagtttggcgtgatgttcaagttcaatgcagattacgatcatgtagagtggtacggactgggcgaggctgagacttatgcagaccgtaagcatggtgcaaaacttggcatttacaaaaatatggtagctgacaacatggctcgttacatggttccgcaggagtgtggtgcaaaagaagaagtccgctgggcgaaagtaacagaccgcaaaggacgcggaatgttatttgagatggatccggaaaatggtccgatgatgttctctgcacttccgtatacaccacatgaaatggaaaatgcaatgcatccgtatgagcttccggaggttcattacacggtagtacgcgcggcaaaaggtcagatgggtattgcaggtgatgacagctggggtgcacggattcatgaggaatatttgctcaaagtcgatgaaaaaatgacatttagtttcgtgttt

SEQ ID NO: 13103 - DNA, 2207 bp, Unknown
  gut microbiota DNA sequence
atcatcattccacattgcgtaatgctgcagctatgcgtgaactgtatccggttccggagatctggatctatccggatgtggcaaaagcatatggcatcgcaccgggagactgggtctgggtggaatcaaaacgaggcaagatccgtgcaaaagcgctggttacaaaaggaatcaatccgggaaccgtatgcatggagcgtttctggcatccggagaccatgaacaccaagacacatggatggcaggagacaaatgtgaatgtattgtcgaaatctaccgcaccgtttaacgatgtcgttggtacacatacactccgtgcttatcaggtgcgtatttccaaagcggacagtgcgccggaaggcatctggcagaaaccggaagactttgtaaattggcttccgttaggtaaagcatagggaacgaggaggcagagtgatgaaacaatatgcaatggttgtagaagtggatcggtgcatcggctgtaaaggtggatgccaggttgcctgcaagactgaaaatgaagtggctttgggccgttccagaagcacattatatcatatgggaccgactggggtctatccggacctgcagatgtattttctgccggtaatgtgccaacagtgtgaggctccgagttgtgtggatgtgtgtccgacaggcgcatgttacaaggatgaagaagacggagtgatccgcattgatcaggacatctgcatcggatgtcagagttgcaggaaggcatgtccgttccatgcaaacaattttaataaagaactgcgtgtcatggataagtgtaccggctgtgcgcagctgcgggaaaaaggcgaagagccggtttgcgtgaaaaattgttccggtcgcgcactgcatttcggggatatcaatgatccggagagcgaagtatccagaattctggcagagaatgaaggtcatgtatatacattgaaggatgataacggaaatcatccgtccgggagttttattttgaaaaaacagaattggatcgatatgcttccgtttgaatttgaggaagcactgcggaatggtatttatgaggagccggagagcgaaatggctcacaaaatttttgaagatcatttcaaaaaagccaaagtcgtgcacacagaaatgaatgaaaaaaaggaggccaaagagggatgaaacaggtggaattaagaaaacagctggcaaaagccagagcaggactttatcgtttccttggcggtctgtacatcatggaagtggatgcggagacgctggccaatatgaagcagatgcagtttccgacagattgcgaaaatccagagctggctgaggcttatgcgtgtatggcaaagtccatcgcagatctgaaaaatgaggatctggaggatgtggctgcggattatgcgaagacatttctggcagcaggagaggctaccggtgtggctgcgtttccgtatgagtctatttatacaaataaaaaacatgaaatcggaggacgtaccgagcaggagacattggctttgtatgcactgcacggatgggagccgagcaaagatatgttccgcacaatgaatgaccatatcggtctggaactggaatttatggcggttctgtgcgaggaagaattacttgcctgtcagacagacaatgcggatcgtgtggcaatgtcaaaccgggatcagaatgaattcctgtgcacacacttgaaatgggctggcgctctctgcatggatatcagcaaatatgcgcagacagagttttatcaggcagttggaaaactgacaagtgtatttctggagcaggagaaagaaatgctggcaatgggaggtgcaatatgggatatcgcgtagattttgacaagatgaatgatattttggctgcctggtcagaggagtatcatatttttgcaccggcctgggatcagagaaaaaagaaagttcgttaccgggaaatcaagacgattgatcagatcgtgctggatcgtcagtccgatttttccccgaaggaagcgtattatccagtgtcacagacgatgttttattttaccgatactgatgtgacagagagtgaactggcagacgataagggagttctcatttttgcccgtccatgtgatatcaacggaatggcacgtctggactgcattttcatggcaaacggcggtcatgcagattatttttatgccagactgcgggaaaaagtaaaagttgttatgctggaat

SEQ ID NO: 13104 - DNA, 2792 bp, Unknown
  gut microbiota DNA sequence
ctcaccaatcatcattaccattgggtctcttgccatttcttcatcaagggcctctcgaactgcatcacgataaaatatttttctcattattgatttcctccctagtcgacaaaaatatcagtcataagttctgatgcatcaggatatggactctctgctgcaaactcacatgctttttcaatctctgcgtcaacttctttttcaattgctttcagttcttcgtctgtaagatatcctctgtctttaaagactttcagcggatcttttttcttccattcttctaattctccgtcaggtctgtatgcacagttatcacttccgttatgtccgtgatgtctgtatgtcttacactctacgatagccggtcctttgccttctctggcatctttgactgcttttcctactgtctcatatacctgctcgatatcatttccatcaattgtgtatcccggaatgccataaccaatggcacgttttgcaagatcatgttcttttgtgacacgtcttgtatcaaccgtaataccataaaggttgttttcaataatatatacaattggaagatcccaggcggctgccatgttgatacattcatggaaagtaccttcattcgctgctccatcaccaaagaagcaaagcgtaacctgatctgttcctctgtattttgcactgtatgctgcacctgttgctgtcggaataccaccgccaacgataccgtttgctccgaggatgccaagatccatcgccataatatgcatggaaccacctttaccttttgaataaccggtagcttttccaaggatttctgccatcatcttgcccatatctgcaccgcgggcaaccagatgtccatgtccacgatgagtggaaccgatataatcctgtttgtcaattgcagcgcacgcacctgctgcgactgcttcctcaccaatgtacagatgagccagaccagccatctgaccgagtttgtaaaactcaaaaacttcttcttcaaatctacgaattttatacattgttgcataaaactctttggcacgctgctttgtcattttagccatgctatttgtccttctttctgttttaattctttgtttatttttcttgcacaatttgaaaactttctcgctccaacttgcatctgccttaggagatgcaaaatgcatgccagttttttaaatcgttcaaaatctgaaaaaaaacggcttattttcggggtttttcactacggcttcacatctctggtctatttctttttggaatcctgcaaacttctttgagttttttgcaaatcagttctcaaaaaattcaagaatactcctgctgtaaaaactgtcagccacactgctttcctgtcaaacaaaaaaactttccgcaaggcatatgacataccttgcagaaagtcttttttgatacactccgttatacagaattaatcttcatcatccggaaccggattcttatcatgtaactcaaagatggttccaaagtactgacttccatcatagtaatcccagctctgaccaagtgccggatctacatcacctttctgacaggatttaattccgtttgctttcatgacctcacggaatttcgcattgtccggtgttacaatcgcaatatggttgatcacaccttctccgtgttttttcaaatgttctgcatagatactcttgtcatccatcggctgaatgatttccagttcaaagccatctaacatgcaaattgctacttttacatcaaaatcaactctttttccatttactttcgtgtttgtagccggagctccgatgcctttttttgtatcagccacaacagtccatggaccaaccccgagcatctcctcataatatttcaccattttgtcaaggtctgccgtaaccataccaatctgtgtaatttttgaaatctgtcctgccataattcattccatcctttctgatattcattcagtattcatttttttctgatactcatctgttttttaatattcatctatgtgatcacataaatactgtacataattaattgcgccttcgaccatatcttctgagtgatcacagcagagatttaccatgaaatggtcattcaacaattcttttcctgcctgttttgcaattgctttcacatcttcaacgcccatgtcaccaatacagcacggaagtcccactgcacgaccaaacttaatcaggctaatcgtttcttccattgggtattcttccagtactgtctgaatcagcagaccgataaatacacgttcaccatgtgtaaaactgtgtccgcccggaattcccgccagccagtcaccgattccgtgtcccgctgcgcatccgccagaattcaatccgccaataccggataagaagcaatttgcttctatgacattttccaactgtggagttaccgatttggtcagtactgcacggtaagctgccagaccgtctgcggtaataatttccttacaaagttccgtcattccggtcgcaaactctgcaatatgaattccattcggattctgtcggcaggttttcccttcataccaggttgcaatcgcatcacccatacctgctgccagcagacgggccggtgcatttgcaatgattttcgaatctgcgacaaccagatccgggcatttagggaaccgtgtatcatagataatctcgcttccgtcatccgtataagtcagagccatgaaagtgcagggggcatcagaagatgccgttgtaacgatcataaccaacgctttgtcaaatttatttcctatggttcttgcaatatccatgcagccgcctccgccg

SEQ ID NO: 13105 - DNA, 696 bp, Unknown
  gut microbiota DNA sequence
tctcacagtcagatatttcatataaaagacttgcataatactttccggaaggttccatgctgaccgttacggttttcaaacggtatttttccggtatatcccggtgctttttcatacggatccacttgagtttcggcagttttatccggtgatcttctacctgaacatttccatttaccaggttcgttgtataactttttctgctcctgtgttttgacttgaattttgggaaaccacttttcggatccctgaaaaaatttttatatgctttttccaaatgcagctgcacatttgcaagtgccagagcatccacttctttcaaaaacggatattcttttttatacatcgccggtgtattccgcagcatctttttcgagacttcatattcccgtatcttatcgctcagcatctggttatacagaaaacggcagcagccaaaggtctttgcaagcaggtttttctgctctctggttggatatatccgaaaacgatatgccatgttcatcgctttttctccccctgtgtttcaatatagctgcgaataacctcaatcggtgcaccgcccgcagtcaacagacagaaactctgactccagaatgcccccttccagagtttttccctgatctgtggatattcttttttcaacagacggctgcttgcacttttatacgcattgataaatttactgagttctga

SEQ ID NO: 13106 - DNA, 492 bp, Unknown
  gut microbiota DNA sequence
gcagacagaaactctaactccagaatgcccccttccagagtttttccctgacctgtggatattcttttttcaacagacggctgcttgcacttttatacgcattgataaatttactgagttctgattttggctgtgctcgaaacataacatgtacatgatctaaatcatgattccatttttccagtgtgatcccgtaatcaggtgcaatatgttcccatatttcctttgcccgttctgaaatcggatcatctattacttttcttctatcttttacaaccataatcagctgataatacatcagatatactgaatgtgcattatgatccattttatccatacaatcagtcccttctggcttttcaactgattgtattataccacattttccgctgtagaacaagtgttctatttttccatttatatttatttttgcaattcatctcccacctgtagaggaaggagaattcttgctataatttgttaaaaaagtag

SEQ ID NO: 13107 - DNA, 710 bp, Unknown
  gut microbiota DNA sequence
atcttgccatacaatgccgcaagaacctgctgaaacaatgttccaatcataacagggaacagtacttctcctggaaacgacgttgccgcaatgactgctccagcgctgatatttcgcatacctgctccatacatcatggaaatctgtgtttcacgatcctgatgcatcaaccgcgcaataagcaatccgatggcatatccacctgctgccagcagtaagatcacgcctgccactttcatccgctccagattcatatgacggatataaggcgctacaccggaagaattggaagctaccacaaaaatcaatgccatcttggaaaacggtgccagttttgatggcagtaccttctgtgcttttcctttgctgcattggtttaatgtcatcgccagaaccgccggcaatgccaccataaaaataagctgcagcatcatctgtgttacatcgatctgcactcttgaaccaaccataacatgcaatgtcgccggtattaaaaacggtgccagaacagtgtcaatgactacaagtgccagtgacatggcattattaccgctgtaaatcgttacccacatcaaactaactaccgccgttggaacagcaaactccagtacaattcccgtaatcagattactgttgtccggaaaaatcagatttccaagaccgcaggctactcccggaattccgttctttttatagaaaagcaaatgtgc

SEQ ID NO: 13108 - DNA, 6010 bp, Unknown
  gut microbiota DNA sequence
gcgaaacataacatgtacatgatctaaatcatgattccattcttccagtgtgatcccgtaatcaggtgcaatatgttcccatatttcttttgcccgttctgaaattggatcatctattacttttcttctactatattttacaaccatgatcagatgataatacatcaaatatactgaatgtgcattatgatccattttatccatacaatcagtcccttctggcttttcgactgattgtattataccatattcctcattatagaacaagtgttctgttttgctttttatatttatttttgcaattcatctcccacctgtagaggaaggagaattcttgctataatttgttaaatctcatctgcatccaacaccaaccgaatcgcccagatcggcacctccgggatgctgtagccttcctgtacgaacacaaacgccgtctgataatccggcatccgctccgggaaggttccctgtccatccgtaaaatagatcagacctttcagatcctgaaattcatgtcttcggatcagcccgtccacatattcaaacaccggtcggaaatccgtgccgccaaagccgcacagctccacatcttccatatatttttcaaattcttcgtccgtggtcactttcacatcacgctggattttctcatcgcattgaatgatatgaatattgacccgttcaaaatagctctcgctgctctttaaaatattgtaagttttccgtaaaaaccgttccaccgtcttgccctgacaggaaccagacgtatcaatggcaatgacaaattcccggattcgcttattttcccggtattccaacggctccaccagtggcatatttttgtacatctgcaatccataagtatagtaaatgtagtcaaattcatcatcattgacatgcatttcctcgcccagaaccgcaaacttccgcaaaaactcgccgtaatcgtatttttcccgcaacgcggcattcaggttcagcagcaggcttccggcgccgtatccctgttcgtgggaaaacatttccagatctgtcttggcgtgctggctcacatcctgccagtccccctgacgctgtcccaccaatgcttcgtcaatatcttcctgctcgccttcctcgccagtatccgcctcatggcagcccaccatggcagttctcgtatctgtcgtaatactgtcgtttctgcgctctccggcttcattttccttcaacggaatccatttcagatgatcatcccacataaactgcggttcttccctgaaaaattctgcgctctcctccggattttcatacagccagcggtaaattttctctgcggtcagaatcggtactttctgcgccaaatgcgataacgtccgtttcagggacgcatcccgctccagctccacacatttcagattcagatccagaatcgactgttccaccgccagatctgtcgccagatcccagcactcccgatccaatttttcatactgaaacggatgactgaaaatgcagtgtaatatcatatgtaaaaatgcccgggtacaggcatttttttctcttttaaatgcatgcagcacatattccggattgtaatacatggtcgcgccatccacgccaaaagcagcgacactgtctgcggccaccagtggcatccgaaataaggctctgtcaagaaaccgcatggagatcatcagctcatctctggcgtattccatgatctttgctgcaagttcctctcctgtcttttgtttttcctgttccattcacgttcctcattcagtgattttttgttactgtcggaaattagtgtatcacatcttgttttccgggacaagtaaactggcagtaagttttgcctaagttttattttagttcatctgataattctgtttatataaatcctctataaaaaagtagtgaatgacaataaatttttctatctctcgcagacttcttcctcaatccgcaaaagttcattatattttgccgtccgttcccctctacatggtgcaccagttttgatctgcccgcaatttaacgctacagcaatatccgcgatcatcggatcttccgtctcgccagagcgatgcgatacgatcgactgatacccatttcgttttgccaacacgattgcctcaaaactctcggataacgtaccgatctgatttactttgatcagaatcgcattgcccgctttttgtgcaatgccttgttttaaccgcttcggatttgtcacaaataagtcatctccgactaactgtacccgattgccgatccgtttggtcatctcgctccatccttcccagtcattctcctgtaaaccatcctcaatagatacgatcggatatttactgatcagtttttcataataagagatcatctcttccgttgtccgatgcacagacagcgaaatcgtatctgccagcatgcctgccatctccgcttttggcagtttctgttcatccgaatgcaggatttcctgcgcagaattactctcgcactgatttccttttgccatcaactctgccagtttcaaccgtgtttctcccgggaaatcataaagtctggaatctttattgtacaattcacttgctgccacatctaacgcaaaggcaatctgtctgcccggctcataacctgcttccttcaccgcccgcatcagataatccaacacttcctctgcatttttcaaatccggtgcaaaaccaccttcatcccccacagacgtcgtgtaaccatctttttccaaaattgattttaacgtatgataaatttccacgcaccagcgcagtccatcccggaaaataaaattgccctcatcgtcccgtgcgcccaccggcatgatcataaactcctgaaaatcaacggtattgtccgcgtggcgcccaccatttaaaatattcatcatcgggatcggcatacgaatcccatacacaccgccaagataccgaaacagcggcagattcagcgctttggcacaggcttttgcacacgccatagaaacagacaacgtcgcatttgccccaagattgcatttattttccgttccatccgtacagtttaaaatctgatcgatcaaaacctgattcgttgcatcttttccaagcagcaccgctttgatccggtcgttgacattgaccaccgcctgatgcacaccttttccatgataccgtctcgaatccgtatcccgcaattccttcgcctcatgttccccagtgctggcgccggatgggacacttgcccgcccggtaaaaatgtgatttccgtcctttacttttacttccgtctccaccgttggatttccccgggaatccagtatttctcttgcatatacatccacaatttccagataaacagccataatttttcgtctcctttccaaaattcaagtcgaacgcacgtgagacttggtgcgtgattctggtcagcgaaagctgacatattcttctcagaatcactgcacatctacacttcgttccggtcggcgcaaaaccattgtctcccagacaatgtgcgcccccgcggagcgtttatctcagtcggagattgtactcccactgagaaagacttgttattactcaccacttgcagaagtgggagtcttctcgactgagataaatcagttttctcccttacattatctgctgtttttggaatccttatacacacgatcagaaatggtcttatttacgctccaaatgtacaaaaacactgcaataacttctgaatatcaaaagtttctacactcaaattcaaaaatttttattttcaacactttttgcgctgaaatgcataaacttttccaacaaaaaagcatcaggaaaataatgttttgaattacttttcccgatgcttctccgatgcaatttttctaaatttggtaaaatttgttttcttctgcggtatatgttccatcatccatgcgcgcccgcacaaacggcacttccgctctgtgataaaaaacattgtggtgaatccacgcatccggattaccggaaggactgatggttccgcctaggtcatccatgctgacattataacggaactcattatgaatagcttcttccagacagaacatcacacatccgccttcgtttaaccgactatagttatactgatataatgttccgtcaccggagtccgcatcccacgccatactatcctgattcagccgcatatcccgcatctcattgtaggttagtaacgcatctttgctcttccatggccagatacctgctgcaacttttccaccacgattttccggttcgctataataacggtcattcatttccagagcacaactgtccccggaattgtattccaccaacggtttcatggcatacatcaccgtaatgccatcgccgccgatttcttccacataattatccgcaatgtaaatattgtgatgaccatatttttcaaataattcatccggcagctctgccatcataaactctttacacttataactgtatccaatggcaatgccccaacggcttgtccgtttcagatggcagccacgtacactgacattttcataacgtgccacacccgttttttcttcctcatccggcttcagacaggtaaaataaatgccaccgttattcatatgtttatcgtaaacattgccttccacatcatgaatatacagattattcaaatgaatttcgtgcaacgttccacggttcttggcaattcctgccacaccggtgcgattcatcttgtgcggagccgaatatgtttctccaaatacaccaccacagttggttatctccagattttcgacagtcacatattcacaatcatacagcagaactgcagaagacacatatcctttgtatacatgcgtcggtgcatccagttgcgttccataatcctgataccagataccctgaccattcgtctggattaacggtctttcgccagttccatacgccccaatataaattgggtgctcctttgtgccctgtacatccaaatgcaaaaactgaccttcaaacacagaaccacgctctaaaagcacctgatcacccggctgcaaatccaaacaatttaccgcatacaaactctttaacggatgactctctgttccgtcattattatcatccccatgaattgcactgacataataacaacgtccacaaatctccattcctgtattttctttcaggcgatttttatcttctctctgacgttgttctgcctgcatttgattccagattacctcaaactctgccatccactgagctgcattatctgacttttcatctgacacatcctgtgtcgatatttcatttacggtcgtttcactcaaatgcgcattagccgctacactttctgtgaattcttggtactcctgcatttttagccacttttcaatgatcagatccacttcttcatatggaaacagatctccatgatatctggtaaacaaatcctgattattctcgtaaaatgcccgtttctcatcctctgtataaacctggcatttatgatttccaacacgatcacctttatacaccacaaaagccagctgaatactcttccactcataatccagatacatttccggtgtcagatagcgcgcaccgaaagccactgttccgtttttccatgcttcttcattcttccattcggtctctgcacgccgctgatccacaatctgctcaacttcatcaataaaactatctgttcttcccgttccaaatgcttccgcctgctcgttcataaacgtgtttttctgtttccatctctggtaaaaaccattcggcgaacaatcctcatatatcttcagcaattttgcaacctgataggccgcataaactttctgtccattttcacatatttttcccattttatttcgcttctcctgatcctatagctcgcgctacccatttataatcctattctgctatgcaacttatcaaaagagacatgcatccctcctaatttcaagtcgaacgcacgtgagacttggtgcgtgattctggtcagcgcaagctgacatcttcttttcagaatc

SEQ ID NO: 13109 - DNA, 9920 bp, Unknown
  gut microbiota DNA sequence
aagcaaccttctggcaaatggagcagcaccaaaggatgtgcaggaactgttagggcactcagatgtcagtaccaccatgaatgtctatgcacactctacaagaaaagccaagcgggaatctgcaaggttacttgataaagtggcaggcaatgactaaataaaactttcccttatttcccttacgattatctcataagggcaaaaataaaggaaaatacatatcgtttcgctaatgcacaggctggaaagcctgtaaaatagggaaagttagaaatatatttcgacaaacaagaatttatgatgccagtattgtactggctgtgattccggctatggttgccaccaatgcgcctgccagagtccagcgtgtttttttgactttgacggtcataaaataaatactcatcgtataaaaaatagtttcactgctgctcatcattaccgaggcgatccgcccaattctggaatccgttccaaattgttcatacacatccagcagcaatccggtggcagcagaggaggaaaacatccgaacgactgccagcggaacgagttgtgaaggaaatccgatatgttccatccagttccctgataatcttgtcaatgcatctaatagtccggaagccctcagaattcccaccgctaccattaaaccggcaagggtaggtaaaatatcaactgctgtcatcaatcctttttttgccccttttacaaagtctgcatatgcattgcgtcggtttagaaaaccggacataagaattacgacaataaaaagtggaatgatcagatctgacaaaaatagcaatattgcctgcataagaaaagctcccttctatcagtaaaaaatcagcatatgctgtttctttccccacagggatttctaacaacatatgctgatttatccacatttataacatgttaccatcttttgcctgtgattatacggtcagttcctgcatgagtttcggcacagtagtgatttttgtgatttcacccacgcgggaaccgcaaaagatcagtccgttatccagatcaccgaccactgcattgatcagagcctgtgtgatgcagtaaggtgcggtcgccggattacaggctttcaggcagttaaagcagtgggagattttatccggtgcagcaagcattcgttcaataaaggcatttttgatggcacgtcccggcattcctaccggacttttgataataatgacatcctcgtcagaggcatttacataagcctgtttgtatgcgtcactggcatcacattcttccgtggcaacaaaccgggtggctgcctggatgccatcggcaccaagctccatgacatgtgcggcatctttggcggcaaacataccaccggctacgaataccgggatcgtggtctgatatttttcttcgtaggtctgtttcaatgcaatgatattttgaatttctgtatcataatccagagaaggaatatcctctaactgttctttggaaaaaccgagatgtccacctgccagtggtccttcgatcaccagaaaatcagcggtgcgatgatattttttgtcccagaatttcaaaatgacattggcagattttgtgctggatacgataggagccaaagctacgttataaccttcggcaaattttggcagttccgtcggcagacctgcaccggaaataatcgcgtccacaccggcagcacaggcggttttgacataggtttcgtacaattgagtgactgccatgatgttgacggcgaccatgccgtttccaccggcgatttctttcgcctttttaatctgttctggaagcatccttaaattcgtttcttccggattttttgcaaaatccggatcatcgtagccaatctgtgcggtggaaaggacacccataccgccttcttttgcaacagctcctgccagacgacagcggctgacaccgatgcccatgcctccctgaatgatcggaagcttcaaaaacttatcttttaaatgtaatgatttcattaatttcatattagatttctcactttccatatgtagttttattaaaaaatcgatatgtgctgagtaaagcggacattcgcaatccgctttcgctacttgctcatgaacgcagtcgctttgcgacctgtcagtgggagcttttaactcccactgacataagcatcctccttaccccccgcttagtgctctacgcacttgaagcgggggaaggcttattctgcgttcaattttttgagggcgattttccaatgttatataatttgaatattaaaatgtttgaaaatcaaaataatattacaccacaaaaataagcaagtcaatataaaaagtgtgaaaaacgagtataagtagtatttgataccacgtatgtatatgcttgctattttctgcaaaatggtatacgatatcatacagatttataggaaataaaaatatgtcacagaaatttagggataacgattttactacaggcagggaaagaaaaaatctaccgctgtatgatcgtggaaaaatggaaggcaaatgtatgaaaaagagagggtgtttgaaaatatggagcgggataagacgtttctgggaacagaaccgattggaaaattattgctaaaactggcggttccgacggttatcgcacagctggtaaatatgttgtataacatcatagaccgtgtgtacatcgggcatattccgggggagggcagcatggcactgaccggagttggtgtctgtatgccactgatcttgatcattgcggcatttgcggcattggttggctccggcggttccccgcgggcatctatttatatgggaaaaggtgatcacgataccgcggaaaaaattctgaccggatgtctgagccttcagatcattgtttctattattttgaccgtaattttgcttatctggaataaagatctgttattgatgtttggtgccagtgaaaatacgatcacttatgcgaccgcatacatgaatatttacgcaatcggtacgatttttgtacagatcacacttggtatgaatacgtttattacggcgcagggaaaggcaacaactggaatgatgaccgttctgatcggagccgttgccaatattattctggacccgatttttatcttcggcatgcacatgggcgtacgcggtgctgcccttgcaacggttatttcacaggggctttcctgcatctgggtgctgacatttttatccggaaaaaagacgctgcttcggattaagaaagcgaacattcttccgggattacgcttggttccgccttgcgtggcattgggagcatccatgtttgtaatgcaggcaagtgagagcgtgatctccgtctgctttaattcgtcgttgttaaaatatggtggcgatattgcggtaggagctatgacgattctgaccagtgttatgcagtttgccatgcttccgctgcagggaatcgcgcagggagcgcagccgatcaccagttacaattatggagcgaaaaatgcaacgcgcgtaaagcagagttacaagattctgcttagcgtctgcgtgatctattccgttattctgtgggcgatcattatggcatttccacaggtatttgcgaaactgtttaccacagatgcggagctgatcgcttttacggcaaaggcacttcgaatctattgccgcgtgttatttgtgtttggaatccagattgcctgccagatgacatttgtgtccattggaaatgcgccttgttctattattgtggcaattttgcggaaatttatattgctgattccactgatctacatattgccacattttatggaaaacaagaccaatgcggtatatatggcagaaccggtagcggatgtcattgcggtaagctgtacgttacttctgtttttggtgcagtttagaaaatcattacgaaaactgaacttggaagagacaaaaaaacgatagttttatgaatgtaccccaattgattttgtctttctggctaacaatcgctcatcaagaaagaataaattgggggtacaatttacattttgatgttatagtttctttgtgtaaatcagcgtgcacagtataacattgcttttatcgtaagtgtagatgtgcacgtggcacgcagtgccgggtggcgcaaaaatttactaatttcactgtgtaaataaagaactcctgtattttttctcaaggagcgattgctagcgactgagacaaaatacaggagttcttattaaaaactaacgtgataaatttttaagccacccaaaacaagacttactttcgtttccgcaaaaacatccagatcgcaatcacgatcacaataataatcagaaaaatatcccagaaccgctgtgtcagattcagatgaagtgcttccaccataccgatgaaaataacgaaagcgcccagaatcaattgcagcatagaccgctgcgacagaccggcttcgttactgccacgggactgcaccaatccgaagatgccgtatacaagacagatcgcgccgagaaccggcaggatataaatcgtgtctatggtatccgtaaaaataataaaaaagatgacaacgacgccgatcaaagtgatataagttccccagttaaatggttttttcttcatgaatttcaacctttctaatgtgtttctatccgattctgtaagtacgcaaaatcgtttgcactcattataacataacaatcccataacagaaaaataatagaaaaagtctgcatttgcatgagataccggtaaagaaaaacgctgctcccttagaagcagcgcttttcttcatatggcttaactttttcgattcccaaattgtcgaaagtaacttctgggattatgccaactgtggtgcaacggtaaggatgactgcacacagaatggttccaactaatgtcataataacggtctgtaagaacatcggtaagtatgcatctttgatcttaacctgagccagaccagttgtgatcaggatcagtccgttaaccggcagtgtctcaaatgtggaaactgcgatagcagcacaacgagccagtgcgttcggattcagagccgggttagcagtccagatataagctgcagcaaccattggaagtgcaatacccaaagctgctggcggtgaagatgtaaatgctacaacgatgatcgcaagtacgataccaattactaacggagaagctttcatgccaaacagaataccaacgaaaccgttgaatgctgctgtatgctgtacaactgctgcgaaaccagctgcagctgtcagagtcatgatagcgcttgcaccatttgctgcaccgatatttaaagagttgagaacgttgcctgcccatgccgggaagccttttttctcattgtctttgaagtgcggagccatcagaatgattactgctgcgataccgcaaaccagagccagagaagcaatctgtacgatagcgaaaagcaggaatacaacgattaacgggatgatagcaattgcgaaatgcggaagttttttcgcatcatctgccgggatcggttcgcagttaccataatcgaaagtctcaccttttctcatctctcttacgatgaatgtagagcagatgaagtatacaccgatctcaattacgatgaaggaaatgaatcccgggatcggagcagcacccggacttgtctgcaggatgctcatacagatgatgttattgatacttaatacgaatggagcagagtttgcaccacagcttaatgccagcattgccggaaccatacgtcttggaataccgatgcggcttgccatgtacattgcgatcgggaatgtagcgaagattgctacgaatccgtctacaccaccgtatgtaaggatacattcaataagtaacataattaaaacggcacgttttgcctgtttttctttgttgtttaccggcataacgaatttgtttaccagtgtggaagaaatagactgagcagcaccactgtctgccagaacttttccaaataaaccgcctaagaatacggttgggaaaattgctgtgatcattccgcagacaccgccgatttcccatgcgccggttgctgcattttgttcaacggcaccaacatacagagatgtgaaggcgtcgtttgcattcaatccgtttgtcactgctacgataacgccgcagagcggagccaggtagagtacggatacgtttttgtaggcgccgtacaggaaaattgccagcgcgactacgataccaataatacctaaagccataaaaaaccctcctaaatataaaaagttaagcaaagatgaaaattataaagaaaatataaatttcatatttgcattatatataactggtaagaccatgtcaataaaaatatgcaaagtgtacaaaaaaagaaataaagcgcattttgttttgtgtaaaacacctgtaactaaccaaatggatactgataaaaatagaaataaggaagacctgtgaattacagatttattgacatgatttacaggccggaatacatagtggaatagggcaatgcggtacgcagtgccgttgtggtgcaaaatatatggaggtgtataaataggataaagaaatttgctaaatacatgagaaaagatatgcataaaaatctaggtaatatatacgtaaatagcgggctcagagcaaatttatcctggtgagcgattggtagctgtcaggataaatttgtctgagtccgctttcataatcttaaagtatagccatatatccaccaaacaagaattactgattctgattcaggaaaaataccgacgaatcacggttgttccggtcaatcagggaattatataccagacaatgatactggtagagtaaatcgtcatatttactgctctcagaatgtgtatagtagttattatctgaatctacatatcctaccgtgttgatgatcggcagtttctgatacagagaagccagatatttattatactgggtgagcggcagttttgccgtctgcaataccagtgtggacagatagtttgcactgatctgatccaaagtggcttctggaatatcgtaatttgcccagatgacaaatggtgtcatataacgaagctgttgctgttcagtggtcagattatccagactggtgccgaataattcctcataaaattcatcttcaatggatggcagatgatcaccaaacatgcagatgatcgtcggctctgttacctgactgaaatactcggtcagttcgcggaaagcgtcatcagagcgttttaccagagacagataacggttggctttggggtaaaccgttgacatgttggttacataaatttcctgtgcaaagtttgtgtaggacattgcgtatccgccatggttctgcatggtgacgttgaacagaaagaacggtttggatgtatcccggttttcaaacatattttccaccatggaataatcataactgtcgctgacaaaacggcgcagcagcatgtcgcggtccggataacgttcctttaacagtgtctcatactgggttacatcgttgttctgtttataggtatccaaaatatcctgatcaacaaaatcttcgatgctgatatagttgtcaaaaccaagcagcggatatacgttgcgtcggttccagccatccccgtaatacggatggaacgccgtcttggaatacccaagagagccaagggtggataccagggacggaatcgaatctttgacgtaggactgatatacgttacagcctgttggcaggaaggagatagaatctccggacaggaattcaaattcgctgttacttgttcctgcgccgaataccggcatagacagataacctttgatggtattttctgtcagactgtgaataaatggcatataatcttcgtttgtctccagattaccaagggcacccagatccgacagggattcattcatgatgcagataatatttggcatcgtgccgtcggtagacggtgtgtagtcattctgaccggtcaacaggttggtacttgtatcgctgtccggatcaacacctgaatccttcagggtatcagcaacataggtgctgacattatccggagcataatcggacggtttacgcacgatcagatactttgtgttcagacagaagttaaagaaagaaccggtgcggtgataacctcttgcctgatcccagaaatccggtttatatccaaggtttgcggcgtggtcggtgaaaaataaggagatcgcaaccacagcgatataagctgccggagcaagttttgccagcagtttaaattttaattttttcggtttgatattgacactttttttgtttaccagataaatcaggaaaaacatgatggagccgcagataagctgccagctcagttcgtaagtgtagccgtcggataccgtaagaccggttttgaaagtcagtatatccagcggaacaaatggtgatccacgaaacagttcaataaaatagtttagcagcgaccagacgtaaagggaaatatttacgatcagtcccaccatatgatagcgccctgtgatcaggtaaaaaaccagataaaatacaaggtagatcatgtagtttgccagaaacgtaggtacagaaaaccaccagatgaagttttcattaaatgcctctaccatctgaatggtcaggatcggcatgataaaaaataatgccgtattggcaaatgcctgatatttctgatctaccgatggcttaaaaatgatcagaaatccggcagtcggaccggcaagaagcgacagaacaaacaaaagggttccgccttgcagattcagatccggatctaagtacagcttccagttagccgatacaaaaataatcataaaaatacagaccgccagtgccagaaggcggactttttttcctgcgaatgaaatatgcattttttctctctcatttccgtaagtacaagttgataagttactatataaaaagttattttcggtaaaaaaccactaacatatattaaatatcagactgcaaaatctgtcaacatcaaaaaatgtgaagaaatggtgaagattgcattaatatgggaatgtgcgctgagaataagcggtgaaaaggagttgccatttccggatgtggagtatagtattaataaaaaagatggaaaataaaatatcaggaaagggagcgcagaattatgacagggacagaacagttaaaacaatggatcgaagcatcggacaatattgtgttttttggcggagccggtgtgtcaacggaaagcggaattccggattttcgaagtgtggacgggttatatcatcagaaatatgattatccgccggagacgattctcagtcacaccttctatatggaaaagacagaagaattttataaattttaccgggataaaatgctggctttggatgcaaaaccgaatgcagcacatctgaaactggcagaactggaagcaaagggcaagttaaaagcggtggtgacacagaatattgatggtctgcatcaggcggcaggcagcaaaaatgtactggaactgcacggaagcgtacatcgaaactattgcagaaaatgtggaagactgtacgacgcttcttatattaaggaatcaacgggagttccaaaatgtgcctgcggtggtcagatcaagccggatgttgtgttgtatgaggaaggtctggacgatgttaccatgcagtcagcaatccattttatcagtcaggcagagatcctgatcattggtggaacaagtcttgcggtctatccggcagcgggactgatcgatttttacaaaggaaacaagctggttctgatcaataaatcagcgacaccgttagacagtcgggcggatctggtcattcaggcaccgatcggcgaagtatttcagcaggtctgctaaaaactatgggacctgtgaagtagatgcttcatctcagtctgagttgagactcccacttctgcaagtggtgagtagtaacaagtatttctcagtgggag

SEQ ID NO: 13110 - DNA, 3134 bp, Unknown
  gut microbiota DNA sequence
tctgaaaagaagatgtcagcttgcgctgaccagaatcacgcaccaagtctcacgtgcgttcgacttgaaaaaggagcgtgtactcacgaaatgcataaatgatgatgatgaaagaaaatataagcgggaaaatgaatgaggtggataaatggcatatcaatatgaagtgggagatatcgtaaaattaaaaaagaagcatccctgtggcagttttgagtgggagattcttcgtgtaggcgcagattttcggttaaaatgtacgggctgtgggcatcaaattatggtttcacgaaagatcgtagaaaaaaacacaaaagatttgaaaaaacacttgcccgatgattaaaaatatggtaacataggcaatcgtgatatacaatatccttgctctctacaagatgagcagagggccaaaagaccacaaggaggtaagaaagcatgaacaagtatgaattagcattaattgttagtgccaagatcgaagatgacgccagagcagcagttgttgagaaagcaaaagagtacattactcgttttggcggtacagtaacagaagttgaggattggggtaagaaaaaattagcttacgacatccagaaaatgagcgaaggcttctattacttcattcagttcgacgctgcagcagaagtacctgctgagttagagcagagtgttcgtatcatggacaacgtgctgagatttttatgcgttagaaaagacgaggcataatttcacagtagaaaaggagttatccttatgaataaagtaattttgatgggacgtttgacccgtgatcctgaggttcgttattctcagggtgaacaggcaaccgcaatcgcaagatatacagttgcagtagatcgtagattccgtcgtgacagcgacagccagtcagcagattttatcggctgtgtagcattcggacgtcaggcagagttcgcagagaaatatctgcgcaaaggaattaagattgcccttacaggccgtatccagaccggaagttatacaaaccgcgatggacagaaggtttacacaacagatgttgttgttgaggagcaggagtttgcagagagcaaagccgcaagtgctgagcatacaggaggttttgcgccggcagacagaccatcaccaagcaatgcagtgagtgatggttttatgaatattccggacggaattgatgaagaattaccatttaactaaacaggaggtaaactatcatggcttataataaagatgaaaaaagcaattctccgatgaagagaagaggcggccgcagaagaaaaaaagtttgtgtattctgtggaaaagacaatgtaatcgattacaaggatacaaataaattaaaaagatacatctctgagagaggaaaaatccttccgagaagaatcacaggaaactgtgcaaaacatcagagagctatcactgtagcaatcaaaagagcacgtcacgttgctttaatgccgtacgtacaggattaattttgacaacagactccccggaatttttccggggagctttttgcattctttagagcagatagaagttcgatgaaaagagtgaattatgtctgcaggaaagaatacgtttcataaataacagaatacaatagaataatcatatgaagaaaattatacgttatctgcgttatgcatttagattactgaaattgaatattggtacacttttagtgtttgaacttttatataaatttgtttccatggcagtatttaagccgctgctcagtggtctgatgaaactggcattgaaggcacaggggttaagttacctgtctgatgaaaccatgggaacgtttttgaaagccccgctgacttgggtgtttttagtattgattgtatttggtatggcattttttacgctatttgatatctgctgtatcatttgctgcatccatgcgtctttccgaaagcaggaaatgccgttgctggcattgatccggcagggatttaagacgtcgttgcgagttatctatcagcgaaatatcattatgatgctgtatttgctcatcatcataccgatgacacatgcactggtgatttccggttatattacaaaatttacggtgccgcagtttattgtggattacattatgtcccatacgtggctggcaattctgtatgttggattctgggtttttatcggactgcggtctttccattggatttacagtctgcactatttctgcctggaaaactgcaatttcaagcaggcgcgtaaaagaagttttcgtctgcagggaaaacactactggcgggatatggcagttgtcgttggctggagtctggcttgcattggaatctattacggaatcattctgtttggttcctggctggtttccaaggtaaatctggcattgccgacacatgatctgttcagtagtctgacactttccggtatttccctgttgatggatgtgtgcggagcaatatttttctgctttgatctgccactgtttttcctttgtgtcagcttgctattttactattataaagctgcatccggagagaagattccgggacagtttaaaaatctggataatgcctatcgtcttaccaaaaccggttgggcgaaaaaactgtatctgtatcggaaacggatcattgccatcagcattgtggtggcgattggagtaaactttgcgtatacttttgcggataaacggggcgtgttacatatggggctggataatccggtggaggtaactgcgcacagaggctattctactgagtatccggaaaatacgattccggcatttaagggtgccatcacagttggtgcagactgggcggagctggatgttcagcagacagcagacggggaagtgatcgtgatgcacgattccagtctgaaacgtaccacagggctggataaagaggtatggcaggtaacctgggatgaaattaagaatctggacaacggaagctggtttaataagaagttccagacggtccgcattccgacgctggaagaagttttgaaagtatgccgtggaaaaatccggttaaatattgagatcaaaccaagcggacatgacaaagatctggaagaacaggtggcaaaattattgaaagaatatcatatgcgggatacctgcgtggtgtcttccctgaaatacg

SEQ ID NO: 13111 - DNA, 15649 bp, Unknown
  gut microbiota DNA sequence
gtattgagaccgtatatattacgtccgtttcctatggaaactttacggatctggaatatgcggatggctacagtgtggaatccacgatgctgagccagagttttgtaaaccgtgcccagaaagcaggaaaacaggtttatgtatggacggttaactctgaggatcagctggaaaaggtggtcggcatggggatcgacaacgtgatcacagatgatccggttatggcaaaagagctgatctataagcaggatcacagcacattctgggatcggtatgtcaatcagctgctttctattgggaactaggaaaataagcggataaactcaagttagcaacatgaaacaaaaagcttcctaatcgcgtcaaagtgtggtatacttactagatagtatcggtctgtatagaacctgagaggagtttttagcaaaaggagttatcatgcgacaggatattaagttgaagggaaaattaaaaggatatacgcagacaccgctgatgttgaccctgttatttgcggcaatggatgtgtggatgtatgttctgaatgtaaaggcggggatccttggaacaattttcgtggcaatttacttttttgtcatgttgtttgtttactggagaaatcaaccgattctgctcaatgaactgattgattttgctacacagtatggcaccgtgcagaagcgtcttttaaatgaatttgaggttccatatgctgttatggattctgcgggcaagttactgtggatgaaccaccagtttgagctgctttccgaaaaagataaaggatatcacaaatctatcactacgatttttccgcaggttacgcgggaactgatggagaaagaggacgagctggagctgatggtacagcgggaagaaaaagtgtaccgggcttctgtgcataagatccattttgcggatattctgcatgagagcagcagtatagaattgacagagaagaagcagtatctgcaggtgatctatctgtttgatgagacactgctgacacagtaccgcattgaaaatcaggaaatgcagatggtttctgcccttgtctatatcgacaactatgatgaggttctggatacggtcgaggaagtaaaacagtcgcttctggtagcattggtcgaccgtaaagtgaataaattttttgcatccatcgacggtctggtgaaaaagaccgagaaggataaatattttgtcgtattccagcataaatatctggaaaaaatggaggcagagaaattcagtctcttagaagatgtcaaaagtatcaaagtcggaaatgagatgtctgtcaccctcagtatgggtatcggatatgtgggaaatgattacacgaaaaactatgaacattcccgtatggccatcgatctggctcttggccgtggcggagatcaggtcgttgtaaagaccagagacaagatttcttattttggcggaaataaccgtcaggtggataagactacccgtgtcaaagcgcgtgtaaaggcgctggcgctgcgcgagatcatgatcagcagggataagttctttatcatgggacataagatcgcagatatcgattcttttggcgcagccattggaatttactgtgctgcccgtcagcttggcaaaaaggcgcagatcgtaattgatggagtcaatacgacattgcggccgctgaaagagtgttttacctcagaaaacggttatccggatgatatgtttatcccgagccagctggcaatcgacgagctggattctcatactgccctgatcgttgtggatacgaaccgtccgagctacaccgagtgtccgacgctgttaaaccgtgcaagaaccatcgttgtatttgaccatcatcgtcagtgtgaggatgtgatcaaaaatacggtgttatcttataccgaaccgtatgcttcttcgacctgcgagatgatcgcggaagtattgcagtattttgatgaggatatcaagctttccgcgcaggaagcggatgcgatctatgctggtatcctgatcgataccaacaactttgtatccaagacgggtgtccgtacgtttgaggcagctgcttatctgcgccgctgtggtgcggaagttaccagggtacgaaaaatgctcagaaatgatatgtctgcatacaaggcgagagcggaagccgtgcgccatgcagaagtttacagaaatatgtttgcaatcagtgtgtgtccggcggataatattgagagtccgacggtggcatgtgcacaggcagccaatgagctgctcaatatcatcggaatcaaagcttcatttgtgctgacagagtatcatgaacagatctatgtcagtgcccgttccattgatgagatcaacgtacagttgattatggagcgcttaggcggcggtggccatatgaattctgcgggagcgcagttgaccgactgtacgctggatgaggcaaaacgtaccatcgaaaatacactggatgagatgataaaggaaggagatatcaagtaatgaaagtgattttgttagaagatgtaaaaagccttggaaaaaaaggagagatcgtaacagtcagtgatgcttatgcgagaaacgtgatctttgcaaaaaaactgggactggaagcaaccggtaagaatctgaatgatctgaagcttcagaacaaacatgcagataaagtggcacaggaacagttagaagcagcaaaagcgcttgcaaaggaactggaagataaagtagtagaagtaaagatgaaagcaggagaaggcggacgtaccttcggctctgtttccacaaaagagatctctgcagcagtaaaagatcagcttggattagagatcgataaaaagaaaatgtcactgaacattccgatcaaagcatttggaacctttgacgtggcagtaaaacttcatgcaaaagtaactggttctctgcgtgtgaaagttactgaagcgtaaaaagctttcataacgcagaatgagtcctgtaattgaattgcggaaaaaacaaattaaaagcaacataaatggatgacaaagatccgtttgataaattttagagctaaaggagcgacagaggtatggaagaagctttggtaaagcgtatcatgccgcatagtctggaagcggaacaatccgtcatcggttcgatgatcatggacagagatgcgatcctgacggcatccgagcagctggtcaaagatgatttttaccatcagcagtatgggattttgtttgagacgatcacagagctgttcaacagtggaagcccggtagatctgatcactcttcagaaccggctccgtgaaaaaaatgtgccgccggagatcagcagtctggaatacgtcggagatctggtcactgccgttccgacatctgcaaatatcaaatactatgcggatattgtaaaggaaaaagcagttttacgaaaactgatcaagatcaacgagcagattgcagacacctgttatctgggtaacgagagtctggagacgattctggaggatacagaaaaaagtattttcaatttattgcagagtcggagtaacagcgattatgtgccgatcaaacaggttgttttaaatgcgttggataaaatagagctggcatcccggacgcagggaaatgttaccggaatcccgaccggatttatcgatctggattacaagctttccggtttgcagccttccgatatgattctggttgcagcacgtccttctatgggtaagacagcatttgttttgaatattgcacagtatgcagcgtttcatgaaaatatggcaacggcgatcttcagtctggagatgtcaaaggaacagctggtgaaccgtctgttttctctggaatccagagtggatgcccagttactcagatccggtaacttatcggatgcagactgggaaaaactgatcgaaggcgccggaaccatcggaaagtctcatttgatcatagatgatacgccgggtatttcgatttcagagctgcgaagcaagtgtagaaaatacaagctggaacatgacctgaagctggtcatcatcgattacctgcaattgatgtccggttccggcagatcagattccagacagcaggagatatcagatatttcacgatccttaaaacagttagccagagagctgaatgtgccggtgatcgcactgtcacagctgagccgacaggtggaacagcgaccggatcacagaccaatgctttccgacttgcgagagtccggagccatcgagcaggatgccgatgtggttatgtttatctatcgtgatgactattataacaaagattcagaaaacaaaggtattgcggagatcatcattgcaaaacaacgtaacggtccgattggaaccgtgaacctggtatggctgccgcagtatacgaaatttgcaaacatggaaaaataaagtgtgaataaggaggtacaggggatgcaaattcatcagtcagcagaagattatttagagtgtattttgaagttgagcaaagaacttccggtggttcgttccatcgacattgcaaatgaaatgaattactccaaaccgagtatcagtgttgcaatgaaaaatctgcgcttaaatggctacattaaagtagacaacagcggttttattactctgacagaaagtggtatggagatcgcttctaacatttatgacagacatctgatcctgcgcaaatggcttgagtttcttggaattgatccggagatcgcagagcaggatgcatgcaagatcgagcacacactcagcaaagagacttataccgcactgagaaaacatatcttagacgaaatgggagaactgtaaagaagaagcagaggttcctggttttgatgaaaatcaagatcaggggcttctgcttcgttgtttctctcagtcttattaaaacaggcatgattgtctgtttggttggcaaaggtttgtgccggcacactgtcttgcaaaaataagaagctgttttggggaaaaacagagaaaacaaaaaataattttttgtgctggattacaaaaatattgtgctgagtgacggaaatggtttcaaattatgcaagaaacacgtaaaatcacgcttaaatgtgaaaaatatgacaaaattaaaaaaaaatattgcataatccttcataagataataaaatgatgatgttgagattattaaaaaaaaggagatacgagatgagctacgtagacgaagtactcgagagagtaaaaacaaaaaatgctgctgaaccagaattccttcaggcagtagaagaagtattggaatccatcagaccagttgtagaagcaaacgaagagctttacagaaaagaggcaatcttagagcgtatcacagagccggacagacagttcaagttccgtgtagcatgggttgacgacaatggtcaggcacaggtaaacacaggataccgtgtacagtttaacaacgcaattggaccgtacaaaggtggtctgcgtctgcatccatctgtatatcttggaattattaaattccttggtttcgagcaggtattcaaaaactccttaacaggtcttccaatcggaggcggtaaaggtggatctgatttcgatcctaagggcaaatctgatcgtgaggttatggcattctgccagagctttatgacagagctttacaaatacatcggtgctgatgtcgatgtaccggctggtgatatcggaacaggtgcaagagagatcggttatctgtatggtcagtacaagagaatcacaagattgtacgaaggcgttctgacaggtaaaggacttacttatggtggatctttagcacgtacagaagctacaggttacggtctgttatacatgacagaagaacttctgaaatcccatggacaggacatggcaggcaagacttgcgttgtatccggtgctggtaatgttgcaatctatgcaatccagaaagcacatcagttaggcgctaaatgcgtaacatgctctgattctacaggatggatctatgatccggaaggaatcgatgttgatttactgaaagaggttaaagaagtaaaacgtgcacgtctgacagagtacgcagcagctagaccaagcgctgagtatcatgagggacgcggcgtatggagcgtaaaatgcgatgttgctcttccgtgtgctacacagaacgagttgcttatcgatgatgcaaaagcattagttgctaatggctgtatcgcagtttgcgagggcgctaacatgcctacaactctggatgctacacagtatctgcaggagaacggtgtatacttcgttcctggtaaagctgcaaacgctggtggtgttgctacatccgcacttgagatgtcccagaacagtgagcgtttaagctggacattcgaagaagtagatgcaaaactgaaagacatcatggttaacatctaccacaacatcgatgacgctgcaaaacgttacggcaaagagggcaactatgttgcaggcgctaacatcgcaggtttcgagaaagttgtagatgctatgcttgcacagggtgtttgctaatcattgaaatcttgaaaaaagataaaattggcatacattttgcttgataaaaatgaagagactgtgggacagaacaactgttccgcagtcctttttttgcgtgaaaaaacgaccaagaaatgataaaaaatgcatgacatttcagtaaaagtaacggtttttgaaaagatgcttgtcaaacatagaaataaggactaaactacaatagtgtattagacggaggttaggaaaaacgtatgagtaagaaagaaattgtcattgcagatgtcgtaaataagtacgataatccaattgcagagttagtacaggtagcctgccagttttccagctcactgtatctggtgcgtggaaatcatcgcatcaatgcaaaaagtattatggggatcatggctttcaacccgcacaacggtgtggaagttgaaattgaggctgaaggcgcagatgaagcagatgctttaaatgccatggaaaaatttttgctctgtatgtaactttatagtatatcagtttagtgaagaagcaccggatattccgatgcttctttttttaatccaatttaagtacgtccttcattcaattctgcaaaagtaataaataaggagacttccctatatcaggaggagatgcaagattcttctgactcaaaaaagagcgcccggtcggacgctcttttcttatgatcagatttgaatattactcctcatcctcttttggaatttcccctttgtatttagcaactagagtctggattctctgatatggatcaagcaggtcgctgatagatgcatcatgatttaatgtatcaatgatgtaagcgatatatttgctcatatcacagctgatgtagtaatctctgcttaacagttccggtgtctggtaagtaaggttggttgtaaccactttgtagatcagaccttcctctacggctttatcaaatttctcaagaccgtttgtgaacagaccgaaagtagcgattacgaagattctgccagcgttacgtttctttaactcacgggcaacatcgatcatacttccgccggaagagatcatatcatcaacaacccatacatctttgccgtccagagaagaaccaaggaactcatgagcgacgatcgggtttgtaccgtctacgatgtggctgtaatcacgacgtttgtagaacatacccatatctacgccaagtacgcttgcaaggaatacagcacggcttgtagcaccctcatccgggctgatgatcatcagatggtcattgtcgatctggatgtcatctacgctgttcagaatgccttttacgaactggtaagccggctgaacggtatcgaatccgtgaagcggaatcgcattctgtacacgcggatcatgtgcatcgaaggtgatgatgttgtcaacacccatgctgatcagctcctgaagtgccagcgcgcagtccatggactcacgtgcagtacgtctgtgctgacggctctcatacaggaacggcatgataacagtgattcttcttgctttaccatttgctgcagcgatcatacgtttcagatcctgatagtgatcatccggtgacatatgattctcatttccgcagagtttgtaagtaagagagtagttggtaacgtctgtcatgatgtacagatcgtatccacgaattgtttcatggatcataccttttgcctcaccacttccgaaacgtgggcaggatgcgttgattacataggtatcacgcagatagcctttgaacgcaatgtcatcttcatgctcatgttcacggacgcatctccattttacaagatatttgtcaactttctcaccgatctcacggcagctctcaagcggaatgattccgagtgcgccagtcgggattgtttctaagtttctctggtcgttatgcatttgaaaagttccctccatcaaaaaatcttttcgttggtttgtagtttatgttacagcatttcatgaaatttgaaaattaaacttctgtatgctgccagcttccatcaaaaaaagcaggaagcccagtaatacgttggcattatatcactgaacacctgcttatgacaagggatttctgcaattcctttatttttatgcaaaaacggttagttttcgttaagttttttctggatgcggatatcgtttccaaataaatgcaaaacggtaaaattgttgaagattctggaaaaaattcgttctgaataataagtggcaagttctgtcagttccaggttagtggagatcagcgtagacttatgattcaggatccgttcgttcaggcagacgaaaaactgtgaggttgtcattgtgttgatggcttccgttccgaggtcatcaatgatcaacaggtcacagtcgaaaatattccgatagtctgcggctgaaaactgagacgtacgtccaaactgttgatccgtcagcagctcaaagagctgatgtgcggaaaaataaatgacagaatgaccagtatccaacaattcctttgctacacagttggataaaaatgtttttccaatgccggtatctccaaagataagcagattctggaaatcatccggtttttcaaaggagcgaataaaatttcggcactgtgctacggcattttgcgcggcttccagaggggtatactgtgtcgccggatcgatcatatcttttgaatccgaatagtaatcaaaagaaaaattggaaaaattttctgtctgcaaaatattacggagattggactgggtatataccagatcaatggatgcctgtttcagacagtgacaccgctgattgttgatataaccggtatcctgacaatccgggcaggtatatgccggctgaagatagttctccggataaccgtactcttttaacagatcggtccgctgctgacgaagatgctggatctttttgtgcagatgttcctgcgcggaagtatcgccgctcagaagctgttttgcagtcgcaacgctggatctggcaatccggctgtcgatctttgtgaattccggatcaagccgggcaagttcctttttgcgttcatcgatgagctgctggcggtctaactgccgtttttcataagtacgcatgatttcgtcatattgtgtattggtaagtggcatagttcatctcctttacgtgataaaaagggaaaaggcggtaattactgctgtcaggactgcgtttttttatttaacagtgatttttgcagtaattgtttctgaagcgcttcataatcattgtcacgctgctgaaaattaataaagcggttattgttcggagcagcagatttctgcggattgcttttctgcgactgctgataaatgctgtccgattttgcaatgtcatccagtgtatgcaccccgttctcatgccatttcttcagaatagagtttgcataggcaaaattggcctcgtgggtgcttcggatcgtccggctgcatgcttcctcaatgatttctgtggaaaagcccatacggtctgaccattgctttagaaaattctgctcttcgggaaccagattccgtccacgaatgccgaaggccttcagaaccgcataatataaagaactgccttgattcatcgctgtcttggcttctttcaccgttcggatattgcgggcggcaaaatcctctgcaactttctgcatgtagtgcagactggtttttccttttgccacgcagttttcaatgatcacttcaatgacctctgtggaaagcttcagttcatcataccagaaaaagatggtattcagatcgctttgtgtcagcgtgcgtccaagatactgttcggtgataaaaatcagttcccgcacattttcccgggagacaaaggttcgcatttcgtccattgtataggtgcgtctgccgtcacttgctgcctgaataaaacgatctgtgacgttggttggttttgattcttttcccaccggtgtcaaagtttcttttttctgtgtgtcagctgccggaaaagcagatggcatcgaaggcgcgatggcactttgcgcactcaggacacggatgcctgccagattctgatcttcatcaaattctagacggaacagccgtagtttttcccaatattttaaagcacggaggatatcgcgctccgtgcagtcaaaatgatccgcaatagcagaaagggaaacattctgtgcggactggttcaggttccggaggaggtaaagatagatctttacatactccccgttcgcctgtgtcatatattcatcaataaaaatattcggcacaaaagttgcagatgccggctggtcattatataacgtaatatttgccatgttactctctctagcgttttcctaataaatgttctccgacctgataaatgtcgcctgcgcccatggtgatcaccagatcgttgtcgtgacattcttccaaaagaaagttttcaatggcatcaaaggatgggaaataatagctttcggttcctttgtgacggacatcatctgccagatcttcacagtggatgccaagggtatcggtctcacgggctgcatatacatctgcaagtaccaccacatctgccagtgcaagggaatctgagaactgattccagaatgcctttgttctggtataagtgtgtggctggaagacacagatgatacggtcgtgcggataattgcgtgctgcagtcagtgtggcagcgatctctgtcggatgatgcgcataatcatcgatgatcgtgatgctgccaagttttcctttgtactcaaaacgtctggctgtaccgccaaaagactgtaatccgcggatgatggtgtctgtatcaaatccggcttctgttgcaaaggcgattgctgccagtgcatttgcaatgttgtgtttgcccggaacatttaaggaaacatgtcctgctgcctgtccatgtgcgttaaaagtgaaggaagcacatgcttcttcattataagtaatatctgttgctgtgtaatcggcatcctctgtcaggccaaaggtcacgatacgctcttttaagtctgcggtgatttcctccggatggtcgatggctgcgttcaggaacagaattccgtctgctgcggtattctgcgcaaatttgtggaaggagttgcggatgtcgttaatatctttgaagaaatccatatggtcttcttcaatatttaagataatgctgtatttcggatgaaaatttaaaaagctgttggtatattcgcatgcttctgtcagaaatacatccgaaccgccgacacggatatttccaccgatcgcatctaacatgccgccgacagagatggttggatcactgtcagctgccagcaggatatgagagatcatggaagttgttgttgtcttgccatgcgttccgctgactgcgatggattttgcataattatccattaactgtcctaaaaactgtgcgcgggtaagcatcgggatgcctgcgtcgctggcagctttccactccgcgttatccggatggatggcagcagtgtaaaccaccagatcaatgtcatcggtaatgttggaagcgcgctgtccgatatagacttttgccccattctgctccaactgttcggtcagggcagatgccttgttgtcagatccggatacggtaaaaccttcctttaataatatctctgcaagaccgctcatgctgatgccgccgatgcctataaaatgaatatgaattggtttttcaaaattgattttgtacatatttatctaccacctgtatattttctaaatctcataaatgtgtttttttcgattatactccataggggaaaagatggcaatgtctgttttgcgaatgtctgctttgcagatcatgtgcgtgaactgggtttatgatagaactttatgactggtaaagatgatacgaacagtgtaatccagatatgtgcaaaattcagatatgtgtaaattcagatatgcgtaaattttgacaatacaggtgcaaattcagacgttgcaacaaaaaagaaagtgtggtaaaatctaataacatcatttgtaaaaaataattccagtgttggttagaccaaaagttgtgaaaaatgtcgaaaaagggcgataattttagtaaaaattgtgaaaaatcatgcacacggacgagaaaatatgttataattttcctatcaatttaattttttaaatagcctgagaaaaaagtaatacgcaggctattggcaagaggtgatttacatgattcgaaaggaaatgatcgcaatgcttctggccggaggccagggaagtcgtctgggagtgttaacagcagacgttgcgaagccggcagtggctttcggagggaaatacagaattatcgatttcccactcagtaactgtattaattccggaattgataccgtaggtgtgctgacacagtatcagccgctgcgactgaatacgcatatcggtattggtattccgtgggatctggatcgtaataacggtggtgttacgattctgcagccatatgagaaaagcggcggaagtgaatggtattcaggaactgccaatgctatttaccagaatatgaaatacatagacagctatgatccggagtatgtcctgatcctgtccggagaccatatttacaagatggattatgaagtcatgcttgattttcataagcagaacaacgcggatgttaccattgctgttatgccggttccgatggaggaggcaagcagatttggtatcgtagttgcagatgaggaaaatcgaattcaggagttccaggagaaaccggcagaaccgaagagtaatctggcatccatgggtatttatattttcaactggaaagcattaaaggaagcactgatcgcaaatgagaccgtggaaaactgcgatttcggtatgcatgtaattccatactgctttgacaagggtgagcgtatttttgcctatgagtacaatggttactggaaagatgtaggaacacttggttcttactgggaagcgaatatggagctgatcgatctgattccggagttcaacctgtatgaagaatactggacgatctataccaagagtgatgtgttggcaccacagtatatcgctgctgacgcaaaagtagacaagagtatcatcggtgaaggtacagaagtgtatggcgaagtacacggatgtgtcatcggtgcaaatgttaccattggaaaaggaagtatcgtgcgtgattccattcttatggaaggcgtgaccatcggagagaatgttgtgatcgacaaagcgatcattgcagaggataccgtgatcggtgacggtgcggttcttggtatcggcgaggagaaaccgaacaagctcaaagagagtgtttacgcgtttggtctggtaaccatcggagagaaatccgtcattccgccaaatgtaaaaattggtaaaaatacagcgatcgcaggtgtgaccacgccggaggattatccggatggattgcttgacagcggggaatatattgttaaggcaggtggcaaacaatgaaagcattaggtattattttagcaggtggtaataattacagaatgagagagctttccgacaagcgcgccattgctgcaatgccggtgggcggcggatacagagccattgatttcgcattaagcaatatgagcaattctcatattcagcgagtggcagtactgacacagtacaattcccgttccttaaacgaacatttgaattcctcaaaatggtgggattttggtagaaaacagggtggtctgtatatttttacaccgacgatcaccgcagacaacggtaactggtaccgcggtacggcagatgcgctggcacagaatattgatttcctgaaacgaagccatgagccatatgtcatcgtggcaggcggcgactgcgtgtacaaactggattacaacaaagtgctggattaccatattcagaaaaaggcagacattaccatcgtgtgcaaagatgtgcctgcaacagaagatgtcagccgttttggtgtggtacagatgaatgaagaatccagaatcattgattttgaagaaaaaccaatggtggctcagtctcatacgatttctaccggtatctatgtgctgcgcagaagacagctcatcgagatgctggagaagagcatggaagaacatcggtttgatttcgtaaccgatattctgatccgttacaaaaatctgaaacagatttacggatacaaattggaaaattactggagtaatattgccagtgtggagtcttattatcagacaaatatggatttcctgaaaccggagatccgcaaatatttcttccatcaggagccgtatatctactccaaggtggatgatcttgctccggcaaaatacaatgtgggagcagaagtccgcaacagcctgatcgcaagcggatgtattataaacggaacagtagaaaattctgtactgttcaaacaggtatttgtaggaaagaactgcgtaattaaaaattctattattttgaatgatgtttacatcggagataatacgcatattgagaattgtattgtggagagccgtgatacaatttgcgcaaatacatatttgtgcggcgaagatgaagtaaagattgtgcgtggacacaatgaacgttacctcatgtagaacgccgtgtacggcagacgggaggagaccgacattgatgtgacagcttgagaatacgcaccgccctgctgtggagaaatacaaaaacacaggggaagagaagtatgaatattacagatgtgagaattcgaaaagtagacaaagaaggaaaaatgaaggctgtcgtatcgatcacgatcgataatgaattcgcagtgcatgacatcaagatcattgaaggtgaaaaaggtgcattcattgctatgccaagccggaaaaatgcagacggggagtacagagatgtagcacacccgatcgattctgagacgagacgacagattcaggaactgatcatgcaaaaatatcgtgaagaaattgcggaagcataaatacttgtggtatactgttatccgcaactgcacagaaaggagaatcctgcattgcagggttcttctttttgatttgtatttccagcaagtcaaaaagaatgtgaggatgcgaccagatgtaaggggaagatacctgctgaagcagattgcatctggtgcaaaatcagaacaaatcctgatagattaggaaaaatgaacggttgcagaggatttttctgattttaatggaatggtagatatagatacaggaggatg

SEQ ID NO: 13112 - DNA, 2453 bp, Unknown
  gut microbiota DNA sequence
atgctcatccaccgcattatctacgatctcatagatcaggtggttcaaacccttgcgggacacacttccgatgtacatacccggacgcttacgaaccgcttccaggccttccagtacggaaatacttcccgcgtcatatgttactttatctgccattttttcatcctttcaagtcagtgaacaaatgttcactaaagtttttctattttaccacaaaaacgggaatcccgcaaggtggattcccattacaaaagattcattgaaaaggatacaacaatatttacatcttccattaacagatactttccagataatcaactatgctctgccattctttcccaccaactatcagctcataacaaaaaccattacactcaacaatcacaacaccatctcttgtaagtacagtttcagcaaaatcactactggaaaagtatagtgtatattcatcactggttatgctatcgaaaaaagcctttgaatacttctcatttatcggattttcaaattcactgcatattttattgaatgacaaaatcacctcttcatcatcaatgattttactttccagcgattctcctgtctcattgtcctttaatacaattatcattttattttttacagatgtctcttcggatgtacttatttgtgtactactcatctcttcatttgatgtgactgtagttttctctctgctacatcctgatactccaaatatgcaaactatacacaacgaaataatcagaatgatgttcttccctttcatagtatcacaccttcccatgtgtcatcttattcttcctctttcttctgtttatcattttttctctttttccagattttgcgaagcactacgacaaccaccacacaaatgacaacgatcgggagcaatattggcagaccgcccagtaatccaaccataaaattctgaaatccctgtcccatctgatacatattatcattgaattttgctttcacacgttctccaaaggttgttcccgttgtggaactttcccggttcacctcatacagatccagatagacggtactgtaagtaacctgattgtcgtatacgcgaagctgagactcatagctttcaatctcatatcgcacatctgtaatctgagactggatggataaaatatctttcatggatgttgcctgttccatcatggaaaatagcgcatccagttcttcccgcagcgctttgatatgagtatccatatctgtatactgcaacgtaacatcctcggtgctttcactaaatgtccgaacattggacgcatcctttacgccacccacaaaatcatccagtttttctgccggaattcgaagtacaagatatgcataacgtgttgtatccccgccataatttccgccaacatctgaactttccacataaccgccggcactctccgtctttgcccgcacatccgctaccaatgtatcaaactcggtagtctccgctgacatattgactgttttgatcagtttctgctctgtgttaaccccttccatctgttcaaattctgttccattcgtatctgctccctgttctccaaagtcctgtgcactttgttccacggcatcgtctgtatttactgttgcttctgtggcaccatcctcagccgttgttccctcactggctgttttctgattatctgcccgaaaagcaccgaaaccactttcactgcgatttgtggcaccaccgtttgcacttgacattgcgctttttccacatccgattgttaatagcatacatccagccaacaacatacaaagtatccattttctcaaaacagaacattttctcgcttttttcttttctctcatgatccttctcctcctgcaatcgctgctgttatctgacatcaaattcaatctgaattgactgcacatactgatcaccaccatcgatatttccaatagaaatatttttcagcaggcggtaatgccctgcctcaagagaaccgtatacatttgcccagtctacgtaccagtcaaaccaattctgtttatcccctgacttcactaaatgtaaaatatcgtgacatgcgatttcatactgcttttgacactccatccatgtatctgtcgcctcatcataaacttctatgccttcgtaatcatctccaaaactaatatcttcatcaccgttatttgtcaatcttactttcagggatgttggtgtcacttctaacacttttatatccacattctgtgcaagtatccccgtagatgctgatgcgtcttcctctgtgcccgccgaatcctgactgctttctgtttctttcttatcctcatttaaaacattagattcattctcctgcgtatccgaagcatccacgtttccacttattgtatcagcataatctgactttcccatttcagggctttcctcctggcttgccgtttctgttttgccagttaaagcagccgattcattctgcgac

SEQ ID NO: 13113 - DNA, 3023 bp, Unknown
  gut microbiota DNA sequence
atctcagaccagcaggtgaaagcagtaacagaaccggaattattgctgctggatgagattacggcaaatctggatgcggaaacagaacttgaaattttacaggcgttaaaacgggtatctcaaaatcgtaccgttatctctatttcacacagaacatcagcggagatgggacgcattattgaaatataatgagtgcaagagtgtcaacgtgctggcatgatataataccagatgtcgattttatgcggaaagtcacgtttttgcatgaattggatagaatatgtattgaaaaaggcaaattttatctgttcttttcactttttttgtattataattgtacggaaaaaggcggaagttgagtatgaagcaaaaatataatagtaataggatgcaaaaactgatctgtcttttcttgcttgtgccactgattctggggattacaatcagtggaatgcgtgcttcgactcaggcattgtaccgtgcatggaatctaaaggcctacagcatggaagatgtggcatgggaatgtgaagtactggatgaaaaagaagaacggaatgaaaaggatagaggcaatctggcggcaagtcaggtgcagaatatccgccatacatacggatttgaaaatatggaggatacaacatccttttcacagcaggagagagcagaacataaaaacatagatgttacacggcagatcgcgcgggatcgggcattgcttggcatgccggagatggaattaaatcatgtgatctgtctggatgatgaggacatggatgcgtgtctgccccgggcggacgagtatcaggtctggtatgcagaagcggatatcgggcagaataaaatggttcgtatttcggacaccgaaaatgtgacgatgctacacaccggttacattataaataagaatatgaaaaaaggatatccgttgaaggaaaatctggaaccttccggagaccatataagcagatacaatgacaatttttatctgatataagagattcatttggggatgagtggcaaaactgccgatcgatatcagataggatgggggattgactgattaaattgtgatgaattagattttaaagatatgactggaggtatcacaaatggacttaggcaattcaatttcattgttattttgcattccgtttcttggaatgctgcttagtatcgcggttttcccgctggtaaaaccggcttggtgggagagaaatcagaagtatgcggttatcgcatggtcactgctgtttctgatcccgtttgcaatccgttacggttttggcgtaatgggtgagcagttactggaagtaattgtaggtgattatttcacctttatcgtattgttatttggacttttctgcgtagcaggaaatatcaccatagaaggtgaactcagcggatcaccgaaggtaaatgtgatcatgcttctgatcggtacgttgttatctagctggatcggtaccacaggtgccagcatggttatgattcgtcctctgatccgtgcaaacaaatggcgttccagaaagacacaggttgtagtgttctttatttttctggtatccaatatcggtggatgtctgacaccggtaggagatccgccattgctgatgggctttatgcgtaacgttccgttcttctggagcctgcgcctgatcccgatcatgattttaaatgttgcaattttacttgtgatcttttacattctggattccagagcatatcgtaaagatctggcagatggtatcacaccggaagttcagagcggcgataaagcagcaatccgtgtcgtaggagcacacaatattattttccttgcagcaatcgtagtagcagttattttgagtggtgtacttccgtccacaaaggcattcagcggcggaatccacatttatggagaggtagagcttacctatgcagctctgatcgaggttatcattattctggtggcagcgttcctttccttcaagacaacaaataaaagcgtacgtgaagacaaccatttttcctggggagccattcaggaagttgcagtgcttttcattggtatctttattactatgattccggcgcttctgatcctgaaagcaaaaggtgcagagcttggattaacccagccgtggcagatgttctgggtaaccggtgcaatgtccagtttcctggataacacaccgacctatctggtattccttaccactgcaggaactctgggagcgaccgcaggtctgcagaccagtgtcggtatcgtaccgcaggttatgctggaggcaatctcctgtggagcggtattcatgggagcaaatacgtacatcggtaacgcaccgaactttatggtaaaatccattgcggaagagaatggtatccgtatgccgtccttctttggatatatgacctggtcgttgcgatttttgatcccggtatttgtggttgatatgttaatattcttcctgtaaaaattaaatgtcctgtatgttatagattctgataagtttttgaaaaagaatctgagaacatgcaggacatattttttgacgaaaatcttaaaggttgattgtgattacagagtgaaaaagtaggaattgattttcggaaaagtgttgacatcactacagtaaagtgctattataacaaaaaataaatgacatgaacgaaaatcaatgaacaaaaggagtacctttatggcactgctttacagagagccggtggtggtgagattccggcaggtaagtataaagggaatggatttgtgagatgcaaagcgaaagcaaatagtaagtgtgcaagtagcggatgccgtgtcctcacgttacagaggaaagatatcgaagagattccgtatcggattgaggttgtgtagcaatagaatcgttgcagaaaagcacaatgaataaagggtggcaccacgaaatgtatattcgtccctgactgtgaaagttcacggtcagggattttttatttgataggaaattacaaggatttcctatcaaataaaagcacttcgtgcagacgatgcacactca

SEQ ID NO: 13114 - DNA, 307 bp, Unknown
  gut microbiota DNA sequence
gtcaagatttagtacaagttaaaatgagaaatttctccccattttaacctgccagaagctcagcctcagtgttcgttctttcatacacttgttcgaattcgtttggcgacatatagttgcaatggctatgaattcgtttcgtattgtagaaagcttccagatattcaaaaatcaactggtatgcttgcttataatctcggattttaaagcgattgagccattcacgtttgataacagaatgaaaggattcaatgcatgcattatcccacggaaaagctttcttcgagtagctacgctgcatattttc

SEQ ID NO: 13115 - DNA, 14524 bp, Unknown
  gut microbiota DNA sequence
tgggagtcttctcgactgagataaaataatttctataattcttcttttttcttatacttacgatataaactaacactgatagccactccagctgcaacaataattacgaccacgtaaagtgccggattctgcatatcaccggtttttggtgcttttgcggttacggctgtggctgtttttaccgatgttttggctggtgtttcaatggttcccggagtttctgtggttttccacttgttttcaaatgtgatctggctctgttttccggattgccccggatgaactgcccacatttcggcttccaaaccgccattttcggcatttgtcacacgaactgttacatcatattcggtagcatcgtatgtgatgttctgatctgtgccgctaagctgccgaatgtggtattcatagtctccaggtgttgtatacagaatggagtcaaatgtcccgctcccagttgccccaatctgtatctggttctgctccggcattggaaggtctgtccgtccgtctgctgcctccattacgactgtaaaagccggattcttctgcgtctgactgtcagatccattacctgtcattttcactgacactggaattgacaccgcacaggtcttttccgccgccatggcaggtaacgcaaataacagtgcacaccagaagagcagaaccatggctaacacaaagatgccaccttttttgctctccacgattttttcaacaaccaggtttccagttccattcacattgtctttttgcacgtttttctgcttcatttcgcacctccttccacacatttttagtcctattcttttttcatcaaaacaacactactttcttctagcagaattattcagaaaactgtttcactattttcaaaatacagctatttctgcttgttatcagaggattcctgcagttttccaaataacaccacccttccgtttgtggcagattccgcacaggtagatagagcgatcacagaatcctgcgatgttacaccaatgtctcgatactgcaccgcatgttcctgaacatactgcaaaagctgctgcatctgcccggtcgtatccggttccccgatatatccatagatctggctgtccatcgcatctgtctccacacaggcaaaaaatgtaatggaacatgttttttccggcaaatataaggttccggtctcatgcgtggcaaaatattcttcatcggcaaattccaccacatcaccaaacatggctccattgctcatatgatgcccataaatcagattatatggatccgaaaaatccggttgattcgcactctgcagaaagattgctcctgacagtgcaaagtctccatatacatctttattgatatattccatatcatctttcccacgcaccaccgggtaatcgatgccggtatcatacaccgtcagccatgcacagacatctgcattgattttttgcagatcctgcaaagagggattgctatcctccccctttacaggtttcagtttcatcaggtcctgatccggcagtgcactgtgataaatgcgccaggtgtcccacagggaatagccgccgtacagaaacaacaccgtcatcaggcaggcaacaaatagattcatactacgattcgcaatccgcagcagtttttctgcaatggttattctgcggtcatttgctgcttctgaatttgaatctgcattctgcatatttactttttccagttgttccgtttttgtttgtaattccctgcttcctgtcattttgtatcactgttctttttcatgttctgccgctgcttttttagctctgcggtttcctgttgattcaatttcgactgcttaagataatttttttctgcgaaagaacagtgctccaagggcagaagccagacctgcaagcagtgcatacggagttacactgagtgcaatacctgtcggagataccgttttcttcgtatttgttacaacaactgcgttatctgctttggtcatttcctgagaggttgctgttacttttgcagaagtgcttgctgcggtatcttttgcaatactctgggaagtgccggttcctctttttactgcaaatgtggtatcgtagccttcggaactgctcacattctctgttacggtataagttacagtggatggaatacccttgatttcagcaattgctgttttatctgccagatccagacttacagagccattgccctgtgcatctaaatccactttcttatctccaaaagtaaaggatgtgtttgccgggcccttgaaattaattgtaaaattaaacaactggtccttgttacccatatttccttctactactttatccagactcagctcataggtggtgtaagcgtctgtgatattgctgttttttccgccatatgtcggctgttttgtattcttatcaaaggtcggtgtcactgcggtttctgtaaatatagtggcatcgattttgtaaccgccatcgctgtcatttactacataaacgtccatataacgtgtattagtgcccacatcagtaatatctgtattggtattttcactttcagtaatcacataacgataaatgccaggagcggtaaaagttccatccgggaatgtgatggatacgttctttgtcactttgttctgtgtgattgtgtcaccctttgtataagttacgctcgaaatagttggtaagccaacacctgctttgacttccggagaatttgctgttgcacctatcgcacttcccgctgtaatggtataagtataggtcacattcggtacatttgcgccctctgcgttttccatttgcagcactttctggaactgaaccacactgtctccggtggctgccatcgccgggatctgcattccgccaaacatcattactcctgcaactgtcagtgctgatacacgtccgatcattttctttttcatactcttttaccttccttttcaaatccatactatttttgttcagcttgtttgatgaaattcttttcttcgtatatttacaatccatcaaaggttatatcagagaagaaatcaacttccaccactgatatcactttctatcaaataagctctgagtatttcaccgttctcttaatattcgctcatttcctatagcgaatttcgtcgaatcacagtgataatttttccttttatctcacgtgtatccaccgctccaaaataacggctgtctgttgcaccttcccgataatcgcccagtacaaaatattgctgctcctgcaattgcaatggatatatgacatcactttcgtattgcggagtctgataaaaaatattttgttccagtacgacactctcgttgaccttcactgttgcctgttctgtaatttctaccgaatcgccccctttcgcgacaattcgtcccacgtactgctgatcgtcttttttataaacaatgacatccccggcaaccggatgtttatccagtcgataatacaacaccagatcaccggcactcatgcggggtgacatatcttcatttttgactgtggtgattccaaacataacaccaaaaaggagatacaaaattccaatcaaaatcagcagacgtatcagaaaccagcgccattctttttgaatagccacatcctgtttttccatcgtttcagtttctgatgttttttttcccgaaatcactttccttccattacttttcataaatctttccgttttctaccgtggttctttcttgattatattcacctcaaacaaatagccaccattcctttaatctaattactatgcaggttcatttcattaaaaacgtgaatgttttctacgtttgctgtaaaccagatatactgcgccaagtgccagggcagctcccatcaaaattcccataggaattgcattattctgaactcctgtcggtggtgacacaatatcataaacatacgtgtttacaatgtttgcaatcgcagttttctgatcctgcaccattatggttccttcggctccctctgtgccgttaaatgtcgcatcgacccggtagtttggaatcgccgccggcaaaatttcctcgatccgatacgttccagctgccacatttgtttttgtataagtgcaggaataagaaccatcgtcgtttctggtaaactgacttaaggaaaccgtttccgacttctgatccggtcctgtaattttcacctgcagctgataagatgctgcctgatcctccgtcagtccacgtactgttttgacaatctgcaaatgtccggtatccggatttggatctggaagtgtctcactaaaggacacgttgtccagatgatttccaacggttccagcttttgtcttaccatcaccaccatttttatcaaatgcagtttcgcctgcaacaaagaaaaatcttgtcagatactgattttcgctgacatcataatccccagtgtgacgataccactgcacgttatcgtccgtgatggttgccaccgaagctcccggatattttccggtattattttgcacatttgtgataacatcctgcactttactctgagtttcaaccttatattgttccgccagttttgtagacataatcaccacgtacatcatatctttctgtttactgtcattcgctttcgtaccacgtccgcgatgataaagctgccagtaaagttttgcccccggagtagtcagtacatcctgatacagcgcacctggttcgtttgcattcaattctgcaaactgtgttccactggctgctgcctctaccttatgccattccagagactgctgtgcatgtgtctttccggtatctttgtcaaacttatctgtggcagcactgacatactcaatttctgcatcctttgcagttgtcttccagatgagccctggagttccgttggaataaaacggctgataaccagtttctttggttgtcaccggtgtttcaaaatctccattttccagctgattgtagtagctaacctgaagtgccgctgactctgccagaagctgaccggaagcgtcctttacctgaaccttgtaaaaacaacgggcgcctttatccagcgcaacattcagagcggttccatcttccgatacattgtaggaatttccggttactttatgccgttctacctttgtccatgtattcgtcccttcggcatgcttgtaccattccagagtgattccgtctgactgctcaccggtaacctgtgcatttaaagttccggaattttcaatgttatctgtaattgtgacagaaacatttcctgctgccagaggttccacagctgctgcattttcggatgcattattttctacatctgaaccatttacagtttcacctgtttgattctcagcatcgctgtctgtagtttttgttgcatcttctgcagatgaattttctgcattctgtgcttcatctccctgcaacgattccttctgatccatttcagagtttattttttcctgcaaagtatcctcggcttctacattatcattctgttccttctgtgattcttccgtttgtatttctgttaaatttatctcttgtgcattgtgttgcatgttttcttccgtggaagcagtttctcccacatcatcttctttctgcgtaccgtccgcctgcatcacaaccgtctgcgcctgattggaagtacctgcgtttccagattcttccgcctgcacagatgccccggtcagtgaaaaaagcaacagcaacgccagtaaaaacgtgagaggtcttttgaattttcttcgcattccaccatctccattcccgaaataaagccagattcccttttaacccaaagttccacttttatttctaggtaatttatatgcagaaaggcaaaaaaatatgacaggaaatttgaaaaattttcctgccatacaataatttactcaatttttattttctatacacatttgcacaaaccaataatgtacttgtaatccagtcacaactaatctatattctgggcacgaattagtcgcattcaagaaaatttctcaggagctctttataatctacgcatggactcgtttttaaatgcatcccgctcccggcttttctgaattttctccagcatcaccgaaatgtcccggttcagattgcccgacagagaaatataatttgaagcgtgattggaacgaaataccgttccttccgaatctacatgtgtcaaaaacagctccatctcctcaagcacctgcgccggtgtcagaagctgcatcgcaccggattttacttcctttagcatcggtgcacccggctctaaaagcagcgtcagaaatcccagataatccggtttcatcgctgtgattagttttgcagatgcaatcgcatgctctttcagcaatttctgtccaccaagaccagagatcagcgtcacactgagccgaatccctgttccacgtaaccgctccgcggcctgtacatattcttccaccgtcacacctttgtgaatatgttccaaaatctccggacttccggattctgcccccagatagatcatatcaagcccaagttcatgtaattcctgaagctcttttttcgattttcgcaaaatatcctgcgcggttccataagaagtaatgcgctctgcctttggaaaatactgtctgcacaaacgtaaaatcgtacacaatttttcctgtgacagcaccagtgcatccccgtctgccagaaaaatccgcagactgcgatttccgtaataatctcgtgcttcttttaaatcttcttccacttcgcgcaaaggctttacatgaaagcttttttctttgtacatcgtacaaaacgtgcagctgttgtgcgcacatcccaccgtcacctgcaagatcaggctgtatgcctcacttggcggacggtaaatcattccttcgtaattcatatgtctcttctttccttctgcggcaccaggaagataaataccagtgaactaaacaacagcagaatcggataaaataacttcggcataatttgaaatgccgacagatcatatcccaattcatgcgctgcggaaattgctaccagcatctgcgcaccatacggaataattccctgcgaaactgcagaaaacgtatccaaaatcgatgctgtttttcgcggtgtaatgccgtactcctccgccatctcttttgcaatcggatttgccataacgatagctacagtattatttgccgtcgccacatccatagcgccaaccagcagtcccataccaagctgaccgccttttttccctttaaacactttatggatgcctgccaacaatgcatcaaatccgccatattcccggatcaatgcgcaaagcgctgccacaagaattgccaccatacaggtctcaaacataccggaagcaccgtttccgacatttgccagcaaatctgccggactgatatgtcccaccgccagcataatgattgcaccggacacgattccaatcagcaacaccacaaacacattaacgccgataattccaccgatcagtaccagaatatatggcacaatctgaagcaaatgataactctccgtcacggttccagagatatccgtccggaaggacagaatcaaaatcaaaatcagcgtcgcaatcgccgccggaagcgcaatccaaaaattctctcggaacttgtccttcatctcgcagtcctgtccgttgcaggcggcaatcgtcgtatccgaaataaatgacagattatcgccaaacatggaaccgcccatgacagaggccacgcaaagcggcagtccaaaaccggaagcgttcgataccgctaccgcaatcggtgtcagcagcgtaatcgttccaacggaagttcccattgccagagacacaaaacatgctactccaaataagactgccaccgaaaaccgcgccggaataatcgacagcataaaatacgccacactctcggcactgcttcgtccaaccacgccgacaaatacaccagcagtcaaaaagatcagcagcatcgtgataatatttttatctgccagtccatgcgccataatgccaagtttttcatcaaaactgaccttacgattttgcagacaggcgaccaagatcgccaccagaaaagcaaacacgatcggcacattgtaaaatcccatcgggatcttcataacatattcaaataaaataccaagtcccagatacagaaccagaaaaactgcgatcggcaataacgcaatcgctctcccttttctcactaatgcatttcctcctgtactcgtttatttttcatggaaaaactcaatttcttcgccaactggtccccggcagaacgcaatacgcgccggaaacggaatctcagatgcgatttcaatatccttcggctccacaaacacctcatatccggcagcactaacagcttccacacaggcatctgtatcctctactgcaaatgcaaaatgacggattgttcctgtctccagaggagtctcctctgtctcaaaaatttccatcaggccagctccggtatcgtacatgatgccgctgttccagcttcttgccaccggaagaccaagcacctcaccgtaaaactgctttgttttctcaaattcctcttttccacagcattttaatgctacatggtgaattccttttatcagactcataattcaaccattccttttttatttttttattttcataactgatatattaacgcaatttttttaattacacaacgaaaaaaagaactctggatattttttcccggaaaacgacgattagcgtccgggacaaaatatccagagttctcttcataacctgaatttatctcagtctgagttgagactcccacttctgcaagtggtgagtaataacaagtctttctcagtgggagtacaatctccgactgagataaacgctccgcggggatgtgcagtgattctgagaagaatatgtcagctttcgctgaccagaatcacgcaccaagtctcacgtgcgttcgacttgaatttcaaaaattagatattcagcaaatcactgtatacttttaatgctccgtctgtctcatgcgcaagtacgcgttttgccagcactttaccaagctgtacaccttcctgatcgaagctgtttacattccacacaaatccctggaacattactttgttctcaaagtgagcaagtaaagcacccagtgtcttcggtgtcagctgctcgccgatgataatgctggaaggacgtccaccctcgaagtttttattgcggttctcatccgctttaccacatgcaaatgcaacaatctgtgcagctacgtttgcacacagtttctgctggcttgtgctgtcctgaattactacatcggtaccgatctggttgtttttaaatccgataaactgaagcggtacaatgtcagttccctgatgcagtaactgatagaaagaatgctgtccgtttgtaccaggctcaccgaagatcaccggtcctgtcacataatcaaccggctcgccgaaacggttcacggattttccgttggactccatatcaagctgctgtaaatgtgccgggaaacggctcagtgcctgtgaatacggaagtactgctgtggacggatatccaagtacgttacgctcgtatacaccaatcagtgcatccagcatctccgggttctttaataagtctttgtttgtagctgttttatctacttctgctgcaccagccaggaactctgcaaatacatccggtccgaaagccagagataatacagcgccaccaactgcggaagaagaagaataacgtccgccgatataatcatccataaagaatgctgccagataatcatcactcttagccagcggagatgtctcacttgttacagcgatcatatgcttggaagcatccagacctgcttttgcaagggcatcttttacgaaagactcatttgtcaatgtctctaaagttgtacctgatttggaaaccagaatgaagatggaatgtgccacatcgatggaatttaatacggctgctgcatcatccggatcaacattgctgatgaattttgcttccattttgaatttgttatttacttttgcccagttctctaatgcaaggtacatcgcacgcggaccaaggtcacttccgccgataccgatctggacaaccgttgtaaatttctcgcctgctgcatttgtgatctcgcctgcatgtactttgtttgcgaaatcagcgattctctcctgctgtgatacatagaaatcacgtttgtttacaccgtcagcaactacatcattgccaagctgaccacgggtaagctggtgaagtaccagacgtttctctccggtattgatcactgctccgttgtacagagactcatatttctcgatcagctgtgcttcctcagcaagttttgccagagctgcaagcactttttcatctactgcttttgcagcataattataagtaagaccatccatcattggaatgctgtaattttttacacgttctgccccattttccccggacatcacttctgccacattgacaggctctacttttttcagctcctcgtaagaagcaagggtatctaaatttttccagttaagcatgatagattcctcctcgtatctttccttgtgtttgttataattctaacaatctacggaaattatactattatcctgtccgaaattcaaccggacaaatctatttttctatgcaaaatcgcctgaaattgcttcttatttagacacaattttatcataggctttcgatgtgatacgaaataccagataataaatagctgtaaaaatcaggattgtcacaaccagacaggtcacaaacaacggtacattcgtcagattcagcatagccagcagcctgcggatcatcgggaatgctgctgccacatgaatcgcagccatcacaagtggaaggaaaaatacaatccgaatctgggactgaatggtagcctttacttccgcatggctcataccaaccttttccataataatatagcgctctctgtcatcataaccttcagaaatctgtttgtagaaaatgatcatcaccgtaaccatcaggaacatgatgccaaggaacagtcccagaaagaacagaccgccgtacaatacataaaagtctttttcattctcggttctgctttccagataactggtatgggtattttcaccggactccatggctttgctcagtgcttctgcgcaggccagtttttcttcttttgttccatcatattcgaaggaaatttctgtctgatacatgctgagcatgctggaaccatccgcattcattccggctgctttctgaagatcaaaaatctgtcgcaatactgactcatccgcaacgacatagatactgtcatccaataccataaaagaatcattttccgattcgtaggaaaacgtctgatccaccgcataggtctgtccgtacagttgaatcgtgctctgattataaggagttttgctgtaaatgtttacttttcctgcttccggttcaggcatttccgatgctttcagggaacggtctgaagccagcagactctccctggtgataaaagtaacacctgtcatatctgtagcagatacatcgacagaaccgtccagcggtaaaaactctgatccttttactgtcataaatatctgaaagtaactgtagacttctgaatctgttatttctcttccctgtgcctgaatggtatccgccattttctgataaagttcctgtacatccacggtcggatccatggtctctgaccggtccatatagttcacttcgtatggataacgggctttcagttcatcatccactccggcaaacatacttactgtcatggaaatcataaccagaaccatcgtagacagcacacagatgctggccagacctgccgcattctgtttcatgcggtacagcataccggaaacagctgcaaaatgctttttgttataataaaattttttatttttccgcagcattttcaaaatggcgatacttcctgccgtaaaaagcagataggttccgataataaccagcagaactgccaggaaaaattttgtcagtacttccatcggattttccgttgtaatggcaatgtagtacgccactgtcagacacgcaataccggcaattgccatcagtactttcgtctttggctctttttctccgacatttccgccacgcaacagttcaatcggatttgccagacgaatctgtaataaattgtataaaagtgtcagaacatatacaaacccaaaaaccagaatcgtatattcaatacctgcttttgccacatagaaacttacactttcctgaaatccaagcatgcggtaaagcagcatcagaatcagcttggaaaatacgataccagataaaactcctccggcaatggcgatcactgccacaaaaaatgtttcctgtcccagtacttttgcgatatgtcgtttttccattccaaggatattgtacacaccaatttctttttttcggtttttgataataaaactgttggtatagaagatgaaaatgcaggcaaagatggcaataatgccgacacccatactcatgatcattttcagattcgcagcacccgggatcgtcttcatgcccggattattattaataaaaatcatcagataaaacatggccaccgttacaattccggaaatcagatatgggagatataactgccggttgtttctgatgtttgtttttgccagtcgtaaatacagattactcatgttcttcaccacctgtcgtcagtactgtcagcgcatcggatatcttcacataaagctgctcgtttgtggcattgccacggtaaatctgatggaagacttctccatccttgataaacaaaatacggtttgcatggctggctgccttcgtgctgtgcgttaccatgacaatggtctgtccttctgcattgatctgggaaaatagatttaacaaactgtccgttgctttggagtccagtgcgcctgtcggttcatctgccagcacaagctccggccgggtgatcagtgctctggcaaccgccgcccgctgtttctgtccgccggacacttcatatggatatttttctaacagatccctgataccaagtttctgtgcgattggctgaatcctctgttccatctctctgtaatccacaccggaaagtaccagtggaagaaaaatattgtccttcagggaaaaattatccagcaggttgaaatcctgaaatacaaatcccagatggttccggcggaaggctgaaatttctttttcctttacggacaccaggtttttgccattcagcaggacttctcctgccgttggtttatccaatgctgccagaatgtttaacagggttgtttttccggaaccggattctcccatgatcgccacgtactcgcctttttccacggaaaagttgatgttgcttagcgcctgtacctggttgccgccaaatcgtgtcgtgtatatcttttttacattatttacttccaaaattgccatgatgatcactcctttgctgtggtctgcccgacatttcatgattttcataatttcatgtcttgcagaatgtttttatttttgtttcagcatgcttgtttctttgttgagactatcataacaaatgggcggggttcaagccatcgatttgacttacagaatccttacaaaattgtaagatacagatgtgaatcggtaagatagaaaaaaggtatatgattaaacggtaggtaatgaaaagagagcaggatattttgccccggcggctaacaatcgcctgccagggaaaatatcctgctctcttcatctacgttctttacctgcgcaaactgaaaatattctccttactcaagtttttcaaatattacttggtgtttatccctcatatatcggttcaaaatcacttgcatcgtgtccgcaaagaggacatgtgtaatctgccggcaattcacttccctcatatacataattgcagattttgcatctccatccaataattttcttatccttggatatctcttttttcttcggttttacacgattctgataatctgcataagtgagtggagcattgtcattcaacatcttagcatccgtcacttccgcaataaacaaggtatgtgtccccagatcacgctgttccacaactttaccgctgatcacagaacatgcatgccaacccatgtacgggacattattatggtccgtcggcaaaggcagttgatcaaatttgtccacatctcttccagactgaaaaccgaagtgactgattgtctcaaaggaacactgctcgtccaataaactcagtgcaaaaataccactctctttaatcaactcacaggtataattactgttcagtacagaaatagcaattctgatcggatcatttgccacctgcatacaggtatttgtaatgcagccattcgccttttcccctgaacgtgttgataacataaaaaccccatacgataaattataaagtgccttcttctccataaagtaaatcccctctcctttctattttagtaataattactattattataataaaattatatcgtgacggtataccttctgtcaatatgaaaaagtgtcttcgaca

SEQ ID NO: 13116 - DNA, 21405 bp, Unknown
  gut microbiota DNA sequence
aagcgattgaactgatctccaaatctctccgcggtgcagttgaaaatacaaaagagggacgtgaaggcatggctcttggacagtatattgccggcatgggattttcaaatgtaggacttggaattgctcattccatggctcatactctgggtgctgtttatgatacaccgtatggtgttgcatgtgcaatgatgcttccaagcgttatggagtataatcaggagtgtaccggtgaaaaatatcgtgagatcgcaagagcaatgggcgtgcagggcgcagatgaaatgtctcaggaagagtacagaaaagcagccattgatgcagtaaagaaactttctgctgatgttggaattccgacaaaactggatgccatcaaagaagaatacgaaagagctccgatttggttagaatcggagctctttctttgctttgtatattgtaaaaatagagggaaaatgttaaaaaaagttttatcgaataatcaatcaaataacaaactaaaaaatttttacttcttgattatacgtgttcctgttgcaccgttgacaccgtcttttgctttctgcaaaagggtgatgagggcggtacgtccctcgccagactcggcaaattctacacctgcctgaactttcggaagcatggagcccggtgcgaaatgcccttcttccatgtactgttttgcttcatcgactgtaatatcatccagccatgtctcttccggagtaccgaagcggagtgctactttctcgactgcagtcagaatgatcagaaaatcagcatttaactgctgtgcaaggagacagcttgcgaaatctttatcgataactgctccaacaccttttaaatgatttccctgacggatcacagggataccgccgccgccgctggcgatgacgacttcgcctgcgttcaggagatctttgactgtgtcgatttcaataatttctgccggttttggagaagcaacgacacgacgatagccgcgtcccgcatcctccatgacttgaataccgctgctggctactgcggcatcagcttcttctttagtcataaactgaccgattggtttggtcggatgctcgaatgcaggatcattttcatccacacgaacctgtgtgatcaccgtggcaacatttttcttgatgccgcggtttaataattcctcttttaatgcattctgaagatcgtaaccaatatatgcctgactcatggccacacaaacggagagaggtgtgatggccggatgagaaggttctgttttggaatatgcagccattgcattgttgatcattccaacctgtggaccgttgccgtgggagatgatgacttcatttccggcttcgatcagatcagcgattgctctggaagtttcctgaacagccaagtactgttcaggaagattttttccaagggcattaccgccaagtgcaatgacgatacgttttttacccatgattcgttacccccaaatggattagtatattacatcaaaatttaaaaatcagagctgtgaaagactcctcttgaataaagtctaagaagaatctctcacaaaatacagctcagttaattactcaaagatacgttttccagcgcgatcttctaatttctttaagatctcctgcggattctcaaatttgcttaagaagatcatagcagcgatgatgtatggtttgtagcttgcttctttgtaaagcggtgtacgataacgatcgaatacggaagcctcaacctcgccgtctttgcagcttacatcgttgatatctgctggcaggcagtgtaagtataatgctttgccatcttttgttgttttcattaattcttcagtacagcaccagtctttgtgctctgcgttctgagcaagaagctctttctcaagtgctttgattccttctgtatcgccttcaccgtaaaggtttgtacgtttctccatagcagcgaacggagcccagctcttcggatatacgatatcagcatctttgaaagcctcagccatgctgtttacttttgtgaaggaaccgcctgatttctcagcgtttgcttttgcaacttcctcaacttccggcattacatcgtatccttccggatgagcaagtacaacgtccataccgaaacgtgtcatcagaccgatgataccctgcggaacggagagtggtttaccataagaaggagagtaagcccatgtcatggcaacttttttaccttttaagttctcaacaccgccgaattcatggatcaggtgaagagcatctgccatagcctgtgtcggatggtcgatatcacactgaaggtttaccagtgtcgggcgctgctctaagatgccgtcagcgttaccctgttttacagcgtcagatacttcgtgcatgtaagcattaccttttccgatgtacatatcgtcacggataccgataacgtcagccatgaaggagatcatgttagctgtctcacgaacagtctcaccatgagctacctgagatttgccctcgtccagatcctgaacttccagaccaagcaggttacatgcggaagcgaaagagaaacgtgttcttgtggagttatcacggaataaggaaattccaagaccgctctcaaatacttttgtggaaatgttgttctcacgcatgaaacgaagtgcgtcagcgatagtgaaaacagcctctaactcgtcatctgttttctcccatgtaaggaagaaatcgttgttgtacatttctttgaagtttaagctgttgagtttgtcgatgtaatcctgtaatgttttcatttatgtattctccttataaaatagattcggttgagatatattaaaatttagagttatctggttttagggagggaacttcctgaaatcaatgcaggaaggatccctcacaaaaataatgaatgaaatttactccatgtaatttttcggtaatgctgcatatacagctgcgcatgttaccagatcctgtttccatgttttctcgtttggagcatgagcctgagcctcagcacccggtccaaaaccaatacaaggaatgttatttctacccatgatagatacgccgtttgtagagaatgtccatttatctgtaagtggacgagcctgacgcatttcaagtgtctcagcagcaccgatacgctgatctccgtataatgctttgtaagcgttctcgagagattttgttactttgtgatctttcgggatagcccatgtcgggaagtagcactcaatctcatatacgcatcctgtgtaggaaggacgatcgtagttgtacatagatacttttacgtcatcgccgtatttctgtacgctcggaagtgcacggatctcgtctaagcagctttcccatgtttctccgaatgtcatacgacggtcaagggagattgcacaggagtcagcaactgcacaacggcttggggatgtatagaagatctgggatacggttacagtaccgcggccaaggaaacgtgcctcttcccaatctttgttgtatttcgggttgagcatttttacaagacctttgatctctgtctcgtcagcgtcatcgttctcatttaaggaacggatgtcctgaagaatgtcagccattttgtagattgcgttgtctccacgctccggagcggaaccatggcaggagataccttttacatctacgcggatttccatacgtccacgctgtccacggtagataccgccgtctgtcggctctgtggaaacaacgaattccggacggattttatcttcgttgatgatgtactgccagcaaagaccatcacagtcttcttcctgaacagttccgactaccatgatcttgcatccttccggaatcaggtcaaggtctttcatgatcttagcaccgtatgtagcagatacaagaccgccacactgatcagatacaccacgtccaccgatctcttcgtcgttctcatatccatcgtatggatcgaagttccagttttcgatgtttccgatacctactgtatcaatatgtgcatcgtaagcgatgatcttgtcgcctgttcccatgtaaccgatgacgttaccctgcggatcgatgacaacttcgtcgaagtccagttttttcatctcagcagcgatggtctcgatatgagctttctcatcacagctctcgcccggattctttacgatggcacgtaagaatttggtcatgtcgtctttgtagctctcagcggttgctttgattttgttgtaatccatagtagtaatacctccatactataatgtgaaatagattgattggttaatctaaaaataactcaaaaaatttaaatctgattattcatctaaataatcttttccgtcccagacgatctctttataacgttccggatctgtatctccctcagtggagaagagcagtacctgtgaattttcatctaactgtaatgcttctttcagatcagcgtattccgggttggtcatgatttcatttaaaactccgaatgtaacggctcctgattcaccggatgttacctgtggatcgcctttgatcggagctgcaagcatacgcatagattttgcggatacccagtccggagcggcaacgaatacagatacatgatttttcagaatatcccaggaagttgtattcggttcaccacatgcaagaccagccatgatggttggcatatcgccttctacgttgtactctgcgccatcgcctgcaactgcacctttgtacagacatgcagctgtatcagcttctactacacagacgatcggaggattgtccggatactgatttgcgaaataaccctgtacaccacctgctaaagaaccaacacctgcctgaacaaatacatgtgtcggacgtttgatgccaagttcatgaagctgttcatttgcttccatggccatgcttccgtatccctgcatgatccaggatgggatttcctcataacctttccatgcagtatcctgtacaacgacaccgttttctacttttgcagcagctgcagcagccatgcggacacattcgtcatagtttacttcttcgatggtagcagtagcgttctctgcaagaatgtggttcagtcggttctgcgtggaacccttcggcataaatacaaccgctttctgctttaaacggtttgcagcccatgcgacaccacgtccatggttaccatctgtcgcggtaaagaatgtagcctgtccgaattcctcacggagtttgtcggatgtcagtgtctcaaaatcaagttctgagatatcgcgtccagtctgttttgcaatgtattttgccattgcgaaagatccaccgagcactttgaatgcattcagaccgaaacggtaagattcatcttttacacagacatctttcaggccaaggcggtctgccatgtgagtcagatgtgcaagaggtgttctctcatatcccggaattgttttgtggaaagcgcgggctttttcaacttcttcaagtgccataaccgaaaggtttgcgtcatcggtttttggcattgtgttttttacccatttgatttgtttcataaaaacctcctcctaatttttatctgctttgatgtagctgtacaaagtatattttgaaatcccgaagtactgggaaactttgtcgcccgatttggtaataaggaaagcaccggtattattcaggaactgaatggcctgtaccctttcatcctttgacatcagggatgcaggttttccaaccaccgcaactgcctgggcgatcaggtcgtctaacaggtctgccacgttggtgcagatgctttccggttccttatgataggaagaaaccgccggttcgccgctctcactgatgagtgagcggacagaatcctgaaaatacaggagattggtaatgtcaaaattgatggcaaggatatattggattggtccaccttcttcttcacgaacgaaaattgtagaagattttaatgttttaccatcgtttgttttggtcagataaccgagatgatcggaaatcttggatggatcttttctcatggtctccaatacgactttggaaggaccgtcaccggtttttctgtttgtaatgtggccgttttctatataaacgatggatttatgaagactcttgcgggtcaggtcatgaatcacaacttcacagtcatttccaaactgaacagccagtgcttttgccagttgttttaaaagctccagtgtcatcattttgctgtctccttttgttttgctttctgtactcatcatatcagatttttttcagatgtcaacactaaaatcaaaaatatttttaggtatttacaaaaaaagtttgaaaagaatattgcttttaattttgcggtgtggtaatatcatattagattgaacggtcaataaaaacagagccgttgtgaatcggagaaaaacaacttggaaaagacaggaatctacctgtttcttctatatagaaagagatatatttttgctttttgaaaagttgtaaacatgataagaaactacacggggaatgaaaggagaagaaacatgattctggtaggaaaaggaaccgtgatcacaagagatgagaccaagcctctgatcaaagatggtggtgttgtccttgacggggaacgaattgtaaaggtaggcgattatgagacactgcgaagcgaatatccgcaggcagagctgatcgatgcaaaaggtcagatcatcatgccgtcccttattaatatgcacgaacatatttacagcgcatttgccagaggattatctattaatggatataacccaaacggatttttagatattctggatggactgtggtggacgattgaccgtcacctgacactggagcagacatacttaagtgctattgctacttatatagattgtatcaaaaacggtgtgacaaccgtatttgatcatcatgcaagtttcggtgctattgaaggcagcctgtttaaaattgcggaagcatctgagaagatgggcgtaagaagctgtctgtgttatgaagtatctgatcgtgacggcgaggagaaagcaaaagcttccgtaaaagaaaatgcagacttcattaaatatgccgcacagcagaacaatgacatgatcaaagccatgatgggtatgcatgcacagtttacaatctctgataaaacatttgaaatgtgtcgcgaaaatatgccggagggcgtaggcgcacacattcatgtggcagagggtatcgaagacctgcatgactgcttacataaatatggaaagagaatcgtaaacagactgatggatcacgatctgttaggtccgcagaccatgaccgcacattgtatttatgtcaatgagcaggagatggatctgctgaaagcgacagatacgatggtagtgcacaatccggagtcaaatatgggaaatgcctgtggatgtccgccaaccatgagaattttccagaaaggcattctgacaggacttggaacggacggttatacacacgatatgtttgaatcttataaggtagcgaatgtactgcacaaacattccttatgtgatgcaaacgctgcctggggcgaagttccggcaatgctgtttgaaggaaatgcaaaaatggcaaaccgctatttcaacattccgcttggcgtgttaaaagaaggcgcagcagcagacgtagttgtagtcgcttatgatccgctgacaccactgaccgcagacaatatcaacagccatatgttattcggtatcaacggtgccatgactcagacaaccatctgtaacggaaaagttctgatgaaagaccgtgagctgaccgtgatcgatgaggcaaaagcaatggcagattgcagacaggcagcagcagagctggcacacagcatcaatggatgattttattgtgggttcccgacagtatggttttgaatgtagaggaactgttgggattacagaaaaacatatctattagatgatgtaataaatatttaggacgggataagttgaatttataaaacaattatcatgacgaagagaggttaattacaatgggcgacagaatgacaccgattcctttcgggaatctgatgaactgggcgatgacagagcgcgcaaagcggcagaccgtatttggcgttcgcaaagagtataaagcagatccggcgaaatgtctttctattttcggagagaagattgagacaccgtacggaccggcggcaggaccaaacacacagcttgcacagaatatcatagcagcatatctggcaggcagccgtttctttgagttaaaaacagtacagatcttagacggcgaggatcttccggtaagcaaaccgtgtattcttgcagacgatgaatgctacaactgcgagtggtctacagagctgtatgtaccgcaggcttacgcagagtatgtcaaagcatgggttgcattaaaagcactctccaaagagtggggacttggtgcaacagacggatttattttcaacatcagtgttggatatgatctgcagggcatcaaatcagaaaaaatcgatacatttttaaataatatgatcgaatccaaagacaatccggtatttcaggagtgcatccagtggctgaaagacaacaaagacagcttcagtaaactgacagatgctgatatcgaggcaattccatctgatatctgcaaatctgtaacagtatccactctgcacggatgtccaccagaggagattgagagcattgcttcttatctgctgacagaaaaaggattaaatacatttgtaaaatgtaatccgacgctgttgggatacgaagaagcccgcaagatcatggacgatatgggatatgattacgtggcattcggtgatttccattttaaagatgatcttcagtttgaggatgctgtaccgatgctgaccagactgcaggcactggcagacagcaaaggacttgcctttggtgtaaaaatcaccaataccttcccggtagatgtgaccagaaacgagctcccaagcgaagagatgtacatgtccggaaaatccttatgtgctttgtccttaagcgtagcgcataagctcagtaaagcgtttgacggaaaattaagaatttcctactccggcggagccgatgcatttaacattgacaagatcttcggacttggcatctggccgatcacagtagctacaactttattaaaaccaggcggatacaaccgtggcatccagcttgcagacaaactgaatgcaatggaattcaaaccgtttgaaggtgtagatgtagacggactggcagctctgatcgaggagatcaaacatgatccgcatcatgtaaaaccggtaaaaccgttaccgagccgcaagatggacaaagaagttccgttactggactgcttcacagcaccatgtatggaaggatgtccgatccatcaggatattccggcatatgtaaaacttgccggtgaaggaaaaatgcaggaagcattagaggttattcttgataaaaacccgcttccgtttatgacaggtaccctgtgtaaccacagatgtatgagcaaatgtaccagaaacttctatgaagagccggttgcgatccgcggtaccaaactgcaggcagcaaaaggcggatatgacagtgttctgggtgggctgaaagcagaaggaaacagcggcaagaaagttgccatcgtaggtggcggcccggctggtattgcctgttccgcattccttgcaaaaggtggagcagacgttaccgtatttgacaaaaaagagcattttggcggaacggttcgcaacgtgatcccgtccttccgtattgataacgaagcaatcgcaaaagatgtggagattgcaaaagcatacggagcaaaatttgtaaataacagaaatattgaaaatattgaaagtctgaaagaggaaggttttgataccatcgttcttgctatcggtgcacacaaaggtatgtccatcggtgtagataccgagaaagaactgaatgcggtagacttccttgaggcagcaaaagaagatccgaaggcacagaaccttggcagacatgtcgttgtcatcggagctggtaacacagcgatggatgcggcacgtatggcgggcagaattgaaggcgtggaagacgttactgtggtataccgcagaaccaaacgttacatgccagccgatgaggatgaattattagaagcattagaagacggcgttgttatgaaagaactgttggcaccgaagacacagaaagacggcgttctgacctgcaagaaagtagttcttggtgagatggatgccagcggcagacagaaaccggtggagacagaggaagaagttcagatcccggcagacacgatcatcgcatctctgggagagcgtgtagacagtgcactgtatgaagcaaacggcatcaatgtcaacgagaaaggacagccggttctcaatgctgaaaccatggagacaagcaaaccgggtgtatacgccatcggtgatggtgcaggcggagcagcaaccattgttttagcaatccgtgatgcacagaaagccgcaagccacattcttggcgaggcagcaaaatctgagtatgtatacgatacagatgtagcccgtgcagcagaaaagaaaggcattctggttcattccgcagaaggaaaagcggaagaagagagatgtctggaatgtaatcacatttgtgagaactgcgtagacgtatgtccgaaccgtgcaaatgtaacaatcgcagtaccgggacagaaaatgccagccatcgtccatgtggattacatgtgtaacgagtgcggcaactgcaagagcttctgcccgtacagcagtgcaccatatcaggcgaaatttacattatttgcaaatgaagcagattttgaaaacagcaaaaatgacggttatgtggttctgaacagagagaacatgacagttaaagtaagactggcaggtttcgtgaaggattacaacctgaaagatgctgactgtaccttatacgatggattaaaacaggtgattctgacaatcgatgcagattatgattatctgtatctgtaatagatcagaaatcagtctgaatggagaaatgtgaatcatgcttgcatgaaacagcatttcagataaggagttcataatgggatatttaatcaaaaacggtaccgttgtttatgcaaacggcagttacacagccgatgtactggtagaaggtgagaaaataacccaggtggcaaaaaccattgatgcgccgggcatgacggtcatcgatgcgtccgggaaatatatatttcccggattcatcgatacccatacacatttcgatctggatgcgggagattttcataccgcagatgatttttatacaggaacaaaagctgcgatagcaggaggaaccacatcgatccttgattttaccacgcaggaaaaaggacagaccttaaccgaagcgctggatgtctggcacaagatggcagacggaaaaagttcctgtgattacggttttcatatgtcgatcacagactggaacgacgagtcaaaaaaggaaatcaaagaaatgacccgtcagggtgttacttcttataaattatatatggcatatgataatctcaaagtgaatgacaaagagttattcgagattttatcagccatcgaggaagaacacggtatcgccggtgttcattgtgaaaacggtgacatcatcaaggcggtgacggaaaaactcaaatccgaggaacgcaacagtgtacgcctgcatccgaagagccgtccggcggaggcggaagcagaggccattaaccggcttctaaccattgcaaagctggcaggcacaccggtgaatatcgtgcatttaagttcaaagcagggactgaaagtggtccagagagccagaaaagaaggtcagcaggtatttgtggagacctgtccacagtatctgattctggatgagaaagaatataatcgtccgggatttgcaggcgcagcctatgtatgtgcaccgccccttcgaaaaaaagaagaccgggaggcactctgggaggcagttgaaaaggacgaagttgatatgcttggcactgaccactgcagtttcaacatggatggtcagaaaacaagaggcaaggatgattttaccagaattccgggaggtattccgggaactgaacagcgaccgatgctgttttatcagtatggagtggtggaaggaagaacttccattgagcgcatgtgccagcttctggcggagcgtccggcaaaactttttggcatgtatccgcaaaaaggagccattcttccgggcagcgatgcagatctggtgatctgggatccggataaggcatggacaatctcagccaagacacaggttcagaacgtggacaacacgccatatgaaggaatttcgggaaccggaatggcagcacaggtatttttaagaggctgtccggtggcagagtacggaaaagtacataccgaattaaaaggaaaatacatccacagaactgcacggcagttatagcatatgagtagaatggaaacagatttttaaatattgttttcaaatattacataggaatgatagcaaatagaatgtatatacgaatgtgtatttacaggattgcttgtaaagcagtgaggtactgcattataatagaatctaaattgttattatgacagtttaaaaagaataaaagaaagaaggaaattattatgaaacagtcaatcaacgtaaacggagcaccggcagcagtaggtccatatgtacacgcagtaaaaacaggaaacatgatctttatttccggacagttaggtttaaacccggcagatggtacccttccggaaggcatcgaggcacagactgtacagagtcttgagaacctgaaaactattctggaaggtacaggatctgattttgatcatgttgtaaaaacaactatcttcttagcagacattgctgatttcggtaaagtaaatgagatctatgcaaaatattttgcaaacgaagtaccggcccgctcctgcgtagaggttgcaaaccttccgaaagcaggtctggtagagattgaagcagttgctgtagaaaaataagaaatacaggattgtatacaagaccgataggttaactctaaaaaaattttagctaaattcttgacactgcctgtaagagaaaatacaatagaatcctagtgctaatgaatcttatgggcaggaggcaaggacttgaaaacagaaacgttacatgttacagaaacagaagaaagaattctgaatgcggcactgaaagttgtaaatgatgtcacaatcagtggaacgagaatgcatctgatcgcagacaaggcagatatggtgcagtcaaatgttcactattattataaaacaaagcaggatctgttaaagagactgcaggaatggatcttagaagaatgctacgatatgcagcaggtaagcaagaaatcaagtaaagatacactggaagatcagttacacattttcttccagcagaaaaaaactctgctgactaagaaaaaagagtatgattttgcagaacttgatttccttgttcagacaaggatcgatgcagacatcagagcacgttttcaggaagcgtatgcagtttggagagataatatccgggcgatcatcattcttttttgcccgaatatggaggagacagacaaggaactgattccgtatatggcagtatcgttgcttgagggggcttcgatccaggtgctggtagatggaaaaggttttgacgcagacagctattttgcatatgcagaagacatggtgcttcgccagatcagaattgcgatggagaaaaaagaagggtaacaggtctgtctactgacagaggtttgatttccaatggattttactgaaactttgctatggggaaaagcaaagatgtaatgtatcattctgtttgattgaatattcagtcaaagtacgcggaatgtggtgggttttatatatcacaatcacgaaaacaccggatgaaaatgccggttctgttcgtataccttatctgacacaaatctaaggataactggtcattccggtttggtcgaatatttaatcaaatccagacaaaatgaaacataaatgaatcaggtaaaagcaaatattggagcatcaagtgtatgtcagtatgcagagcaaatgcgaaaggcattctggattttttatccatctgcatcagaatgggggcatttcgatgtatcaattttatgtaaataatgaattatatcaggtggaaggcgatggaaagctgctgccgttcctgcgggatgtctgtaagtgcaaatccgtaaaggatggctgcagtgagggagcctgcggaacctgtcatgtgctggtagacggagtggcgatgaaagcctgtattccgactctgtccatgatggatggcagatcgatccttaccgtggaaggcttttcggatgaggaaaaagaactgtatgcatacgcttttgcagaggcaggagctgtgcagtgcggattctgtattccgggaatggtcatttgtacaaagggacttctggataagaacccaaacccgacgagagacgagatcgcgtttgcgctgcgcaacaacatctgccgctgcaccggatataaaaaaatcatggatgcggtggaattagccgcaaagatcaaacgggaaggaaagggaatcccgaaaaaagaatttacctggaaactgggcgagcgcgtgcatcgtgtggatgccagggaaaagacattaggatatggagaatacgtggatgacatggaggtggaaggactgcttcacgcgagtgcggtccgttccaaatatccgagagcaagggtgttgtccatcgatacagaaaaagcaaaagcagttccgggtatcgtagatatttttaccgctgcggatattccgggagatgtgaaagtcggacatctggttcaggactgggatacgatgattccggttggctccattactcattatctgggagatgccattgcacttgtggttggtgagaacctggatgtggtggaaaaagcgaaaaaactggtgaaagtcgaatacgaggagctgccctttgtcagcagtccgtatgaggcgatgaaagaggatgcgccgcaggtacacggaagcggaaacctgttggcacacaagcatgtatcaagaggaaacgccaaggaagccattgccaatgcaaaatatgtctataccgaggagttccatactccctggacggaacatgcatttctggagccggaatgtgcgattgccatgccgtatgaggacggcgtactgatctattccacagatcagggaacttacgcaactcagcacgaatgttccgaaatgcttggtcttccgagcgaaaaagtccgggttgtcaacaaactggtgggcggcggattcggcggaaaagaggatatgtccgtgcagcatcatgcgtcactggcggcttatctgctgaaacgtccggtcaaagtaaaactaacgcgacaggaaagcatcctgatccatccgaaacggcatccgatggatatgaaatttacggttggatgtgatgagaacggcattattcagggcgtaaccgctaccgttatcgcagataccggagcatatgcatctttaggcggaccagttctggagcgtgcctgtacccatgcggcgggtccgtataactatcagaactttgaaatcgatggaaaagcatattatacaaacaatccgccgggaggcgccttccgtggattcggtgtaacccagacctgcttctgcatggaaatgatgctgacgaagctggcagagaagatcggcattagcgcctgggagatccgttatcgcaatgcgatccggccgggacaggtacttccaaacggacagatcgtagatgaatccaccggactggtggagacactggaagcggtgaaagatgtatttgaaaacaatcagtatgtaggtattgcctgtgccatgaaaaatgccggtgtcggcgttggtattccggattttggaagagcgattcttgccattaaggatggaaaagcacatatccgatccggtgcttcctgcatcggtcagggacttggaacggtactggtacagatgacaattgaaaatacggatttgacccgtgaggatatcgtatatgaagcggcaaataccatcaacgcaccggattccggaaccacatccggctccagacagacgttggttaccggtgaggcgatgcgcagagcctgtgaattatataacgaagcgagaaaaaccaaaagtcttgcagagctggaaggggaagaattctacggcgaatatctggcaaaaaccgataaacttggcgcagatgttccaaacccggtatctcacgtagcttacggttatgcgactcaggtatgtgtcctagacaaagacggaagagtggaaaaagttgtggcagctcacgatgtgggacgtgcggtaaatccattgtctgtggaaggtcagatcgagggcggcgtgatcatgtctcttggctatgccctaagagagcgctacgaccttaaggactgtaaaccgttatccaaatacggaactcttggtttattccgggcgaatgagattccggaagtggaaagtatcattgtagaaaaagcaggactgaatgtggcatgcggagccatcggtatcggagagatcacttccattccgaccgcaccggcgatcgcggcagcttactacagttatgatggcaagtatcgtaccagacttccacttgcagatacaccttatgctgcagaccagcagtataaaaagggggtgcagtgacaatgaaaaaacgaattcggaagtttgcttatgtggcatgtaacggcggagaacacaatcacaactgtcaatatggatgcatcggctgtggcgcctgtgtggaagcctgtcggaaaaatgccgtgagcatcaatgcacagggcgtggcagaaatcgatcgtgacaactgtgtgggttgtcggttgtgtgaaaaagcctgtccgcagcagatcatccacatgcacaatgtgggagaaccgtttctggtacgctgctccaatcgtgatatgggagcaccggcgagaaatgcctgtgatgtgagctgcatcggctgtggtctgtgccacagaagctgcccgagtgaggcaatacagattgaagataattgtgcggtaatatatgaagcagactgtttatcctgtggaaactgtgtggtgaaatgtccgagaaatgcaattgttgatatccgtgaatttataaaaaaatgatataaaatcacatacatataagaggaggatttatgtaatggaaaaggcaaaaagaaaatacgcgtctattttcgaacttgatggaattccgcagatgagcaaagcgcttccgctggctttgcagcacgttgtagcgatgatcgtaggctgtgtaacaccggcgatcatcgtagcaggagtagcaggacttgacaatgcaaaccgtgttatgctgattcagtcagcactaatcgtatccgcaatttccacatttttgcagttgttcccgatcggtaaaaagggcggcttccgtctgggttccggtttgccggtgatcatgggtgtcagctttgcctatgtagcaagtatgcaggcaattgcagcagatacgggtatcgcagcaatatttggtgcacagatcgtcggcggtattatcgcagtcattatcggattcttcatcgacaagatccgtaaagtattcccgccgctggtaacaggaacggttgtatttaccatcggactttccctgtatccgaccgctgttaattacatggcaggtggttcttctagcgcaaactatggtcactggacaaactggctggtagcatttatcacactggctatcgttacatttttaaatcactttacaaaaggttttgtaaaactggcttctatcctgatcggtattatctgtggttatatcattgcagcattttttggaatggtagatctgaccgcagtggcacaggcaagctttttccaggctccgcagatcatgcattttggtatcaaatttgagccgtcatcctgtattgccatcggattactgtttgcgatcaatgcaattcaggctatcggcgatttcacagcaactacaacaggtagtatggatcgtgagccgacggataaagagttaaaaggtgccatcgtaggttacggatgcatgaacgttgtcggtgcattccttggtggtcttccgacagcttcctacagccagaacgtaggtatcgttacaacaacaaaagttatcaaccgtgtagtccttggaatgggtgctggcattctgctgatcgcaggtctggtgccgaaattctccgcattactgacaaccattccgcagtgtgtacttggtggtgcaaccatttccgtatttgcatctatcgcaatgacaggtatcaaactgatcaccacacaggagatgaacttcagaaatacatccgttgtaggtctggctgtagcacttggtgttggtgtaactcaggcttccgcatctcttgcaatgttcccggcatgggtaacaactgtattcggaaaaactccggttgttatcgcaacagtagcagctgtattcttaaatctggtattgccgaaagaaaaaccagaagtgaaaaaagaaacagaagaaaaataaaatttaataaaatcttgagatgaatgatgaaagctctctttttttacagactttgaaaaatgtaaaaaggagagcttttttattagcacaactaacaaatactataaatacaattcataagcggagtggttgtaaatcggaaaatatctgcgttataatatctgagaaaaaaatgtaaaaattattgtgtgatgagatcacgatagcataatgcaaaagatggaggattttagtacatgaaaaagacagagggaaaaaatgcgtctattttcgagttaaacggtgttccgcagctgagtaaggcacttccgctggcactgcagcatgtagtagcgatgatcgtaggctgtgtaaccccggcaatcattgtggcaggtgtcgcaggtcttgagggagccaaccgtgttatgctgattcagtctgcactggtagtttccgcactttccacatttttacagctgtttccgatcggaccgaaaaacggcttccgcatgggggcaggattaccggttattatgggaaccagttttgcatatgtggcaagtatgcaggcgattgcggcagatacaggtattgcggcgatatttggagcacagatcatcggtggtatcattgcgatgatcattggattttttattgataagatccgaaaagtatttccaccgctggtaacaggaaccgttgtatttacgattggactttctctgtatccgactgctgtcaattacatggcaggtggcgcatccagtggaaattacggacattggacaaactggctggtagccattatcacgttagctatcgttacatttttgaatcattttaccaaaggatttttgaaactggcttctattctgatcggtattatttgtggttatattattgcagcatgtttcggtatggtagatctgagtgcggtggcgcaggcaagctttttccagatgccgcagatcatgcattttggcattcagtttgatccgtcttcctgcattgcgattggtttgttatttgccatcaatgcaattcaggcgatcggtgattttaccgcaaccacaaccggcggtatggatcgtgagccgacggataaagagttaaaaggtgccattgtaggatatggatgtacgaatgtcatcggtgcattccttggtggtctgccgactgcttcctacagtcagaatgtaggtatcgttactacgacaaaagttatcaatcgttctgtactcggaatgtctgcgggtattctgctgattgcaggtctggtgccgaagttttctgcactgctgacaaccattccgcagtgtgtgcttggtggagcaacgatttctgtatttgcttctatcgcaatgacaggtatcaagctgatcacaagtcagccgatgagttatcgaaatacttctattgttggtttgtcggttgcgcttggtgttggtgtgacacaggcgtctgcgtctctgggaatgttcccggcatgggtgacaactgtatttggtaagacaccggttgttattgcaacagtaactgcggtattcttaaatctggtgctgccgaagaataaaccagcagaaaagaaataagaaaataattatttggctgaatatagaaggagctttcgctgattggcgggagctcctttttatggtaaaataaatagtaatatgtgatatgagaaaaggggattttacgatgatatattttgataatgcggcaacgacgcgacggaaaccgcaggaagttgtgcaggcagtcacagaggcgttatgttcacttggaaatgcaggacgaggggcgcacgaagcaacactgcaggcttctcgcacgatttatgatacaagacgaaaactggcagaatttttccatgcggaaaatccggagcggatggtgtttacaaacaatgcaacggagagtctgaatattgcgattaaaggattattaaatccgggagatcatgtgatcaccacgcagctggagcataattctgtgctccgtccgctctatgagatggaagaaaaaggtgtggaactgacgattgtaaaagcggatgcacagggcagattttcgttagagaatatggaggctgcaatccgaccggagacaaaagccatcatctgtacccatggatccaatgtcaccggaaatctggtggacattgcagcaatcggagaactgacgcaaaagcacggaatccttttcgtggtggatgcgtcacagaccgcaggggtatttcctatcgatgtgcaggcaatgcatattgatattttatgctttaccgggcacaaaagcttgcttggcccgcagggaaccggcgggctctatgtcagaaccggcctgcagcttcgtccgttaaagagcggaggcagcggcgtgcagacgtatagtaaaaggcatccgcagcagatgccaacggcgctggaagccgggacgctgaacggacatgggattgccggggtggatgcggccttagactacctgatgcggacaggcattgacgcaattcgggaaaaagaacagaacctgatgtggcagttttatgaaggcatccgtgaaattccgggagtgaaaatatacggtgatttttcacagaaaaatcgttgcccgatcgtgtcttttaatatcggggattatgattcttcagaggtcagtgatgaattgtttgaaggatgggagatttctacaagaccaggcggacattgtgcaccgctgatgcatgaggcgcttggaacggttgagcagggcgctgtgcggtttagtttttcccattacaatactgaggaagaagtggaggcggcaatcgaggcggtgagagaactggcggaagaagagtaatgtaattatgatatgatttgtgatttcaaattgatattataagtggaaaacag

SEQ ID NO: 13117 - DNA, 1198 bp, Unknown
  gut microbiota DNA sequence
ccggaatctattttaccattcggacaaaattcctgccaatccgcctttttccggatatggttcgtgccttaaatgaaaaaaaagacaaacgcggcggtctgtcttcgtttcagacactgatcgtctccacggctacccgcgtcggcatggggaatctggtaggtgttgtggcagctatctcagccggaggcgccggtgcggtattctggatgtggatcactgcactgcttggttcttctactgcttttattgaaggtaccctggcacagcttcacaaagaaaaagatccgctctatggcggataccatggcggccctgcttattatatgcatcatttttttgccaaaagaaaagacggcacttatcgcaaatactccgtacttgctgtactttttgcaatttccggtcttatctgctggtgcggaatcagtcaggtgatcagcaattcggttacctctgcctttgaaaatgcattttccattccgccactggcaacgaccatcattcttgttgttcttgctgcaattattgtacttcggaaaaatgcaaccgtaaaggttttggacatcatggttccgatcatggcatgtgcatactttatttttactgtcattatcattcttacacacctcggacagatgccggacgtttttgcacgtattttccaggaagcatttggtttccgccaggtcgcagccggcggtttcggtgctgtattaatgaatggtgtaaaaagaggactgttttccaatgaagccggttccggttctgcaccatgtgcggcagctgctgccaaaagcgatgacgctgttaaaattggtctggtacagtcactgggcgtatttattgataccattgtgatttgtacctgtactgcaatgatcctgcttctcgtaccacaggaactcaccaacggacttgtcggcatggatctgctgcagacggctatgcagtaccaccttggaacatttggaacaatctttattgcagctactctggcaatgttcagtttttccactttcattggaattctgttctatgcccgctccaacgtagcctacctgttcggaaataaatggtgttaccagactgcctacaaaatcgtggctctcataatgctcttcatcggcggacttgcggcatacaccactgtgtgggatctcggtgacgtcggtgtaggacttatgacaatctttaa

SEQ ID NO: 13118 - DNA, 5073 bp, Unknown
  gut microbiota DNA sequence
ctagaggaagctctgaggaatggcgtggatgtgtggtatctgacatgtcaaatcacccctgacagtatctgtattatttaaactgatcctcatagcttactgcatcctcatactgattggactgcagtattattttaactgtatggtatacacagcgtttcagttcccggatatccagagaaccatcctctaatgcctgacggatgcttgcatgatcccgtatatcacccggcataaccatatcatttccggctttcatacaacctgctgccgtacattcgccggcggtagaatctgtggtcgttgtccagtctgtcataatggcaccttcaaatccccactcgtcacgggcagcttttgtacagatatcataactgtttgccgcatgcacaccgttgatcagattgtaagaggtcatcatcgccatcggctgtgcgttgcagattgcaatctcaaatcctttcaggtaaatctcacgcaaggttcgttctgacaaaatggaatcggaacccatacggttgtcttcctgattattgcaggcataatgtttgatggttgtgccgcatcctggtaccgactgtacgccaagtgtcatggcagaagccatcatacctgccaacagcggatcttcggaataatattcaaagtttctgccgcacagcggattccggtgcagactcatacccggtgcaagccacaaagttacttcaaattcattcatttctccggcaatcatctgaccaagttttttcatcagatccagattccagctctgtgccagtaaagtaccaactgggattgcggtacaatactgatgatataccgttccggtcggctccttcggctccgcaaaatagccattttcaaagccatccagaaaatctccgccgtcaatgcttccatcttcccgcacctgatactcgctgcgcagacgtaagcccgccggtccgtcagcaagcacgatacttgccacattataaggatctttttccgctacattgactgtttctgccgctgcacccggaacggtctgtcctgcggaaccaagagcacttgccccctgatcttttgccggatctccagtggctaaagcgatcagttcatctgtagacaactgatctacaatctcgccggctctgcccggataatgatcctgcaattcctgatatataatagtagctgtcggaagattttctgcccaaatccggaagtatggcaattgttccttatttgcttcctgtatccaggcattctgcttttcttccagtttctccttatccggctgcacttcttccagtttttcttttaacgggcaaatatgttcacactgtaccagtattttatcctcattcaaccgaaatctgccacaaagaaccgcttcggataacgaatttccaatccagataccataaatgccttcttccagcatccatgctgcctgttcttctgagtaggatgcaaggtgatataaatctgtaatcagttccagagactgtgtttcacccggcgccagaagttttgttttttcaaaagcggtcagacgacgaaattctttgtgcagttttccctgtggacaggaaacatacacctgcacaacctcttttccagaatatgtagcgccaatatttgtcacatcaacagatacggaaaaagatggtcttccttttgatgatatcttctttgaaacatctgttacttttatgtcaaaatcggtgtaagacaatccatagccaaaactgtagcgcaccggaacgtcaaaggtatcgaaataccgatatccgacataaatgccttccctgtattcttcccggtaaacatcgccgctcttgtgactgaaatatgccgcattcggataatccatatagtccaatgcccaggtatccgtcatttttccggaaggagtcactttgccggaaatcacatctgccagcgcattaccgccttcctgaccagcctgcacaaactgcaggattgctgtgatattggaaaattcatcagtaaaagcaagatcgatcaaaccaccggtatttaccaccagaataactttttcataggcttcacataacgccgcgatctgtgcccgctcttcttctgtaatatagtaatcccccggctcgtccctacggtcagtattttcacccgcaatccgggcaagcacataaatgccaaccgctgcgccatcttcttttgccgctgccgcatcaactggcgctcctgccggcatggaaaatggagttgtggaataggcttcaaaaaaatttccgttgcattcttcgttcagtttccggaaaatctctgtcttccagctctcccgcgcctgcacataacaactgtcatagccgtccagccaatctccgcttgtgacttcataccctgcatttttcagtccatcataaatattgacattataccggttattgacatctccggaaccggttccccctttgatagtgcgtaccgcccccgcaccatacagaccgatttttgttcccggattcaaaggcagcgtctgtgcttcattctttaataatacaaaaccttccgctgcagcttcccttgcaagaatggcattgtctttttcacgctgtgacatttctgtggatattgttcccacgtaccctctttttcgcagtttcatgataaccctccttaaaacagagaaagcgcaaatatgccgaagcatacttacgccttctacttgtatgctatgcacacactttatattcttattttgtaccgaaaatacgatctcctgcatcgccaagtcccgggcagatataagcatgatcatttaattcacgatcaagctgtccgatgtaaatctgaacatccggatgtgcctcatgcagtctcttaacaccttccggtgcagcgataacaaacatgcatttgatattttttccaccatgttttttgataaaatctacggctgccacagcagatccaccggttgcaagcattgggtctacgactacgatgagacgctggtcgatcggatccggcagtttgcagtaatactcatgcggttcatgtgtctcaggatcacggtacagaccgatatgtccgatctttgcagacggaaccagagttgttacaccatttaccattccaagacctgcacgaaggaccggtacgatcgccagttttttaccggagatcatcggacttttgcatgtctcgattggagtctcgatctccacatcctcggttggcagatcgcgaagtgcctcatatcccatcagtacggcaatctcctcgatcagtttacggaactcatttgttcctgtatttttgttgcggatcattgatattttatgcttgatcagcggatgatccatgataaatacattttccattttttccatctaaaaaacctcctggccagacttctcgtttcttcaaggataacggattgcaggtgataagtcaaccgcatcattgcagttcacacgcgccattcgcaagattttcttgctctcttttttgttttccattatactgattagtcagggtctgatgtatgagtgctttgtataccagatgagagatgactcccatctgatatagcctccggctggattgcagagatgcgcaaaggaaatatgtcatgcatagcatgacgcacatctcgcagcaagaatactgagagcattcttgatcatcagaacatgtaaccataaaatcgttataaaaatagtaggagaatgaatttatgaaaacaaacgaaaacggcatctatgatgccagaacgcttgggcttccgaaaatgctgatcctcggtcttcagcatatgtttgccatgttcggtgcaacgatccttgtcccggttctggtaaacacctatttccacggcgaaggcttatccattcaggtaacactgttctgcgccggaatcggaactctgctgttccacttaatgacacgttttaaagtgcctgcatttctcggttcttcctttgcatttctgggtggtttccagactgttgcaaatctggataccggaattttcgcaaacatgagctacggtgaaaaacttccatatgcatgtggtggtgtcctgatcgccggtctgctctacctcgttttatccctgatcatcaaggtcatcggtgtacgccgggttatgcgtttccttccgccggttgtaaccggaccgatcatcatctgtatcggactgagccttgcaccttccgcgatctccaatgcctccaccaactggccgctggcactgatcgcccttgctaccgttatcatcttcaatatctggggcaaaggaatgttcaagatcatcccgatcctgatgggtatcatcgtatcctatgtggctgccctgatcatgaacgctgcaggaatgacctgtgcagacggaagtgccattttaaacttcagcggtgttgctgacgctgccgttatcggagtaccgcagttcttcctctgcaagtttaacattacagccattcttgcaatggctccgatcgccatcgcatccatgatggagcatgtcggtgatatttccgccatctccgcaacggttagtgaaaactttatcgaagatccgggacttcaccgcacactgctcggtgatggtcttgcaactgccctctccgctctgatcggtggaccagcaaacacaacctacggtgagaatacaagtgtactggcgctgagccgtgtatatgatccgaaggttatccgtctggcagctttttatgcgatcatcttaagtttcatcccgaaaatggcagagattatcagttctcttccggctgcgatcatcggtggtatcagtttcatcctttatggaatgatctccgctgtcggtatccgcaacgttgttgaaaataaggtagatctgacaaaatcccgtaaccttgttattgcagcatgtatccttgtctgcggtctgggtttctcagacggtctgactttccatgttggaggcacagcaattacactgaccagtcttgctctggcagcgattgttggtattgtattaaatgcgatccttccgggaaatgagtacagctttgaaagcagtacaaaccaaaataaaaaagtgtcttcgacacttca

SEQ ID NO: 13119 - DNA, 18320 bp, Unknown
  gut microbiota DNA sequence
cagttgaagtatgtcatgcaattgcatgacgcgcacctcgcaacaagaatgccggagcattcttgaattatacttttgtgggggaaatcaatatgaatgatgggcagaaaatatcagtggatgcagcgttggcgcagagtttcaagcagctggcttgcgaacatccggtggaaaagattacgatcaagcagatcacagatggggcaggggtgatccgcccgacattttatcatcatttcagcgataagtatggcttgctggagtggattctggtgcaggagattctgcttccgatccagcctctggtggaaaatggaatgatcaacgaggcgatgttgatcatttttgccaaaatgcagaaggaaaaagagttctatatgtgcgttggcagaatggaagggcagaattcctttcgtgagatggtagaaactggcatccgttcgcttcttaccggtatgatcgaggagaagatgaaaggaaaaacggtaaaaaatcagtggttgacgccggaacggatcgcggcttattattcccagacgatgacgtatatcattatgacgtggatcgagagtggtatggagatctcaccggaagaactggtggaagtatatggttttatgatcacccgttctctggcagatgtacttgcggatatgtaaggaacaggtatgagcggtattaacggagctgatccggacaaaatgctatttggaagatcagtgagagacgtttcctttgtattatgatacgatacaaaaataggcaaacgtagcatttacggatacaaaatgtgaaatgtgtctataaaatagaaacatattatctaaaaagaatttaatgcagatacacacaaaaaagattggatattctattatccagtctttttttctattctattacaacgaacagacgcctgttacggggcgttcagctaattgcagaatatagagtagaaagagatgagaagagatgctgaaatttggaaaaggcgtagtcaagtcgcggtttatcattttcattgcagcgatcctgctgctgatcccgtccgtatttggctatctgcacacgagagtgaattatgatatcctttcctatttgccggaggatatcgagacaatgaagggacaggatattctggtagacgaatttggtacgggagcgttttctaccttcgtcgttgacggaatgtcgaataaggatgtcagtaccttaaaggcaaaaattgaacaggttgatcacgtaaaatctgttctgtggtacgacagtgtggcggacatcagtatcccgacagatatgttgccggaaaaattgcagaaggtatttttaagtgacgaaggcacattaatgtttattttgtatgatacaacgatgtcggcagatgagaccatggaagcggtagaacagatccgtgcaatttcaaatgagcagtgttttttaagtggaatgtcagcggttgttacggatatcagggatctttctgataaggaagttccggtctatgttgtgctggcagttattttatcattgattgtattatccctgacgatggattctttcctgataccgatctttttcctgctcagtatcggaatggcgatcatctataacttgggtacgaatgttttcatgggagagatctcctatgtgacaaaggcgctgagtgcagtgctgcagcttggcgtgacgatggattattcgattttcctgtggcacagttatgaagatcagaaaaaaatctatgagaatgaccataaaaatgctatggcgcatgcgatttcacagaccgttacttctgttgtgggaagttccatcacgacggttgccggatttattgcattgtgtttcatgagttttaccctgggtaaagatcttggaatcgttatggcaaaaggcgtggtatttggtgttattggatgtgtaaccatacttccgtctatgatcctgatttttgacaaaccgctggaaaaaacaagacataaagcaattttgccggatcttggaagaatttccggtttcgtgacaaagcggtttccgatttttctgctgatttttgcggtacttctggttccggcaatttacggacagaaacatgcagaagtttactatgatttggcaggaacgctgccggaagatctgcagagttttatggcaaatgaaaaactgaatgaggagtttgacatgaactccacgcatattttgctggcagacagtcatatgaaggcaaaggatgcagagaaaatgctggagcgtatcgatcaggtagatggagtcaaagttgccatcggaatcgacagtattatcggaccttctgttccgaaggatatgattccacagtccattcgagatattctggaagatgataaatatcagatgattctgatcagttccgaatacaagacagcatccgatgaggtaaatgcccagatcgatgagatcaacgacattgtagcggcttatgatgaaaacggcatgctgatcggtgaggcaccgtgtaccaaggatctgatcaccattacggacaccgattttaaagtggtcagtgcgatttccattgtggcaatctttgtgatcattgcgctggtatttcgttccattacacttccggtcattctggttgctgttattgagtttgcaatttttgtaaatatgtgtattccattttacacgcatacacagattccgtttattgcatccatcgtaatcggaacgattcagcttggcgcgaccgtcgattatgcaattcttatgacgaacaattataagggtgcgcgcatggcgggactggagaaaaaagaagcggtacagcgggccgttgcatcttcggcacagtccattgtagtcagtgcattgagctttttcgcatctacgtttggtgtaggtgtttactctaatattgatatgatcagttctctgtgtattctgatggcgcgtggagcactgatcagtatggtagtcgttatttttgtactgccggcgatgtatatggtatttgacaaagtcatctgtgcaacaagtgcaggattcagatccggaacaaagggaaaggagagcaagacaaatgaaattctcaaaagtaaaacagtttcttaaatcaaaaaaagttgttcgcgtgggagcctgcgttctggcagcgatcattgtagcaggtggcacaggcgcttatcatgtatatggtcagaaagcggcagctgtgcaggatagcacacagaaaaccacggatgagagcgaaaacgatacagataaagaagaaaatattttaaaacaggtattaaagagtcagactgatggagaggaaactaccgttgacaaggaagaaaccgtttatgtggtcgcagatccggatggtacatcgaatgaagtgatcgtcagtgactggttgaaaaatcacagcggagcagcaacattagaggatgtcagtgacctgaaagatattgaaaacgtaaaaggcgatgagacttttacgcagggggctgacggcgcgttgacctggcaggcagatggaaacgacatttattatcagggaacaaccgataaggaacttccaatcgatatgaagatgacttactatctggatggaaaggaaatctccccggaggatctggcaggaaagagcggaaaagtaaccatccgcatggattacaccaacaaagaaaaaacagaagatggcgtgtatgtgccatttacagcggttaccggcatgatgctcaataaaaatttcacaaatgtggaagtgacaaacggtaaagtggtcagcgatggcaataatcaggtcgttgtcggatttgcttttccgggattatccgaaagtctggatctggacagcaaagacctggaagatattgagattccggattacgtggaagtgactgcggatgtggaagatttttcacttgatatgactatgacattcgtgatgagtgatattttgcaggagctggatgtggatcaggatattgatctgtctggtattgaggatgcaattgattccctgagtgatgcttcaaatcagttggtagatggaagcaaagaacttgcagacggaaccggaagtctggtggatggcgtgaaagcctatacaaacggtgtgtctacgttaaagagcggcattggtgcctatacggatggtgtgtctcaggtgaaatccggtgtggatgcctataccgatggagtcgcacaggtggcaggcggaacaaaacagcttgcagataaatccggtgatctcaaagacggtatcacacagctggtaggcggtgcaatgcagattcagacgtattttgcaggcgatgacggaatcgtgaatggtgcaaagaaactgtcagatggtgtcaaccagttggatgttgcattgaatgcaggtgtgacggatgaggaagctgcacaggcagaaacagcagcaaagcagaccgtagagcagatgtttggacaggatacagatgcttataagggtgtggctcagcaggcagcagctgtttatagtaatggtgtgaaaaattcaacagatttgtctgatagtgtaacggctgcgttaaaagatacctttaaacagattaatcctacgctgacagatgaacaggcagcagcttatgcacaggcaatgtcacagcagttgatcaacagtatcgcagataatacatcagcttccgttggtcagatcgctgcagaatctgccaagagtggtgctgaacagggtgccattgcaggtgcaaagagcggaattgcttctacaaaatcagcgattgctgctcagatcgagcagggcggactggtatccggagcacagacattaagtgccggtgttcagaagctgtataatgaaggaattgagccgctggcagttggtatgcagagcctcaataacagtgtcccagagctgatgaaaggcattcagacgttgaataatggtgctgcaactttgaatgataacagtgcggcattaaaatcaggtgtcaatacattgaacagtaaaggcagtgaattaaatgccggagctgcaacactggataataacagcggaacgttgaatgatggtgcggctaaactgaacgatggtgcgaaaaaactcagtgatggtatgattcagtttgatgaggaaggaatccagaagctgagtgatgcgtaccatggtgatgtggaagaattgttagaccgcgtcgatcaggtactggatgccggagcttcttatcatacattttctggtttgaaggatgatatgagtggaagtgtgaaatttgtgattcggaccgaggctattgaaactaaataatatacaaaaatgaaggatagttttaagttaaagtagaaaagaaaaaaagtctgatgtacataggcagagcgtatgagaagattgtacctacgcgggatcgttataagcgtgggttagtgaaattaccaaagccagagttttatactttttataatggtacttcgaagatggaagcggaaaggacattgtatttatctgatgcttataagataaaggatggtgatccaatgttggagttgaaggttcgtgtgattaatatcaattccgcagcgcatcatgagatattggaaaagtgtcaggtattgaacgaatacagtatgttcaactcagactgagataaagtgattttgtaacataaatgtgccccaaattgattttttattgatgtgcgattggtagccggaaagataaaatcaatctggggtgctttcaaaaaatatgcgttattagacaaagtgttttagtcacaaaagtgttctgtatgaaatttatttaaataatcgcagacctctgtcagaccatcatcagtaaatggataactggcagatgttttctgttcatccggtgtggtatcaaaattatacggtcccggccacacggtcacccgcagtacggtgtcgccttcttccggtgcatatttttcaatgcggtaatgcatgcctttgtagctgccgtgaaaacgttcttttttatagaagttaatattaaaaatgtctgttcttgcaatcatgaaaaatttcctttctatgtcctgatatttctgcaaatatttatgtaaatcctgggaatgaatcattgtatgaaatacaattcgataaaatattgctatgtatatgcaaactatctttattttagcttttgcaggaaaaatatgcaagggcacagataaaagcggtgcagatcatccagaaataagatttctgtaagaaaatcgtaagtttttggacaggttatatttaaatatcttcaatatagatgtgctttactaaaagaaagagaaagaatcttattatgaattacagtaagacacaaagaagatgtatgcaaaaagtgactttgtatacattcgacacagggagaaggatgagagatgaaaaaatcggatgagtatgaatatgacctgatttattacgataataaaagactggagcagaccgatgcgtatggatacacacggaacgaaagcaagcaggactacggatatgggcagtgggatgatggaagcaggagtggacggcagacatcccgggcacgaatgagtaaaaagcagcagaagagacggcgcagagccagaagaagaaaacagtttctggcaattgttctggtgctcctggcagttgtagtatgtggaaaaacgggaatgatcgacaggattagggcatctgtcggcgtgatttctacctcagaacttcagtcggaaggttacccggacagtttgatccgtttgtatgagaaacatcctgaggcaagagaaattgtcctggattataaaaattatataaatgatgatgcgagtgaggaaagcatagatatttccggggatgtgacggatggaaagataccgctttttattcaatgggatgaacgttggggatataaaacctatggtgatgattttctggcagtgaccggttgcggaccgaccgcactttctatggtttgcgtgggattgaccggaaatctgaatatgaatccttacgcggtagcaaaaatggcgcaggcggatggctactatgtcaatggcagcggttcttcttggaatatgatgacaggacttgccggtgaccttggtttgtctgcaaaggaactgggactggatgcagatacgattcgcagtaaactgagggacggtcatccgatcatctgcattatgggaccgggggattttaccagtaccggacattttattgtgctgaccggggtgaaatccaatggagatgtcacggtaaatgatccgaacagtcggaaaaacagtgataaaagctgggatctggaagaaattatgtcacagatgcgaaatttgtgggtatacagcaaggcataataaaatcagggataatttttcctttcgctgtgtcaagtaataggtaagaaatgtaaccagattgtaaatatccattttggtttctggcagaatatatatgaaaagtatgcagttataagacctttgaaatgaggttttgtagctgcatttttcctttccttttttttcggtttgtggtatcgtatgaaatacttaagacgtaagaaaataaaagaataacgatagagaaaagagagatggagcatttcagatgaaaattttattgacagcaatcaatgcaaaatatattcattcaaatctggcagtgtattcgctgcaggcatatgcagcggcgcacggacataaaattgagcgggcagagtatacgatcaataatcagttagaggatattctggaaaaaatatattgtcagaagccggatatactgcttttttcctgttatatctggaatgttgagtatgtaaaggaactggtgtcggaatttcataaactgcgcccggaagtacctatctgggtgggcggtccggaagtatcttttgagacggaacgatttttgaaggacaatcctgccatcaccggaattatgatgggcgagggtgagcggacactgacggaattgtgtgagtattttgaacaatgcgaacaggatgcgcactccttgtcacagaatagagatgaggcacggaatgagacagcgggggcaggaatggaatatgagaagaagtcaggtgctttcacagagttaaatgaggaaatgttgaaaaaaatcgatggtatttcctatcgcagatccgatggaacagtggcaattcagccgctgcgcagtctgcttccgatggatgaacttccgttttgttatgcgaatctgaaggactttgaacaccggatcatttattatgaatccagccgtggatgtccgtttaactgcagttactgtctgtcctccgtggacaaaaagctgcggtttcgcagtctgccgcttgtatacaaggaattgcagttttttattgatgcaaaagtgccgcaggtaaaatttgtagatcgtacttttaactgtcagcatgagcatgccatgggaatctggaaatatattaaggaacatgataacggcattacgaattttcattttgagatttctgcggatctgctcagagaagacgaactggagctgatctctgatatgcgtccgggactgatccagcttgagatcggggtgcagtccaccaacggagatacgattcgtgagattcatcgtaccatgcgtctggaggaagtgtaccgggcagtgaatcgggtaaaagccggtaaaaatattcatcagcatctggatctgatcgcgggactgccgtttgaagattatcagagatttcagaagtcctttaatgatatttatgcactgcatccgcagcagctacagcttggatttttgaaagtattaaagggctcttatatgtatgaacatgcacaggagtacggtcttgtgtaccgcagccgtccgccatatgaggtgatggcaagtaaatgggtttcttatgatgaaatgctggagatccgtctggtggaagaaatgctggaacttcattataacagtggacagttcctgacgtatctggcagttctggagtggaagtatgacagtacttttcagatgtttctggatatgggacatttttatcgggaacatggttatctggattgcagtcacagccgtgtacggcggacagagattgtacaggagtttgcagagatcgttgatccggagcgcagggatatataccgtgaggcactgatttttgacttgtataagattgaaaaatccaaaagccgtccgttctgggctaagaatgtgcagcaggacaaacggcagaccggaaaatatctgcgggaacatggtatggagaaaaaatactgccattttgagtattttgagcatatcaacgaaaagggcgagattacagaggagaaagatccgttatggttgctttttgattatgagaacagggattctctgacgaatgaggcggcacttttcagaattgatgagatgggattacaatcgggatgcggaggtgtgcaatgattccgaaaaatgaaaatgacctgatcgtggttgatctggaaatgaccggtctgcaggtgaaaacggaccggattctggaaatcggtgctgtcagaatccatgaggatcagattacagattcgttccagacgtttgtcaatccacaccgcagactggaggaacggatcatagagctgacgggtattaccgatgatatggtggcagatgcaccggaggcagatgcggcactggaagcgtttctggcatttgcgggagattgtccattgttaggacataatatccggtttgattatggatttttaaaacagtgtgcgataaataacgggcgtaagtttgagcggaaagcactggatacgttaaaaattgcccggaaagtattaaaggaaccggaaaagaaatcattggatgcgctgtgcggctatttttccattgtgcgggatcatgcacatcgggcagtggacgatgcgcgggcaacagcagaactgtatctgcttttgaaagcgcaatatcaggagcaggaaccgggtctgttctgccccaaagaggttcatcttcatataaagaagcagggaccactgacaccggcacaaaaaagagacttgaatcatttgatgatttatcatagaatagagtctgatatcgaaattgacagcttgacaaaaagtgaggcttcgcgtatgattgacaaaatttatgcgaagtatggacggattccgaaacaggaggtttcagacaatgtataagaagtcaaagaaaaaaagaatactggcatctattgtggtattgatcgtgttagttgccatggtagtgaccggaatattatctgcactgttaatatagtacagaaaacagaaaggtgaacatatatgaaaaaatggatcagggtgttaccgatccttggtgttgctgtgctggcagccggtatcggacatcagagtgcacttgcaaagaaaagtgaagattcagtgattgcagaccgtatttttatcggagatgtggcagtgggcggcatgacagatgacgaagcgacagcagctgtggaaaaatatgtcgacgatttggcagatgagaagattacattgacgatcaatgatgtgtctgtagaggcgacagccgcagatctgggattgagctggcaggacaccgagagcgtacagaatgcggtggcttatggcaaaagcggtaatctgatcgcacgttataaagcaaaaaaagatctggaaaatgaagataaagtatttccaatgccgctggttgtagaccaggaaaagacaacggcatatctggaggagcatgaaggtgagctgaaccgtgatgcggtagattacggtctgaccagagaaaacggtgagtttaaaattatcgaaggtcaggatggtatcgtggtagatgtggcaaaatctgtggataccattgatgaaagttttcaggcaggatggaaagcggacagcaccattgaactggcagcagaagtcagcaaaccaaaaggatctgaggaagaacttcagaaagtaaaagatgttctgggaacattttctaccaaatatgcatcctctgcctctggaagaaaagcaaatattgcaaatggttctaagaaaatcgatggaacggtgatttatccaggggatgaattttccgtatatcagacggtagcaccgtttaatgcggataatggttataaacttgccggagcctatgagaatggtacaacggtagacgcttacggtggtggaatctgtcaggtttccacgacgttatacaatgcggtgatccgtgcggaactggaagtgacagagcgatccggtcattctatgatcgttaattatgtagatccgtcggcggatgcagcgatcgccggagaatataaagattttaaatttaaaaacagtacagaagcaccgatttatatagaaagctatgcaaatggtacgacgatttcctttaccatttacggacaggaaacacgtccggcaaaccgaagcatttcttttgtgagtgagacgctcagtaccacagatccgggtgtgaaatttcaggaatcttcggatgccgttggtacgatcagtaagacacagagctctcatgtaggaaaatctgcccgtttatggaaggttgttaccgtagacggagtggaggagagccgtgaagtatttaacaaaacgacttataaagcatcaccgacaatttatgcggtaggcgtatcttcggaaaatccggaggcagtatctgcgatgaaagcagcgattgccacccaggatgagggtacgatccgtgcggcagcagcacagtggaagaatgcagtgcagcagccggagcagacaacagatccaacgcaggatccgaatgcaagtcagacacagccggcagatggaacgaatcaggctggacagaccgataattctgcccagcagacacaaccggcagataaccagtctgcagatcagggaacgacagcacaataaaagatcaagtcgaacgcaagtgagacttggtgcgtgattctggtcagcgtaagctgacatattcttctcagaatcactgcactctacactccgttccggtcggcgcaaaaccattgtctcccagacaatgtgcgccctcgcggagtgtttatctcagtcggagattgaactcccactgagaaagatttgttattactcatcacttacagaagtgggggtatcaactcagactgagataaaagaatgaggctgtcctgagtgacagcctctctgtgtctttttgcaaaaatattttgtaagggatgcacttttttgaaaaatagtggaaggaacaaaacagagatgaaacagggaaaattaccggaaaacgtgttgaaacgttcggtattcaaacaattgcatacaaagcgtaaagatgtattgctttccgcaggtgtaggggaagattgcgctgctttcactttgaaggaagatgaagtggcagtcctttccacagatccggtgatctgggaaaattctctggatggaagatatgcggtgcatgcgaatctgaatgatctggcaaccagtggcgcagaaccaatcggactgatgctgactgccatgctgccagcagatatcgaagaagcacagatccgcgaaatggtaaaaaccattgcggcggaatgcgaaccgttacaggtgcagatccttggtggacatacagagattaccgatgcagtgaaccgcccaatcatttctgtgacagcgattggaaaaacaaaaaaaggacagatcctgtctacatctggagcaaaaccgggagatgatatcgtgatcacaaaatggatcggtctggagggaaccgcaaagctggcgcatgcgcgtcgtgaggagctgctttcccgatatccggctcatctgattgatgaagcagaagcgtttgaacagtatttttccgttatcccggaggccgctaccgccatgaagtctggcgtgagagcaatgcacgatgtgactacaggaggcatttttggtgcgctgtgggagctggcagaagcctctggcgtcggacttgacataacattgaaaaaaataccgatccggcaggaaaccgtagaaatctgtgaattttttgacatcaatccgtatcagattgcttccggaggaagtctgctgatggcagcggaggatggcaaccgattggttatggatctggcgaaagaggggattccggcagtcgttgtgggaaaagcaacagccggaaacgacagagtcctgatcaatgaggaagaacgcagatttttggagccgccacgagcgggactgcaggtaagtgacctgcatatttaatcaggaattgataaattttagaacaagatcctgaagttgagtggagagatgattttgcacatctccaaattattacagaaaaaagttttgtaattagagttgtaagggaggaaccgaacatgcgtgaaaagattttgacatttatagagaagaatagccgcattgctatcaaagaattagcgattattcttggggaagatgaaatcagcgtagcaaatgaactggcagcaatggaagcagagcacattatctgcggatatcatacactgatcaactgggataagacagatattgaaaaagtaactgctctgatcgaggtaagcgttaccccgcagagaggacagggatttgataagatcgcagagcgtatctacaactacccggaggtaaatgcagtttacctgatctccggaagttatgatctgcttgtaactatcgagggacgtaccctgcgtgaagcagcacagttcgtatcagacaaactttcaccactggattccgtactgagtaccaagacaaacttcattttgaagaagtacaaagaccacggaaccattatggcagaaaaagaaaaagatgaaaggatgctgatgacaccatgagaaacccattatcaaaagtaattacagaaattgagccatccggtatccgtaagttttttgacattgtaagtgaaatgaaggatgcaatttctcttggtgttggtgagccggattttgacacaccatggcatatccgtgatgagggtatctattctctggaaaagggaagaactttctacacatcaaatgccggtttaaaagaattaaaaattgagatcgctaatttcctggagcggaaatacggtctggaatatgattataaccatgaaattatggttactgtcggtggaagcgaggccattgatatcgcaatgcgtgccatgctggatccgggcgacgaagtgctgatcccgcagccgagttatgtatcctatctgccatgcgcaaagctggcaggcggtgtgccggttgtcattgaactgaaagcagaaaatcagttccgtctgaccagagaagaactggaagctgcaatcacaccgaagacaaagattttagtacttccattcccgaacaacccgaccggtgctgttatggagaaaagtgatctggaagcgttggtggatcttatcgttgcaaatgatctctatgttattaccgatgagatttattctgaactgacttataccgatgacggacatgtgtctattgcatcccttccgggaatgagagatcgtaccatttatatcaatggattatcaaaatctcatgcaatgacaggatggcgtatcggatatgcatgtggaccagaggtgatcttacagcagatgctgaaaattcatcagtttgcaattatgtgtgcaccgactaccagccagtatgcaggtgtttctgcactgaaaaacggcgatgaagacgtggcacatatgcgtgacgagtataacggacgtcgtcgttatcttatgcatcgttttaaagagatgggactggaatgttttgagccgtttggtgcattttacgcattcccgtgtatcaaagaatttggcatgacttccgacgagtttgcaaccagatttttgcaggaggagaaagtagcagttgttccgggaaccgcatttggtgcctgtggcgaaggctttttacgaatttcctatgcatattcactggaagcattgaaagaagcattagaccgtatggagcactttgtacagaaactccgtgcagaaaaaaaggaagcatagattatggcaaaattgaacattgttctgtatgagccggagatcccggcaaatacaggaaatatcgggcgtacctgtgtagcaacaggtacacgcctgcatctgatcgagcctcttggattccgtctgaatgaaaaacagatcaagcgggcaggtatggattactggaaagatcttgatgtgacaacttatgtaaattatcaggagttcctggagaaaaatccgggagcgaagatttatatggcaaccacaaaaggacagaatgtgtatacagaagtgtcctatgaagaagactgctatattatgtttggaaaagaaagtgccggaatcccggaagatattcttgcacataacaaagacagatgcgtgcggattccaatgttaagtgacatccgttccctgaatctgtccaattctgtggcagttgtgctgtacgaggcactgcgccagaataatttttctcagatgcagctgatgggacatctgacaaaatttgacgattatattgagtaacgtgcctggctggacattttatgtggaaaagtgatgtttcgcagagaatgagacagataagcatgaaagaggattcttacacatggcatttattaaggcagaaaaattaaaacataaatttgtgcgccgggatgaacagggcgaagtgcaggatgtgacactggcgctggatgatgtgaatatcgaagtggaagaagggcagtttattgctgtgctgggacataacggttccggtaaatctacgtttgcaaaacatctgaatgcattgctgacaccgagtgagggaaccgtctgggtagatggaaaagacacggcaaaggatgaaaatattctggatattcgcaaggaagccggtatgatctttcagaatccggacaaccagatcgttgcgggtgtggtagaagaagacgttgcgtttggaccggaaaatatcggcgtgcctacagaagaaatctgggagcgtgtcggacacagtctggaggcagtcggcatgacagcataccgttatcattctccgaaccgtttgtccggtggtcagaaacagcgcgttgccattgcaggtgttgtggcaatggagcccaaatgcatcattatggatgagccgactgccatgctggatccgaatggtcgaaaagaagtattaaacacggtacatcgtttgaaccggcaaaaagatgtaacggttattctgatcacacattatatggaagaagttagcgatgcggattatgtgtttgtcatggatgacggtcgtgtggtgatgcagggaacaccccgtgagattttttcacaggtagaaacactgttaagttatggcttagatgtaccacagatcacccggcttgcatgggaactgaaaaaggaaggtctgccaatcccggacgggattttaagcagacaggaactggtggaggcaatatgtcaattaaaatcgaaaacctgagttacacctatgcaccgggcagtgcatacgagatacatgcattgaaaaatctgaatctggaaatcgaagaaggacagtttgtcggaatcatcggtcataccggctctggaaaatctacattgatccagctgttggatggactgatcaaggcagatgaggggcatatttattacaacggtgaggatatttatgcaccgggatattccctgcgttccctgagaggaaaagtgggattggtgtttcagtatccggagtaccagctttttgagataacagtattaaaagatgccgcttatggtccacaaaatcagggattttccgcggaagaagcactggagaaagcaaaagaagcgcttattagagtaaaacttccggaaaaatactgggaaatgtcaccgtttgaactttccggtgggcagaaacgccgtgcagccattgccggtgtcattgccatgaatccgaaagtactgattttggatgagccgactgccggtttggatccgaagggacgggatgaattatttgacctgatccgcgagctgcatgagaatatgaaaatgaccgtgcttttggtgtctcacagtatggaagacgttgccaactatgtagatcgtattatcgtgttgaatcatggaagcctgatgctggatggaacgccggcgaaagttttttcccatgtggaagaactggaacgggtatcgctggcagtgccacaggttacgtatctgatgaaggatctgaaaaaagcaggtctggatgtcaatacttcggtaaccacgatagaggaagctaagaaagagattatgaagttatgttaaaggatattacacttggacaatattatccgaccgagtcgatcatacacagactggatccccgtgtgaaactgctggcaacactgatgtatcttgtgtctttgttcctgtttcacgattttgtgggatttgttgtagtcactctgtttttgcttgtgattataaaactgtcaagggttccgttttcgtttatgttgaaaggtgtccgggcaatttgggtgcttgtcgttattacagcagtatgtaacctgttttttacacagggagacaatacttattttgcatggaaatttatccatatcacagatcagggtgtcagcaatacggtatattttacaatccgactgatctatctggtggtaggtacttctgtgatgacgctgacaacgacaccgaacaagctgacggatggtctggaagaaggcttaaaaccattgtcaaaaatcggagttccggtgcatgaaatcgctatgatgatgtcgattgccatgcgttttatcccgattctggcagaggaagcggataagatcaaaaaagcacagatggcaagaggcgcgaattttgaagagggtaatatcattcagagagccaaagcgatggtgccgatcctggtgccgctgtttgtatctgcattccgacgtgccaatgatctggcgacggctatggaagcgcgctgttatcacggtggtgagggcagaaccaagatgaaaccgctgcgttatatttcggcggattataaggcatatgcggtgatggtcgtgtatctggcggtgattattgtgatacggatctttttataaagttttgaaaagcgataatagtaaattttatagaatgaaattgaaataatgaggaaactgtatggattcagtgagaagaatatatcgggtgagagaggatgaaaaactctgtgggagaataaagtcattcttgaatcatacgcaggaaaatctgtgagatatgtggtatgtttgtctacttgaatttatgcagtttttttgtaggttgttttaaagtttttatatcagatgggagatgactcccacctctataggtggtgagaaacaagttagtatcagtggtgggagcca

SEQ ID NO: 13120 - DNA, 3193 bp, Unknown
  gut microbiota DNA sequence
aaggtgcgcagttgaagtatgtcatgcaattgcatgacgcgcacctcgcaacaagaatgccggagcattcttgaattgaaaaaaatgttagtaaaaattgttaggtagaaataaattatatttttacatgaaaagggaggtgtttgggtgtgaaacgagtgaaacttgtggttgcctatgacgggactaattattgcggatggcaggtgcagccaaacggaattacgatagaaggtgtcctgaaccgggaactgagcaaattattgaaggaagatatcgtggtcatcggcgcgagtcgtacggattccggagtacattcttatggaaacgtggcagtgtttgacacaaatgcacggatgccggcggaaaagatttcctatgcgctgaaccagcgtttgccggatgatattgtggtgcagaattccagtgaaattccgttagactggcatccgcgtcactgcaacagtcgcaagacctatgaatatcgtattttaaaccgtgaatttccgatgccgcagagacgtctggatacctggtttgtttaccgaaaactgaatattccggcgatgtgtgaggcggcagaacagttcgagggaacacatgattttaaaagtttctgttcagtaaatactgcagtggaggatacgacccgcacgatttattcctgtgagttaaaacaggatggtgaattattaacgattcggattaccggaagtggcttcctctataatatggtgcggatcattgcgggaacgctttttgatgtgggaatcggtaagatcgcaccggaggatattccggtgatattagaaaaaaaggatcggaaagcggcaggaccgacggctccggcgcatgggctgacgatgattgggattgagtacgagattccgccggaaagcctgatggaggttcaagttgaacgcacgtgagacttggtgcgtgattctggtcagcgtaagctgacatcatcttttcagaatcactgcactctacactccgttccggtcggcgcaaaaccattgtctcccagacaatgtgcgccctcgcggagcatttatctcagtcggagattgaactcccactgagaaatacttgttactactcactacttgcagaagtgggagtctcaactcagactgagatgaacagaaggattaatcggtctagaatgtagatgattcaattgcttgaaatcagatgagaatgaatacaaatggcattatttttcaactgaaagaattataaaagtaaatgtatgtatctgaaagctaaagaacgtcagaataaaattgaggtatgaaaatgagtaaaaataagaaatgtgtatattttacgcgtcatggacagacattctggaatgtggaagataaaatctgtggttccacggacattgcattgacggaatatggacaggagcaggcaattgcacttggacagaaaattttggaagaaggattgcagattgatgagattttgtattcaccattaatacgtgcagcagataccgccagacatatttctgagatcacaggaattccggcaatcgaagaaccgcgtctgaaagagcagaattttggaaaatacgaaggtacttcaccaagaaatgcaccggagtttcagaaagcaaaaacaaattttatctgcagctatgagggcggtgagacgatgctgcatctctgccagagaatttacaacttgctggacgaccttaaagagcggaacgatggaaagacatatctgttggtggcgcacaatggtatttcaagagtgatcgaatcttatttccatgatatgaccaacgaagagtttgcaaaatttggaattaaaaactgcgaactgaaaaaatatgagtgggtagagtgaacaaaacatgtgaatgagtttgcaaagtacggaattagaaatcataagttgaaaacatgggggaggaaatcagcaaaacatgaaaaatgcacttgctcatcatatgttttttaccacattttcagataagcaggaacgttatttgaatatatatgataaatgaaatgaatagcataattttatggaaaaaatcgttgacacagggagcacgctgtactataatatacaagtctgacaaagagtgttttttgtgtgcaaaaaagcatttcatatataggcggtcggttgggacccgacagcagggcagagtttttgatgattctccacaagtcagagaaaacaaaacccggataatgcagacacattattcaaaattaacaggcaggaagcagatgtgtccggacattcacatttgtggaagccgcaaatttattcaaggaggaaaaatcaatgaataacacattcatggccaacccggacaaagttgaaagaaaatggtatgtagttgatgctacaggatatacattaggacgtttatcttctgaaatcgctaaggttttaagaggtaaaaacaaagctgtcttcacaccgcacatcgatacaggtgattatgtaatcgttgtaaacgctgagaagatcaaagttacaggtaaaaaattagatcagaagatttactatcatcactctgattatgtaggcggaatgaaagagactacattaaaagagatgctggctaaacatccggaaagagttattgagtttgctgttaaaggcatgctcccgaaaggacctcttggacgtcagatgtacaaaaaattatttgtatacgctggaccagatcacaaacatgcagctcagaaaccagaagttctgacattttaatcggtgaaggaggtaaataatcatggctaatactaaatattacggaacaggaagaagaaaaaaatctatcgcaagagtttaccttgtaccgggtacaggtaaaatcacaatcaataaaagagatatcgatgagtatcttggtcttgagacattaaaagttatcgttcgtcagccgttagtagctacagagaacgttgacaaatttgatgtactggtaaacgttaaaggtggcggttacacaggacaggctggtgctatcagacatggtatcgcacgtgcattacttacagtagacgctgactacagaccagttctgaagaaagctggatacttaacacgtgacccgagaatgaaagagcgtaaaaaatacggtctcaaatctgctcgtcgtgcaccacagttctctaaacgataattttctcggaagagatttttcaaaagagtttat

SEQ ID NO: 13121 - DNA, 6340 bp, Unknown
  gut microbiota DNA sequence
gaagtgggagtctcaactcagactgagataaattcttttccatacttttttaatctatataaatctgcaaaaagtatgctttttacttacatgaaactttttctgtcattctatgtaatacaaagccatccgaaaaatcatattccgaatggctttgaaaattttactttaacaagctatcatatatacttatctgtcccacttatcacacagcgcattgatctgatccgcaaacttcgccatatctttatttgcgatttctttatttttatgaattactgcgatcaggcgctgacctgctgccagtaaccggtcaaatacactgtttccagctttcttggtcttacgtttctctgccagttttctgctgccctgtaccacgcacagattctgctgcagatcataaatatcaccgctatacggtgcaaccgcgtccacaccaaccacttcttttaaatgtgccgcaaaattatccgttacctgatcctgtccatgaaccacaaatacccgttttggtttctgcttcatgccctgtacccatgcggtcagatgatccttatccgcatgaccactgatgcccggcagattcaggatttctgcattgacatgcactgtctcaccgaaaagttttacctcttttgcaccgttcaacagctgataacctaatgtacccggaacctgataaccaacaaatacgatggtacactcttcccgccacagattatgtttcagatgatggcggatacgacctgcctcacacattccggaagcagaaataattaccttcggcgtcttgataaaattgatgcctctggattcatcactggaaaccgtggtctttaatcccggaaaaccaatcgggttcacaccacttttgatcatttccagatcatctttacggaaacattccagcacatttttattgaaaatatttgttgcctcaatagccagcggactgtccacatacacctcaaaattctggaaagaggacaacatctgctcctgtttgattttgcgcagataatacagcatttcctgggtacgtcctacggaaaatgccggaataaccacatttccgcctctggcaaatgtcaccgccagcacccgggcaagttcagatgcataatcaggtggcacgtcatgatttcgatctccataagtggactccatgatcagataatccgcggattccggaatttccggatcacggatcagcgcacgattaccgtttccaatatcaccggagaaaatcagtttacactcatcctccccttcttttgcccacatttcaataaaagaagatccaagcaaatgtcccgcatcacggaagcatacggtcaattcgtcacacacatgcacttttttgtcataatcacacggtacaaaataattcaaaacgccctgtgcatcgtttacactgtacatcggaaccacttccggctgtccggctctgcgggctttccggtttctccattccgcctcaaactcctgaatgtgcgcactgtcttttaacataatgttacagagctgcgtggtggcatttgtggcaaaaatctgtccccggaaacctcttgcatacaaaagcggcagtaatccggaatgatcaatgtgtgcgtgtgtcacaaacacataatcaatcgctgctgcatttaccggaatatcctgattttcgtagatgtctgccccctgctccataccacagtccaccagaatatgtttttctccgatcttcagataatgacaactacctgttacctcatgcgctgcaccaataaattctatcctcatagaaaaacccccttctacattgtattccttttcctcatatgctcttatgtaataagaataaaatcatacagttccatatttatcagatgttaccttccaacttatctctacaaatttcattcttattatattcctgtccagcgttccaaatttatcagttgttacacgaaaaactatctttccgctttttatctattttttcttattcatcaaacagactatttctcatcttcctgcccctgcagataatagataaactgctgcgcagttcttccggaaattccgccatggctcagctcccatttatttgcctctgctttcagctcatcctcagacatcttgatgcctgcttttgctgccagatgaatcacaatgtcaaagtactctttctggctcggtttagagtaattgatcgtaacaccaaaacgattaaccagagaaagcttctcctgcattgtatcggaacgatgcattccctcatcctgctgcacatcgttacggtcgctccatgtctcacggatcaggtgacgacggttggatgtcgcataaatcagaatattatccggtttcgtctccacaccaccttcaatgactgctttcaggaatttatattcaatctcaaattcctcaaaagaaagatcatccatataaataatgaacttgtagtttctgttttttacggctgcaataacatttgacagatctttgaactgatgtttataaatctcgatcatgcgcagtccctgatcgtaaaactcattgacaatggctttaatactggttgatttaccggttccgctgtcaccaaagagcagcacattgtttgcttttttgccttccacgaaagcacgggtattatccaccagttttttcttctgaatctcatagccaaccagatcagacagcataactttgtccatattgttgatcggtaaaaatacaagtttgctatcggtacgatcctgaatacggaacgctttgtttaatccaaacatgccaacaccgtaatcacggtaaaattcagttactgcggtgaaaaatccttccacgtcttttgcctgctccatgcggctgctcaatgcctgtactttttcgctgacatttttattgtacatcaattcttttttctcaatggcatgataattggaaatctgtgtaaagcagtcaataccaagggatttctcaatttcagaaaaatcatactcaaacagatttttgatggctgcaaaatcatttctcgcaaaatggttgacacttccatcgtttgcaccgattttttcacaggtgatgctgaacggattttcatttgtaataaggaagtaagccagataattgtgccacagatttttatcaaatccgaaatctgttgctaccgtcaacaaacgtttgatctgggtatacaccttgcggatcagcaccgcgttgctctgggtgccctcctcaaattcccggaaaatctcacccatctggtataaaatacaatcctcgtctatatctccatacataattaattttgcaatatctctgtacatcctgaaacctcctgtacgttttcttttttatggttcctccaggaaaattgtcttctgtccgtcccctgtcacacaatgggattttcatctcgcacttttcttctgtagaactgtttatgcttttttaatagtttatacccttttttccactttgccaatagttgtatttttctttctgataaggtatcatagaaaatatgaaaacgaatctttttttattgtaagagctgcaggatttgcataaatttccaaaatatgcaaacgccttttgtgctgttttgctccatccatatcttgcaataagaatattggaacattcatgaattataaatacaggcaccgatctttgcctgatgtaacaaaggagattttttatatgccaaattcaaactggaacgacgttggtgataagataaaagatgccgttgactctgccatctccaccggagattttacaaatttgagccgatccatcggagacgtgatcaacgacaccatagacaacgtaaaaagttccgtaaaagtttctgtgaaaacttcatacagttctaatccgtactacaaaacggtacacacccgtccggctccggatcaacctcagatgcctgaactgtataacaaacgtccggggggacaggcaggtgccatcatcagcatggctctgggatattctattggaattttcacactggcaggactgatcacatttacagcactcagtgctgcagtttcccatatgtttattgttccggtcattatttttggtgtactcgcagcgacaggattcacgttgggtatcaatggcaccaaaaaaattcgcctgctgaaccgctacagaagctatgtacgccagattgatcaccatttgagtgtgccgcttcagcagctcgcggaccgcaatcataaatccatagcatttatcgcaaaagatctgcaaaaaatgatcaatcagcatcttttttatgaagcccatgtggatacacaggataattattttctgctttccgaccaggcttacgaagagtaccgcaccgcaagactggaatattatgaaaagaaaaaaatcatggaaaaagaacaggaagaacacaaagtatctgcggaatgtcagaaactgatcgacgaaggacaggcttatgtccgccatatccgtgaatgtaatgatgccattccgggagaagaaatttcccgcaagctggataaaatggagcagctggtacagcgtatttttgacgaagtccgaattcatccggaagtcgctcctgatctgcagaaaatgatgaattattatctgccaaccacctcaaaactgctgaatgcttatcgcgaactggacaaacaaccaattgcaggagaaaatatcagcaacacaaaagcagaaattgagcagacggttgatactctgaatgtagcatttgagaaactgctggacagcttattcgcagactgcgcttgggatatttcttctgatatctccgtgctgaacacgatgctggcacaggaaggcttaaaagaagatgatttcacacttaacaataagtaatttcggggattgttcttactttttgtagttctattatgaaacaggtaaatatctatatatttttattgattttatgttaaaatatagtcaaattacaagcgcatattgttatgaaaatcaataacaagattattatttaaggagataaaattactatggacaacgaattcaaagattttacaaccacaccaacactgactttcgatgtggctccggagacaaaagaagcaccggctgcaactgctgcttctgaccttgcagaacaggtttctgatccggctttcagcgaaaaaaatctgacaccggaagaattacagatggtcaatgacttttctgaaaaaattgatctgcacaattcgcaggcaatcttacaatatggcgttggcacacaaaagaaaatggctgatttctctgaagcagcactgaacaacgttcgtaccaaagatcttggcgaagtaggtgacatgctttcttctctggtggtcgacctgaagagttttgatatcacagagcaggataagggcttcaagggattattcaagaaatcctctaacaagattactgccatgaaagcaaaatatgacaaagcagaggtaaacgtaaacaatgtatgcaccgctttggaaaatcatcaggtaactttgatgaaagatattgccctgttggataaaatgtatgctgtcaacctgacttacttcaaagaactttccatgtatattcttgcaggaaagaaaaaattagaagaagtccgcaccggtgagcttgccgctgctgttgcaaaagcagagacctctaatctgccagaagatgcacaggctgcaaaagatctacagtccatgtgtgaccgttttgaaaagaaaatccatgatctgaagctgacaagaatgatttccattcagactgctccgcagatccgcatggtacagaataatgatacactgatggcagaaaaaatccagtccaccattgttaatacgattccgctctggaaaagccagatggtacttgcccttggcattgagcactccgcacaggctgccaaagcacagcgtgaagtaacagacatgacaaacgagctgcttcgtaagaatgcagatattctcaaaactgctacgattgatacagccaaagaatctgaacgcggtatcgtggatcttgagacattgaaacataccaatgagtctctgatcagtacatttgatgaggtattgaagattcagaccgaaggtcgtgagaaacgccagactgcagaagctgagatgcagcgtatggagaatgaactcaagaagaaacttctcgaaattcatggttaatttttattgactaagttctctcttttattaaaaaatattttgtactttactcccccttttttcagtgtatatatgcgctgaaaaagggggttttcgatagcatgttgacttatttacactcattatatcacaaaactgctattagcaacaccaactggagcttt

SEQ ID NO: 13122 - DNA, 7579 bp, Unknown
  gut microbiota DNA sequence
atcactatgttttaccgctacactgggaatacaattttaatttccgttccttttccaagttcactttcaattttcagttctgccttatgcatcaccgcaatgtgttttacgattgcaagtcccaagccagttccacccgtctgttttgaccgactcttatccacacgataaaaacgttcaaaaattcgttcctgatcttccttagatacaccaattccagtatctttcacagctacaaatggatgctgatcttcctttccaattgtgacattgaccgaaccaccagaatgattataccgaatcgcattgtcacacagattgtatatcaattcttccatcatacgacggtttgcctgaatcacctctgtatctcctttcacacgcacaactacatgatgcttgtttgcctgcatctcaagcatatcgcggcaattcaatgccatttcatacagatctaccgcttctgtatccacacattcttctacagaatccaactgagacagacgcagaatatcattgatcagtgtcaacagacgctgcgaacttttatgaatttctccggcaaaacgcacggtatcttccccctgcgcaatcccggattcaatcaattccgcataaccggaaatagatgtcagtggcgtttttaattcatgggatacatttgccgtaaattcctgccgcatttttgaatttcgtttcagctcccgatgctgctgattaatcgtctcgataaacggctgaatttccggataggcctgtatctcacttactttttccacatctactgccagcatttcaatcggctcaataaagcgcttcgtcataatatgacccaaaatcagacacagtacaaaaatccctgcaaaaatcgcgatactttccgggatcagatacaaactcatttttgccacatatggaatatctctggatactcggataatgcagccattatctaatttttccgcataataaaaagataaagtaccaatcgtattcgaatgtctcgttgcttttccttcgccatttttcaatgcctgttgaatctccggtcgttccatatgatttttcatcttgcttgcattggctttgctctcataaagcacgtttccatccgcatcaaccaacgtaatgcgcagcccgtctgcattagcatcataattctgctccaatgtttctacgatataatctgaacttgccagtacatgtacatccgtttgaagatcctgaaaaatctgtttctgcaacatcataaaatatgcccaaaatgtcagtccgatcgtcagtaagatggcaagtgccgcaataccaactaaatttttatgaattttctttctcatgccttctgcctcatctatttatctaaaaagcagatccaagacattcatatagttcttgctatactctgacatataccaattgcatctgcttttcaaaagtttttagtttctaatatgattcagactatatcctacatttcgaacagtctgaatcaattttccggatggtcccagtttctgacgtaatgtcttgatatgcatatcaagtgtacgggattcaccggtaaaatccatgccccagatttcttccatcagacgatctctggtcaatacgataccttcattcatgatcagatatttcagcaattcatactctttataggtcaaatcacattttccctgtgcagtatgtacctcgtgtttgctgtcattcagagtaatatcttcaaactcgtaaacttcttttttctggatagaagcacttcttctcagtaatgcttttactctggaaatcagttccataacaccaaacggttttgtcagataatcatccgcaccaagatccagcccttttaccttgtccaactctgtcgtttttgccgttaccataataactgggacaagcactgttctgtgattcagacgcaattttttcaaaatctgtaatccatcctcatccggtaacataatatccagtaaaaccagatccggaatctgctcatccaaagccgcataaaaatctttggtacattcaaatccacgtacttcataaccggaattcttcaatgcaaagctctcgatttcctgaatattcttatcatcttccacaatataaatcatcatatcttcccacctcatctacttcaactaactgacaccacatgtctgttacattttacttgttgttcctcttatctctgctatttaagctttttctgtttgctaatcctaactaacttattttatttatcattataaagacaccccgtaaaatgaaatcatattctaagtaaattttatgtaaaaaattttacatacattataccacataaaggcgcagcggcatagacgcagtggcgatcccaaatttaaggtcagttacaaagtgtggataaagaaaaagtggtatttttcctcagcgtgcgattgttcgccgcggaggtaaaataccactttttcgtcctaaatattaaattctaagccacaaggcaaattttatttagctgcaagagcttttttgatctcctcagtaagaagtggaacgatcttgttcagatctccaacgataccgtaatcagctacatcgaagataggagcatcttcgtctttgttgattgcgatgatgagatcagactcttccataccagctacgtgctggattgctccggaaataccgattgcaaagtaaacctgcggacgaactgttttaccagtctgaccaacctgcagatcctgtggtttccaaccagcatctactactgcacgagagcaggatacggtaccaccaacaacctcagccagctcttcgagcattttgaagttctccggtgttccaactccacggccaccagatacaaggatcttagcgtcctggatatcaacaacgtcagatacatttttaacgatgtcaagaatctcaacatatttgttgtccggtgtgaatcctgggttgtactcaacaacttccggattagcatcagcgatcggctcgatcttctgcataacacctggacgaacagttgccatctgcggacggttgtccgggcaagcgattgtagcgattgtgtttccaccgaaagcaggacgtgtcatcagtaactgatttggtttctgctctctacccggcattgggttcagtgggaagttaccgatctcaagggatgtacagtctgctgtcagacctgtctgaacacgtgcagatacacgaggtccaaggtcacgaccgatagctgttgcaccaactaacatgatctccggtttgaactcattgattacagatgcaagcgcatgtgtatatggctctgttctgtatacctcaagctctttgtcatctacaacgataactttgtctgcaccataagcgccaagctgagctgcaaggtcttttacgttatgtccaattaatactgctactactttctcatttaaatcatttgcaagatcttttgcttttccgagtaactcgaaagcaatcgggctaatttcattatctacctgctgagcgaatacatatacgtctttgtactgctcaattaaggattgttccattgctgccattgttatttctcctttctcttacagtccgcatacatgtttctctgtcatcttaccaagcagataagaaacagcttcttctgtatccagtgtgattttctctccagcaccttttcttactttgtcggatgcttttgcgatctttgtcggagaacctgcaagacccatgtttccgtcttccagagtcttcagatctgctctacccattgtagcgatctctgcttcgcatgcatcgaagattccgcccggagtcatgtatctcgggtcgttcagctctgctaagcatgtgatcaggcaaggcatctgagcttttactacatgatatctgtcgtcatactgacgctgaacttttacagcatctccttcgatctcgatcttacgagcataagagataaccgggatatcaaggtgctcagaaatctgaggaccaacctgagctgtatcaccatcgatagcctgacggcctgtgatgatcagatcgtaatcgcccatctcacgaattgctgctgcaattgtagaagatgtagcccatgtatcagcaccgccgaggcatctgtcagttacaagaactgcattgtcagcgcccatagctaatgcttcgcgtaatgtatcgccagctttcggaagtcccattgttaaaacagtaacttctgcgccgtactgatcttttaatcttaaagcagcctcaagacctgctttatcatctgggttcatgattgtgagcattgctgctctgtcaagagttccgtccggattgaacttaactccacctgctgtatcaggtacctgtttaatacaaacaataatcttcacgattgttttcctccttacttaagtaatgcaccagaaataaccatacgctgaacttcgctagttccttcgtagatctctgtgatcttagcatcacgcatcatacgctcaacatcgtactctctgatgtaaccataaccaccatgtaactgtacgcattttgttgtaacttccattgcaacttctgcagcgtaaagttttgccatagcagcttctacagaataagaaactttagcaccagcctggtactcatctttctttaatgcagctctgtataccattaactgagcagctttaacttttgtagccatatctgctaactggaactgtgtgttctggaactgagcgatgcttctgccgaactgttttctctcttttacgtatgcgattgttgtctctaatgcaccctctgcaagaccaagtgcctgtgcagcgataccgatacgtccgccatccagtgtatgcatagcgatattgaaacctttaccctgttttccaagaaggttctctttcgggatacggcaatctgtgaagattaactcatatgtggatgaaccacggatacccatttttttctctttaacaccaaaagtaaatcctggagttcctttttcaacgatgaaagcagagatctctttcattgttctgccacgtttttcaactttgcctgttacagcaattacgatatatacgtcagcttctttaccgtttgtgatgaagcatttagatccgttaagaacccactcatctccgtctaaaacagcctttgtctgctgtccctgagcgtctgtacctgccatcggctctgttaaaccgaaagcaccgagttttttaccggaagcaaggtccggaacatatttagctttctgctctggtgtaccaaatgtaagaatcgggtctacacacagagatgtatgtgcagatacgataacacctgtagtaccgcaaacttttgataactcctctacgcacatagcgtatgtaaggatgtcacaaccctgtccaccgagttccttcggtaccgggattccaaggaagccatatttagccattttgtcaacggtagctcttgggaatttttcagtttcgtcaacttcctgagcaagtggttttacttcgttctcagcgaattctttgaaaaggcttcttgccatttcatgtttcttacttaatccgaaatccattttttacttttcctccatttttagtgaagcacagtcaaaactccaaaaggcaccaaagacatgtgtagcaaaatgcacatgtctggcaccactctccgatgtaataatcggaaattgttattccgaccgttaacttcttatatatcttataaggattataccccttataattcgagagtatttattctattcttacttgctgtaatcgtagaaacctacgcctgtcttgcagccaagtttacctgcacgtaccatttttctaagcaatggagccggacgatatttaggatcgcctgtctcagaatagattacttccatgatagcaaggcagatatcaagaccaatgtaatcacctaactgtaaaggtcccattgggtggttagcacctaatttcattgctgcatcgatatcttctacgcttgcaacacctgcttctaatacgcagataccttcgttgatcatcggaacaaggattctgtttactacgaaaccagctgcctcgttaacctgtaccggtgttttgccgatctctttggaaatctcaacgattttgtctcttaactcatccggagtatttgctccctgaattacctcgatcagtttcattacaggtgccggattgaagaagtgcattccgattaccggtctgtcaagacctgcaccgatctctgtaatagataatgaagatgtgtttgttgcaaaaatacactcagccggaacgatctcctgaagctctttgaatgtctgttttttgattgccatatcttctaatgctgcttcaactactaaatcagcatctgtacaaatgtcttttgtacctgtggtaattttagcaaggattgcatcagctttgtcctgatccattttgccttttgcgattcttttctcgaatccttttgcgattttgttcttgccgtttgcagcaaattcatcattgatatcgcataaatatacttcatagccttctgtctgtgcaaaagcctgtgcgataccagatcccattgttcctgctccaataataccaactttcatgatatgtcctccttataatgaaattatatactaatatgaaacattccgactgccatacccaaacaatcctgtccatagattagtcatcacatatctaaattattatattttttgcttccatagcaaatgtgttaaataactaacgatgtcagctattaaaatatctccgacattttcgcatgtcgcaatcatgccggagattcgtccggattttaaatatccttctaatttattttttgaaaattaagcttcttttttaacgattgtagcacaacccattccaccgccgatacacagtgtagcaagtccgtatgtaacgtctctcttctgcatagcgtgaagcagtgtaacaaggatacggcatcctgaagctcctaccggatgtccaagtgcgatagcaccaccgtttacgtttaagatgtcagagctgaagcctaactctttctgtactgctacagactgagctgcaaatgcctcatttgcctcgatcaaatccatgtcatcaattgtaagaccagcgatctttaatgctttctttgtagccggaacaggtccgatacccatgatctccggagcgcatccgccaagagcacctgctacgaatgtagccatcggtttaacaccaagctcttttgctttctcttcgctcattacaacgattgctgcagcaccatcgttgataccggaagcgttacctgctgtaacaagtccgccctctttaccggagcagcattttaattttgcaagagtctcttttgttgtgccaggacgtggtccctcatcttttgtgatcataacagtttcttttttaactttaaccggaaccggaacgatctcatcgtcgaatgctccagactcctgagctgctactgctttctgctgggaaactgctgcgaactcatcaagttcttcacgtgttaatccccactgatcacaaatgttctcagctgtgatcatcatatggtagttgttgaatgcatcccataatgcatcgttaaccat

SEQ ID NO: 13123 - DNA, 22632 bp, Unknown
  gut microbiota DNA sequence
attttccgccggttttcttcatctccccagttccaccttctaccacagactcatcttttccaaacacatgcacagaaccaaggaaacattttgcatccatcttcaatcccatattctgaacataatcaccatccagttttgccttatctggaatctccagttcatctcgtccattaatctgtgcccatccagtcaatcccggttttacatcattggcaccatacttatcacgctctgcggtcagaatatcctgattccagagacccggtctcggtccaataacactcatattcccgataaaaatatcccagatctgcggtaattcatccagactgtgtgcacgcagaaattttcccacttttgtaatatactgatccggattatccagcatatgtgtcggtacatcatgtggagtcgacatcttcatacttctgaatttatgtaacttaaaatactgtttattctgtcccatacgcttctgtgtaaaaagcacaggacccggatcatcaatcttgattgccagtgcaatacctgcataaatcggcgataataaaactaatccaccaaaggacagcacaatatccattgctcgtttgccatatttaccataaaatcccggcttataatcagaatcaccaacagcttccagatgtcctcttgcaccatctgcattttccggatcattttcatcctcgacaaaaacgaccttctttccttccaatggattcttctgctccggttcattatcatatacagaatttcgtttctttttctttgcaagagcttccataccgacaaaagcagcacccagtgccacaccaccgatacctattaaagtttttacttttttcttatcaatcgccatatttttctccataaaaataagagcctttcggctctcattcttcactcatctcatttcatctatatcttataaatagtgttctacttactctctatcttcttaataatttccaacccaatttcaatctgctgtcgcctgccaaacatctccatctccagccatgccttccgcttatgccggtcaatcttccgaatggctccttccagccccatcaacggaccggacaaaatatgtacctgatcattttcgataacaccctcggaaatttctgcaatatcatcctcaccgcagaatcgtaaaataaattcgatttcctgtggtgtcaatgctacaatttcatctccaataccaagcatttttgtcatagcaggtacttttttcagttgcagaaataattcttctgcctgatcggatataaaaaatacataccccggaaacaattttttctgcagggtatgccattcgccgtgaaaccggcgtctttcttcatataaaggaatgacatatttttccaccagaccagctggcagataggtttcacactgtatttttatattttcttccttgccggaagttgtctgaactacgtaccacatatgccctcctttcttttttgcatataaagaaaggcatctatcggaatacaaacaacatgttcatctcacatgtctgtttctattccgataaatgcctgtgcttcgccactctgtcttcattcaggcagattggtagcgttctccaatatgacatttacctcaataaacgcgacaaagcgacgatttatccttagtaaaatcttataaatttgtattttgtatgaaaatcccggatcgtagcaagatacatttcatatctgcctgccacaatccatttccatattaactaaccagtaacaattaatcttttttttccttcggcatctggtaagtcggaacgatttcctttaccattgcccggattgcatcgctgtcatcgtttgcagcatcccgcagtttgatgagctgatgcatgaatttttcttcatccatatcaattggtttaccaatatgaatcattttgttttctgtatcctgaagtccttcctcatccatcagaagctcttcatacagtttttcaccaggacgaagtccggtatattcgatttcaatatcctctcccagtttataaccggacagacggatcagattttttgcaagatcagcaatttttacaggctcgcccatatccaaaacgaagatttctccaccttttgcataagcgcctgcctgcaataccagagatactgcttccggaatcgtcataaagtaacgaatgatatccggatgtgtaacagtaaccggaccaccggcagcgatctgctttttaaacaacggaataacacttccgttacttcccagtacatttccgaaacgaacagcaacgaagtctgtttcatagaaatgatttaatgtctgtacgatcatctcgcacatacgcttggaagcgcccatgatattcgttgggtttaccgctttgtcagtagagatcaggacaaatttcttaacatgatttcttcctgctgcggatgctgtcttataagtaccaaatacattatttttgattgcctcgttcgggctgtcctccatcagcggtacatgtttatgcgctgctgcatggaatacaacgtctggtttgtattttttcatcacgctgttaatacgatgtgtatttcgtaccgaaccgatcagtacagtcagattcagttccggatgattccatctgagtttctgctgaatatcataagcattattttcataaatgtcaaaaatgatcagatgcccgacttcatgctctgccagctgtgtacagatctcacttccgatggacccgccaccaccggttaccaacacggtttttcctttgatatagccaaggatctcatccagattgacttcaatcggatcacgtcccagaagatcttcgatctccacatttctaagttttgacacattgacttcaccgttgaccagctgataaacacccggaacggtctgaatctggcagtcagtctctttacagatttccagaatatcgcgaatatctttacgatctgcggatggcattgccagaataatcttattgatctggtatttttctacagattccagaatcttattgcggccgccttcaatcagaacgccgtccagatatttgttccatttctgtgcattatcatcaataaagatttttacccggtctgtcagataataactgttatgatactcccggagaagtaccagacccgctgcaccggctccgataatcataatattctgccgctcggtatttcccttggaattatctgctttgattcgcatgcgtcgaagcagacgatacatcatacgaatggatgcggtgaatccaaataccaggagccagccgatcagatagaaagaaatcggcatccgcatgatcgctattgaaaatacaacaccggtcagaacgcaggcaacaatcgatgccacacaggttttcaatatctcattgattcccgcataagaccatacgcttcggtacaattttgcgattacatagcaacataccaaaaggaccgatgccagtacgatataatacatatagccctcaatatactgatccggtatctcagaatatttcatatcgaatcgcaataataatgccagaccatatgctatgatcaccgccagaatatcggcaatgacaatcaacatttttttctcatctgctttaactctcccctatttcttttacagtgaccgttttacaccatagaaaagaaatctatctcacgtcactcctctgctgcagatcacttttctataatgtaagactttgtcactgcaaaattttctcacacataacagaagaatccatgtttcaggattcttctgtctcttcacttttgtcaaacctgattatgcacgtttctttttgtatgttacacacatacctgctgcagcaactactgcggcaattacagcgtacatcattactggtgaactaccggttttcggagaaacgacctgggaaccggaaccatttccgtttgcaccatttccgccatttccgccgttaccagaaccatttgcattctgtacatagaatgctaccggtgaaagtctgtcgaatgtaactgttacagttccatcaccaacagtcggattttcctgatgccagcttccgtcataatagtgaagcacgataactttactgcttgccgtaacacctgcgatcttgaatgtaagtgtaaccgggaatttaacatttccaattacttttacgtcacgcagaagtgcaagactgtaatttgctgctgttgactgtccaacgacacttgctaatactgcctgcggatcagctttgatcgcatctactgcgctctgatctgcagcatcatagttttcagaaacaataatgtcagacagatcaaccgcattgccatctgcatcttttgcagcggtaacaatgtcagcgtttgcggatggacttggagctgcaaatgcagtcactgtcattcctactgtcagtacagcagccattaataatgccactactttcttcatagttttctcccttcataatttatttgtaaaaagtgatagcagatctgctaccctgtttacagcttatccttttgtctgtgtatgttccggctattccaccggtttataatatgtctcaatcaactgttcctgcagctgatcttcattgacatgaaattcttcatacttttctcccattacactttctcccggaagatactgtacttcatccgtcagataattgtaactgcttaatgcatcaatctgatcggaatccaggtcggtgacaatataccgatctaaaaatggagaaagtatatcatacattgcgctgccgccacgactgcgcatctgccgaaccattgccgtgatataagatacctgacgacgcatacgatctgaattgctgtcaaactgttcggtatcacgatatcgtacataagtttctgctttttcacctttcaggcagatggcctgtcccgactgaaactcaggatcgatctgtgcatcggcatccgtcatggtgacggtcactccaccaatggcatcgtttatttctgcaattccatctacggacaatgccagataaccattgattggcaggttatagagcaggtttttcactgttttctctgttgcccaacagcttctgcttccaccgatacagtaagcatactgcgtcgcaagctgtgcgtcaatagcaccgtaagactcgccatctgagctgtaaacatccacttttgtcatggtgttacggttgatctggagaatacgtgcttcttttgtctctttattaagagataaaagcataatacaatccgcctgtcccgcatccccgggcatataactgctgtcgatatcttctgctttatcaatgccaaggaacagtatgttaatcaactgatcattgtaagtatattttttgccattccactctatctcgttggtacttgcctgcgatactttgctttctgccagaacctcatcctgcgcttttttctgtctggaatgcagcatcaggaaaaatccgatgatcagtatcaaaacgataaccacgatcacataaatgatcttctttgctttttttttcatacgcttactgtacctctgtcaatattgcacataccagaaaacgctgatcatgatttccattgcaggttgataataccagcattttatcatctgtcgttatcggaagcggatcttcgatccaggttggcatattacggacttcatacaaagaatctaaaaaagcctgatatccttcggttgtattgcaatcataattatatagaatatgtcggttatcataggttaccgttgcaaatacacgatagcgataaatgtgttccggagtatagatctcgattgtttcatgctcttttcgaaacgtctcatcctgaaaatctttcagtctgctgaaaaaggaatcgttcagcatattatgaccatatacgaccgtcaccggatcttcggaaaacgcatgtggattataactgtactctgtcataatggatcccggaagaccttcctccccgtctacggtacggtacagataataatcatcatctccctctttctggaggatcggataatcgatcggtgtatccgcaattcgaatccatgcatagatatccggattttctgcctgcaaagttgcaaaattcaccggaatctgcacgggttcttcctctgctgatacttcaggttcttccgttacagatgtttccactttttcgcgcaattctctgtcttttatgttttgcaaatgattccttactgtaatgaaagcaatgcatccgatcgcagcaagaaataggatcagaaatatccaaaataatttattatgctttcttctttcttccatgtctgcctttttcgttcttttcttcctgtttgctgtaataagcaagttctttatctaccgggataacaccaagtacggtagcatccagatatgtctgaatatcttcttctgtctggattctatcattcatcatgtacaggatcacataaattgctgctaccagaacaagtcctgccagaatacctacggcaaggttcttgcgcattccattgtccatcgcatcggatgcaacttccggatgctcaacgatggtaggcggatctgtctgtgtaatagctgccatctgggcaactgctgctgtcgtcaccgcatctgccacttcataagacagttccggatcatcacttgtaactgtgattgagagcattcgtgtgtcttctttgtttgccacactgagcatgttctggatctgtccacgggtaagggtgatatttttatcttcttttaaactttctactgctgcgtcaacaaccggtttactactggcaatgatcgtaaaatcggaagaaagctcacttcctaactgaagatctgccattgaggtaatacttgttgtcttactcagcatgtagagggtggatgttgactgatacatcggagtctttaaaagggtcatgccttctgccaggattcctccaatgatcgcacccagtaataaaattttccatttctgtattaggtagaaaaagagactcagaagatcaatctccatctccttttcttcttttaactgatctttattcatcttacgttaccttccgtctccttcgtattctattcttctgtgtcctgaccatagttaccgtatccatatccgtaaccataactatatttctttccatagccgtagcgattggttccttcaccggctttgttcagaattacaccaaggaaatttggatttgcgttgacaagctgctcttttacaatttttgcagctctgcggcttacaacgtttggtgaaataactaagatagaagcatctgctgattttgcgatcagagcagcatctacaacggctcccagtggcggagtgtcgatgatcacataatcaaaggtctgtttcataccgtcgatcagctttgcatatgcttctttatttaaaagttcggttggattcttcgggaatcttccggttggaatcaggtacaagtttctgatgcttgttgcatatacgatctcagaagcctcactttttccagcaagataatggctcagtcctttcaggtttcttgaaattcctgttctctttgccatcatagaatttctcatgtctgcatcaatgaataacaccctcttatctgtctctgccaaaatttttgccagattgaaagaaacgcttgattttccatcatccgcagcacaactggtcagacagattactttattctccacaccagtaaactccagattggtacgaagtcttcgatatatttctttcataacaggagacaatgttgtttgttctgttatggttaattcctgcatctattatgctcctttctcctctatgtaaaataatgattcgggattctgtgcaaagatccgttctacttctgcggaaccgtattttttttctaccagtgtcatactttcccgcatatgtacctgacgctgatctgtattatgggcatcgctggcgatcagatccaccagtttttccttcaacagcttctgacagaaatgctttgtgcgaaaaccggtctttccaaggatactctcacagttgatctgtacgcttgctccggcttttcggattctgcggacagcatcctgattctgcaacgcccggtagcgctcaatatgtgccagcacaggaatcacctgtgcctcctgcgccatcaaaacggtctgaaaaatcatggcatactctgtctcatatccaaattccagtaagacaactggtctacctgccatgtaatatctgctgtccgacagaatcttctctgcccggtttacagaactcacaaaacattcgcgtcccagatacaagtgcatagacggaaacgtctcttcgcagtacagacgtgttttctcatacaccttctgaatatcttcaaagccaatttcaaacatgcctctccgataatgtggcgtaacgatcagatgtcgtattccctgctcgtactctgcctgcagcaacgacatcgtctcccgcatacagctggatccgtcatccacacccggcagaatatgattgtgtatgtcccaatatcctgtcataaatcagtaccgcctcctgcaattctaagactcgcatactatgcacaactatactatagtttatctttttcgacacgaaaagtcaaccaatccgcattttcttttttattttcggcaatttcgccaactatatatttaagagtctcattttcttgttactttttcaaagcatcgctccactgtccgtctaccaggtttaatttatccagcatcccactgattttctgccgcgtttcctgatccacagagcgatttactttcaattctgtgactgtccggttccacctgccatctcgtaccgataatcagattctgattttgctgcatgtgcccagatttccctggtctgtaacgcttggatcagatctgtacggatcagattgcggtgtaatttcacatgcacgcactcatctctcataaaactgatatctttcttatcgccgccttcacgggaaaaaccgcatatttccattaaaacctgtgacgcgcgcttcacatcctgctcatgaaccaggatatcaatatcaccgcttgtgcgaagccatggttccggatattcctcacgcagtacggaccctttcaacggaagaaatggaatctgtttttctgtaaacacttccccgatttcctgtaacgcgtaatcctgattcatatagcggtaaagtgcaagattttcctgctgttttagcttttctcctaattctccctgtggcattctgcctgcccgttccaacgctaccgaaacaatatacgccttcaaaaaaactcccaattttaaaaatcgggagtttttcatatcattctgatattttactgattattttttcagcggatatttctctgtcagtgcatctacgatagcgcgagcttttgcaacgccttcctcgccttctttgatgacgatggagattgcctctgcaatctgatccatatcttctgtgttcatgcctctggatgtaacggacggtgttccaagacggataccgcttgttacaaacggggacttcggatcgttcgggatggtgttcttgtttgctgtgatatgagcctcatccagaagtttctcgatggcttttcctgtcagttcaaacggtgtcaggtcaaccagcatcaggtggttatctgtaccgccggatacgatcttgataccgcggttcatcagtcctttgcaaagtgcctgtgcgttatctacgataccctgctgataggtcttgaagctatcctgaagtgcttctttgaagcaaacagctttggctgcgataacatgcatcagcggaccaccctggattcccgggaatactgctttgttgaagttgaagttatttttctccatggactctttggaaacaaggatcatgccgcctcttggtccacgcagtgttttatgcgtggtagttgtaacaacgtctgcatagtggattgggcttggatgaagtcctgctgctaccagtcctgcaatgtgtgccatatctaccatgaggtatgcgccgcatttgtctgcgatgtcacggaaacgtgcaaaatcaatggttcttgcgtaagcacttgcgcctgcgatgatcattttcggtttgcactccatagcaatctcttctactttatcgtaatcgataaagccttcatcgtttacaccgtaaggtacgatgtggaagtatgttccggagaagtttaccgggcttccgtgtgtcagatgtccgccatgatctaagttcatacccattacggtatcacccggctgaagcaatgcgaactgtactgccatgtttgcctgtgcaccggaatgtggctgtacgttaacgtactcagcgtcaaataattcttttgcacgctcaatggcgagattctcaacgatatctacacactggcatccgccataataacgttttcccggataaccctctgcatatttatttgtcatgatgcttccctgtgcttccataactgcgtcactgacccagttctcggatgcgatcagctcgatgtggctgttctgacggtccagctctgcttcgatggctgcagcgacatctgcatcaactacttttaattcttctaaattcatcacttttttcctcctgtttcgtaggttcccaactcgatttttcccatttactctctctggcgaaaaatctttttctatcatagcccagattttgcaaaaaagcaatacccagacttcaacgatttgtcgtgtgaaatttttaacattacagttcactcatcatatgtattcagatatcgatcatacttgcacgagaagatatcttggtacatactgatgaaggaaacgcctttttatgagcaaaaatagtagcatagctacgaagaagccctaaaaggacgttttgtgaatggcgcgtatgaactgtaatatttttttacaccaaaaagaccgccattcgccagcgtgatccgggaacgacggtctatctctttttgaaagggtggttttcaaccaattaatttattcaggggttaaatattattgtagtatgatctgcactttgtatattatttatgcatttgcagctaaagcttttcctgctgcttcgcatgctgcctgagcatctgcatccggtgcttcgtttgcgatgataccttcttcttcgatcatctctgcgcctgcgcctgtcatctgctcaacccagttacgcatccattcgccatcaccccatccgtaagaaccgaataaaaggatttttttgccggatacgctgccaaggatctcatctacgaatggctccatggaagattcctctaactgctctgctcccatagacgggcatccaagtgcgaatgcttttacatctgcgatatctgctgcacttgcgttctcaaccgggatgatttttgcctcagcacctgctgctgtaacaccatctgcaacgctctgtgccattgctgctgtatttcctgtaccactccagtaaatgatttttacttctgccattttctttgtctccttaatttaactttttattttatgctgcacatagccccggctgctgataaccagtatccgttggcttatatacagtattaaacgtttttactttttcgtccgttgtcattaccacatttttccaggtttttatgtgttttttaacaggcaatctctttcatctgttttcctgccataaattctacaacggcacactcttttgcattatcgtaagcctgaaaagtctgtttcgcctgttctacatcgccatatactttccaatatccggtgtagcggctgtcttttccttcatgaaggataaaacctctgacatcttccaacggatatccaaggaaaattcccatttcatgtggataactttctgctccctgtgctgacagggaaactctctggcttaaatgattcagacaagcatccacatctgtactttcataaccatatgtatgtaaaaatactatggcctgtggatctgccagacattgctgtacttcctgttcccggtatacgtaaacgactgcacgccccattccctggcaaagacatctgactttgatcccggtatttttgaatacggaacgtacaaatttcagatatgctgccggaacggtaaacatggatgacatttttacgttttttaacaccggtgcacaatgcaggatgatctgcatcatcaggctttctgtcatctttctgctggaaagtcgatgtaatacggcttctgttggcatgtcttgtctcctcctatatctaaatactccccttgttgtcatatttctctcatctattgatctatttaagaaatcattgatctgtttgagaaatattatttacgctttttgttttcattatgagtttttatgatctcatttctttttcaatactttattttaaaattaagcgtactgctcaaggattccgtttaatgcgctggcgctgctgctgtgggaacgctcaacaataatatttttgcgttctgcttctgcaactgcacaatgtaccattttatgagaaacagtagatgtgaaaaggatcagcagatcagggctgccaattttatttttcagatctgttttcattttggtaaatacttttgctttacatttatactgcttgcagatctgtttgtactgcgtttccattctttcatgcccaccaataattacaacgctcatgttagtctccttcattttttattagcatattctaacctatgtttttaaaagaaggcggagcctttatccgcctgacattctatctacgatatcctagttgtttgctcagatatcttttgcatgtggttagtatactttaaccctcttgatccgtcaagagggttaatgatagtgttttctcatttagttagtttttcttaacttctaacataatgaccggattttccgccatctttttccaacagcaggatgtctttgatcaccatgccacggtctactgccttgcacatgtcataaattgttaacagtgccgcggagactgcatgcagtgcttccatctcgattccggtctttccggttgttcgcacagaagcaatggcttcaatctctgatacttccggatgcagttcaaaatgaatgtctacgccggtcagtaataacgggtggcacattgggatgatctcccatgttttttttgctgccataattccagctacctgtgcgactgccagtacatcgcctttttttatttttccatctgtgatcagggtaaaggtctccggctgcatgcagatgtgtccggaggcaatgccgattcgttttgtgtcggctttctccgatacatcgaccattttggctctgccctgttcgttgatatgcgttaattctgccatgattccaactccttactttccaaaaccacaattcgggaaggtacagacgccacagttcagacacagaccgccttcccccagttttgcaatatcctctgcggtaatctcatcatctgccatcacacgcggcaataccagatcaaaaatcgtacgttttgcatacataacgcagcccggaagtccaaggatcgggatgattctgccatctgcttcgttcttataataggaaacaagcatcattgcgcccggaagcaccggtgcaccgtagcttacaactcttgctccggtagacatgattgcccacggcgtacagtcatccggatcgacactcataccgccggtacagatgatcagctcagcgcctgctgcaatctgtttcttgattgcttccaaaatatgctctttttcatcatctacataaatctggtcaatttcctctgatggaaactctgccaatttttcgcgaataacgggactgaaggtgtctttgatgcgtcccttgaatacttcacttccggttgtgacaatgccatattttttctttttatatggaagaatctcaaaaattggttcggtgcctcctacctctctggcacgctccattttttctttttcaatgaccagtggaatgattctagttcctgccagcttgtctcccacttttaccgggaaatcaccatggcgggatgcgatcatcatctccccaaggctgttcactgccaccagcgcatccctgcgaatttttaacacgccgtcaatatctgcgatcagttcgatttttccctctttgatatcagacggatgcatgtttgcacctgcacagatgtcgtagagaatctcagcagcttcgttttcatgccatttggtatcatctttttcccatacatatagatgctcttttccaacggacaacagcaccggaatatcttcttcttttaccacatgacctttgcgaaataccgcatctttggtcacgccttttattatctgggtaatatcgtggcagagtacatgccctaccgcgtcttctgtcttgatcagtttcataatatcctaatatctcctaaacaactattttctggcgcactcggcgtcatttccaagtaaaatatccaatccatgcttcaaagatggcaaaatgtagttcaacgcctcgtctactgccttcggactgcccggcaagttgatgatcaatgtttctccgcggatgccggctgctgcccgtgacaacatggcgcgttctgtaatagtcagagaatattgtaaaattgccatcggaattcccggtacttcccgctcaatcaccgctttggttgcttccggtgtcacatcgcgtttggaaaaaccggttccgccggtggtcagtacaagctgaatgttatcttcactcatagcgaccatttcttctgacagcatctgctgatcatccggtaaaatcactttttttgcgatctcatatccatgctgttccataatttcagcgatttttgctccactgagatcttcgcgctctccgtggtagcctttgtcgctggctgtaataattcctacccttatcattgcattgctccttttttatcgtctttttttattttccctgcctttgagtataccatacgaatacgcgaatgtcacacatgaacggtacaatttcgttatcacatatccacaacatgtctattgctttatataaacaaaaccggaaacctccttcatcggataaaaaacgcctcaggagcaaaactcccgaagcgcatttttataagcctcattatctaccagatatccggttccatgctctgccccttccaccagaagcacctttttcgatgcccggcagttttcggcaactttcacagtcatttccaccggtacgttactgtctgcggttccatgtaccagcaataccggaattgtattgtttttcatcacttccggcacagataattctttcagcgaataatgtgccagcagacgactccagataccgattgcaatggtcattagcgttcctttgcagtgataagtcgtccgaatccgctttttgataatatcatatggagaagaaaatgcactgtcagcaacaatgccggtgacattttccggaagttccatggaaacattcagtatctctccagatgaactatttatttgaacctgcttgttttcatgatgcgcagtcgacatcaacaccgtagaagctcccatggataatcccgccagaatgatcttctgatcggttccgaaacggtttgcgatatactgcgcccatagacagccgtcgcggctctctaagacaccaaaaccaatgtattttccttcacttttgccagctgcccgctgatcaatatgtacgatgcggtttccacattcgtaatatacatgagaagatgcggaaaaatccacctccggatgcgtacgataaccatgaaacatcaacaccgttcctttcgctcccggctgatccatcaggcgcgcatgcagctttaagccatcctcggactgaatgtagatatcctctgctttctgctggttgatccaggcaattccttcctgaatctcatcataatactgatcccaggcggtgccttttagggcttcccggtcattgatattcaattcatgtccacgacagatggcggttctgaatccgacatatccgatggcaaaccatccacatataattactgcagcaatgatacacactacaatccacaccatgttttttactcctgttgttcattttcataaggaaagcagatgtttccacctgctccccattccttttctatcgtatatttctacaagaatgccggagcattcttgaatctaattcccggaaatttcatcgatcaagcggatctcttcatctgtaaatcctgcgctttcaatcactttgatattatctaaaatctgctgcggcttggatgctccaatcaggacacttgtcaccacatcatcttttaatacccatttcaacgccatctgcgccagactttcaccacgctgttttgcaatctcattcaacgcctgaatctgatgtatcttgctgtctgtaaactgctcttttttcaggaaacgaccatcggtgttgacacggctgtctgccggaatgccattcagataacgatctgtcagcatgccctgcgccagtggactgaatgcgatgattcccttgccttcttcctgcgctgcctgtttcaaaccattctgctcaatggtacgatcaaaaatagaataacggttctgattgatcacaaacggacaatgcagttctctcatgatcgctgccgcacgtttcatcgtctcaccatcataattagaaatacctgcatacagtgcttttccactttttaccgcctgatccagagctcccatggtctcctccagcggtgtattcggatccatccgatgatgataataaatatcgacgtaatcaagtcccagtctctgtaaactctgatccaggcttgccagcagatatttgcggctgccccagtcgccatatggacctttccacatatcgtaaccggctttggtactgatgatcaattcatcacggtatggtctgaaattctccttcaggagttttccgacatttgcctccgcactgccgtactccggaccgtagttatttgccagatcaaaatgtgtgataccattgtcaaaagcagtaaataccatctgacgcatgttctcgtaaacacctgtgtccccgaagttgtgccagaatccaagggagacctccggaagcttcaagccactgtttccacagcgattgtacaccattttgtcatatcttgtttcttttgcctgatacatgatacgctcctcctcacgataccttttgctctatgtcagacattgtaccactactttacgctcccagcaataccgccatgatcggtatcgtcaccagtgacacaatggtagagatcgccacaccaatagatgccgaccggctctgtcttggatacggtgccgcacccattgcaaccagagaagccaccggcattcctgcaccaatggtacagatattgatcagtgtcacgtcttttgttaccagatgcatgaagaaccatacgatcaccggcatcactgccaaacggattggaagcatcggccagattccacgttcctttttaatttcaccaaaggatgctgctgccatggacgctccaatgatgatcatggataacggtgttgtgatatttccaacgaatcccacgcaggcatagaaaatatccggcatcggaatatttgcaaaataaataaccaatgacgcaacggaggcaataattccgttattaatgaaactgcggaaattcagtttttcctttacaaaatttccggactcgatagccgcatcttttttcagcaaatgcagtcccatagagaaaaacaggatactgaacggcatattaaagatcgtgatataaaaaatcgcactgtcgccatacagagcctgtacgaccggataacccatgaaggagttgtttgaaaaaatgagcatacacatgtatgttccacgcaaatgcgccggtacacgcatgatttttgtaatgatccacgccagaatcggaaagatcacgtacattaccacgcctgccagaaacagtttcaaaaccatccctgtatcatcgtgtgaaaccgtagaaagactgtttaaaataatacacggacaggtgatctgcacgatcatactggaaagttttgcatttacttctttggtcaaaatgttcttcttaaacagataaaaaccaatcagcattgcaattaatagtttacacatcgtagtaacaattgtcatagcttcatctcccactttcattcaatattatatcataagcaaaaccggcttatgatcaacattcgccggtcgtcaatcatgcaagcatgttgactctcttgcgctcattataatcatatattatgcaacattttctctatcaaagtgtatcatagctttttgcgtttgtcaccattaatcctggtcttaccagttatatagcgtcattttccacaatttgctcagaaattgccgaattttagctgttccattgtacacaaagccaataacctatggtatacttatttcattacagtcgcgatgatctttttcaaaaaacacatcgccatacataaggagaatatgtagtatatgaaaaaattcattcaggaattcaaagagtttgccttaaagggcaacatgatggatcttgccattggtatgatcatcggcagtgcatttaccggcatcgtaaattctctggtaaatgacatcatcaatccgattctcggaattttcaccggaaagattgatttttccaatctgtttctcactctggacggttctcattatgagacactggacgctgcggaaaaagcaggtgccgctgtattcaaatacggttcctttatctccaacgtgatcaattttatcatcatggcactggttgtcttctgtatcgtgaagtttttgaacaaactgcgcaaaccggcaccggaagctccggcagaaccgaccacaaagaagtgtccgtactgtatgtctgagatcagcattgaggcaacacgctgcccgaactgtacatcatctctgatcgatgtagatgcagcagatctgaaataatagatcagacaacgtatgcccctgccttttggggtacgaaacaaaacaaatgtatccagagcagaggtattaaattttatgatttcaaattcagctgttatttatataggaaaatctcggtgctcttgtgtaaaaaacagactggatcttatgtatttttaagaaatgagggcttgaactatgtgggcttacgaaagtgtattttatcaaatttatccattgggattctgcggagcaccttttgaaaacgacggtgtgctgacacctcgcatccgaaaggtcattgactggattccacacatcaaaaatctcggtgcgaatgccatttatttttcacctgtatttgaatccgatactcatggatacaataccagggatttccgaaaaattgatgtgcgtctcggcacaaataacgactttgccgatgtctgcaaggcattacataaagaaggcatcaaagtcgtattagacggtgtgttcaatcatgtcggccgcggcttctgggcatttcaggatgtgctggaaaaacgctgggattccccgtacaaagactggttccatatcagttttgacggcaattccaactacaatgacgggctctggtatgagggctgggaaggcaattatgaccttgtaaaattaaacctctgccatccggatgtcaaacagcatatttttgacagcatccgaagctgggtggaagaatttgatatcgacggtctgcgtctggatgtggcttactgtctggatgaaaattttgtccgggaactccgggccttctgtgacagtctgaaaccggatttcttcctggtaggagaaatgcttcacggcgattacaaccgcctgatgaatgattccatgctgcattctgccacaaactacgaatgttacaagggactgttctccagcttcaactccatgaatatgtttgagatcgtacactctctcctgcgtcagtttggtcccgaaaactggacactttatcgtggcaaacatctgctctgctttgtagacaatcacgatgtcagccgtattgccagcaatctgaccaatgagcatcatctgccgctgatctatgccctttgttttggtatgccgggtattccatgcgtttactacggaagtgaatggggtgcaaaagcaaacaaaagcgaaggcgatccggctttacgcgcctgcttcgatgcaccggttgaaaatgatctgaccgcatggatttccaaacttgctactgcaaaaaaggaaagcaacgccttaaattacggtgatttccgttctgtcgtactgacaaaccgccagtgcatttttgagcgaaaaacagattctgaacgtgttttcgttgccatcaatgcagatggcgaaccgtataccgctcattttgatgccggatgtggtaccgccatcgacctgattaccggaaataaacatgattttggtggtggcagtgaacttcctccgtacagtgcatttttctggaaatgtgaatattaaatatctcataaattaataattaaaagacagatttgtttctatatagatgacttttcttcatagtcatatacggaaataaatctgtctttttactatttttccaatttaaacctatctgtaatttgacatgcaaacttttacgtatcctgcacgtatttaaataccagactcattatgttctgcattattttttagtctctgtaaatcatttttatgtaaagaacttccatttcgccagtctgtccccctcatattcgacttttaatgaaaagaatgatggatttccggatagcagacgttctaaaaacaaatggtcaccttcccaggttggaagtgataacactttttccttttccacccattccaacgttccctcgttacactcaattaaattgccctcaaattccgttgccgtaaaaagatgcatgtattcatcttcccattcatcagaacaaaacgtcacaatcccacgaaactggtactttgtcaaagtcagtcctgtttcttcttttacttcacggatcacacactcatccggtgattctcccgcttcaaacttcccaccgacaccaatccacttgtcgtgattttcatcttttttctttttcgtgcggtgaagcatcaggtatttttcatctttttctatgtaacataaagttgtaagacgcataatattttctcccctttttctattgctttttgttcatcatttggaatatactcgatatatgagcttccgaatttctgaaacctgatggttattaagatacttgtaccgttatgcagaatcataactgtgtgcatttaggataacacaaaagaatagacgttgcagctatttttttatttcaatttatttttacctcgtacatttattatatacagccaacgctcatgtctgcataaagaatcagtcagacacattcgcgtcttgaaaattaaggagataattatatgacacatgcacttgtccttctctgcggaggactcagcacacgtatgggcacaaacaaggcttttctgccttttggtgaatacactctgattgaatatcaggtccgccgctttcgcccgaattttgaaaaaatatatttatccgttccgaaaatgacggatttctggatgaatctggcagaaaaactggattgtcaggcaattcctgaccgcattgaaaaaattggtccgctgggaggattgtacagctgtctttctgctgtttctgaagatttgttgtttttcacaccggtagatgcaccgtttacaaacacggatgccgcccttacattatgccagacgttggaacagtctattgacacagttcctgaaaaatatgcctgcgtgcttgttcatccaacccgtggcaaacagccgcttaccgctgcctatgcaaaaacatgtcttccaaacattgaatgcatgatacagctggaaaactaccgtctgcgtcagcttctgacaccggagcacactatcatcgctgatattcttgttccacaggagcatttttataatatgaacgacatgccatcctactatcatgccctgcagatgctggcagaaaaacagcctgcactgtttcctgcggattttgtcccacaaacagaacagacaattccttatgtctcattctctgcaaaatcaggaactggaaagacaacttatctggaaaaactggttgcctgcctgaaagaaaaagggcttcgtattgcactgatcaagcatgatgctcacggttttgaaattgatcagcctggtaaagacagttatcgtctgcgaaaagcaggtgtggatactatgattttaagtggtccggagcaaactgtacagatacagacacatgctaccggagaaccttctctgaaacagttgctttctgagatccacgatgtagacctcattttaattgaaggctacaaatttggctcccaaccaaaaatccagttactacgcaaagattataatgagacaccggttggcaatcttgaaaataccatcgcatatgttgccaattttccatatgcgcctgcgccaggaaatcttccagtctttgatttaaatgaaccaacagaaatggcagaatacctaatttcccagttcatttagcctttaaattcttgtttgtcattgttttggctaaaattttaatataattaagaaaacgaagaatcctgtcagaaagctagacg

SEQ ID NO: 13124 - DNA, 265 bp, Unknown
  gut microbiota DNA sequence
gtgaaaggtgacagtttcaccatcgtaatgatctatacgtgaggttgcgatgactggacgaccaagataacgaccaatgtatttggtgacgattttagggttgcatttgttgggtttggcatagacatagaagccatgtttgtgttcctggtaacaacgtgctttcactttcttgaaggaaacaccaagttctttttccataagatcaagaagtgcggtacgaaatgcattacgaagaaaggtatagttgaaatgctttttggag

SEQ ID NO: 13125 - DNA, 16618 bp, Unknown
  gut microbiota DNA sequence
atttgtagaaaagatggaaaaagagaaggaacaggatatccgagtggtatatcagcaaaaggattctcttgctaagaaggaaaatccggtagcgttttctttaggagaagaaggcttaaaatggttaggagaatacgatatatccattgaagatctgctgatggggaaagcaggaacgaaaaaggaaacgaaactggaaaaggcacagaaattaatcctggagttattaaccaaacggaaagtaatgtgtttagaagaattagaggcagaactactagcctatgggatttcttccagaacaggaagagatgtaagaaagcaattggaaagtagattaagctatgactggtgtcagggaagaaaaacagttgcgttaatcacagaataaaagatgacattggcaaaaaaatactttggcattggcagtctttatagatacctttgccagccgccaatgtcaaagatatttaccatttatttcaaaaaatggtcgtgtgtattgcgaggtgaaatttatgctatgcacgtaaaaacagggaaaggatattatgaataaaccatatgtaccgatttatgaaaaggtggctcttacaattgaagaggcagctgaatatagtaatattggacaaaatagaattagtaatttattaaaagaaccacgatgcccatttgtactttatgtaggagctaaaaaacttgtaaagagaaaagaatttgaaagatttatttcggaaaatatagagatttaagagataggtgatttagagataggagatgagatggaaattgaatattcacaaagataaaatggtatggtataatataagatactgtattagggcttctttgaaaggagctaaaatatgggaaaagatttaaaaggcaaagaacttggtgtgggtatatcacaggaaagtacaggattatactccgcaagatttgtagatcggtttggaaaaagaaagcataaacgattcaaaaagctacaagagtgtagaacttggcttgcagatgcgatttatgtagatgaacatagtgatatttcgatgccatcggatatgttggtggatcattggtttgattattggattggaataaagaagaaaacagtccgtccgaatacggttcgtaattatacggagagatatgtaagaaatattaaaccattgattgggaaaatgttattatcagatgtgaaacctctacattgtcaaaagatattttatgatatggcggatcaaggctatcgtacgtctacgatttatcaagcaagaattacattatataatatgcttgaatatgcaaaagaaaatgaagtattacgaacgaatccctgtaaaaggtcagtaaagagtgatatgggaaaaccttcggagaagaaagttgcattagaaagagatgtgcaaaaaatatttttgagatatgcagaagggcagagttatgaaaatcagtatcgatttattcttcaaaccggactgaggacaggcgaattagttggattgaaatgggaagatattgattttgaatctaaaacaattcagattcgcaggagtatggaataccgttatagtgtaaaagagtggcgtattggagaaccaaagagtaaatcaggttatcgtacgatacctttaacagaagaagcggttgctatactgaataaacaaaaagaaaagaataagtggatttcagaaatttcaaaagaatgggaagagtttgtgtttctgtgcagaaaggggacaccagttaagaacagtacatatgatacggcattgtttaagatttgtgacaaagcacagattcctagattttcaatgcatattttgagacatacatttgctactagatgtattgaagcaggtatgaagcccaaaacacttcaaatactactgggccattcaaatattggaattaccatgaacttatatgttcatactaccgaagaagaaaagaaaaaagaaattgatttggtagcagaagcgcttatggcaatatgatggcccactaaatggcccacctattaaagtaagtatgctgaaatcccttgaaatctaaggatttataggaggaaatagaagaaatgaaactaggaatcgtgggacttccgaatgtcggaaaaagtaccctgttcaattcactgacaaaagccggcgctgagtcagccaactatccgttctgtaccatcgacccgaatgtcggtgtcgttgcagtaccggatgagcgcttgaatttacttggagatatgtacaattccaaaaaagtaacaccggctgttatcgaattcgtagatatcgcaggtcttgtaaaaggtgccagcaaaggtgagggacttggaaaccagttccttgcaaatatccgtgaggtagatgccatcgttcacgtagtacgttgttttgaagatccaaatgtagtccatgtagacggaagcgtagatccggcaagagacattgagaccatcaacttagagctgatcttctccgatattgagatcctggatcgtcgtattgcaaaaacaacaaaaggcgcaagaatggacaaaaaacttgcaaaagagctggagctgttacagaagatcaaagcacatctggaagacggcaaacttgcaaagacttttgaagtaggcgatgatgaggatgatcaggaatggttcgcttcttacaatcttctgactgcaaaaccggttatttacgcagcaaatgtttcagaggatgatctggcagacgacggcgcaaacaatccgcatgtagcgaatgtgcgcaaacttgcagctgaggaaggttctgaggtatttgtcatctgcgcacagatcgagcaggaaatcgcagagctggatgacgatgagaaagcaatgttcttagaggatcttggactgaaacagtccggtctggaaaaactgatcaaggcaagctacagcttacttggactcttaagctacctgaccgcaggtgaggatgagacccgtgcatggaccatcaaaaaaggaacaaaagcaccgcaggcagcaggaaagatccataccgatttcgagcgtggatttatccgtgcagaggttgtaaactacaaagacctgcttgagtgcggttcactggcagcagcccgtgaaaaaggtctggtaggactggaaggaaaagagtacgtagttcaggacggcgatgttatcctgttccgtttcaacgtataatatgaaatatttgatgtgagtgacaaaagcgtagcagaaatattcttcgcttacatcttataagtaaaaatgttggaaacatttttaaataacgtatggatatatgaaaaatgcacttcctttttcaatctgaataaaatataaagaaacagagagtaaaggaaagtgtaccatgcgtttatgtgaattttcaaggaaagaggtaatcaacgcctctgactgcagatgtctgggaaatgtctgtgatctggagtttgatgaatgcagcggacagatatgtgcaatgatcataaagggacctccgaagtggtttcatctggtgggatgtgacacggaatatgtcatagactggaaaaaaattgttcggatcggaccggatgtaatactggtagatatatgtgcggagaaatgcctgcacaaactataaagaataggtacggaggaaaaagagcgatgaaatgcccttactgcagcagtgataacacacgtgtcattgattccagaccagcggaggacaactgttccatccgccgcagaagactttgtgatgactgctcaaaacgttttacaacttatgaaaaagtggagacgattccgctgatcattatcaaaaaagataacaccagagagcagtataaccgttccaaaattgaggacggcgtgctcagagcctgtcataaacgcccggtatctgtcaaccagatcaatcaactcatcgacgatgtggagacggaaatcttcaatatggaagaaaaagagatcccaagcagcgtgatcggcgaactggtgatggataaactgaaagatttagaggcagtagcttatgtgagattcgcatctgtatacagggagtttaaagatgtgaatacctttgtggaagaactgaagaaagttctggacaaataagtatatccggtatgagtagtatcatatcagatgtaagtaacgaaatgatatcagtggcgggatctgatctgccaactgaacggaggtaacctatgtttcaaaaattttatccggatctgtatatttcatctacatatgaaattgattttgaccggttgtaccgggacggataccggggactgatttttgatattgataataccctggtgacacatggtgcaccggcgaatgagaaggcaaaaaaactgtttgcccatctgcatgagcttggatttgcgacttgcctgatctccaacaatcaggaacccagagtaaaatcgtttgcggacgctgtgcagtcaatgtatatttacgatgcacacaaaccgtccacaaaaaactatgaaaaagcaatggaacggatgcacaccgataagaagaacacgatttttatcggtgatcagatgtttaccgatgttttcggagccaatcgaaccggaatcccatcgatcatggtgaaaaagattcactggaaagaggagatccagattgtcttaaagcgcagactggaggcaattgttctgatcagttaccgtaactatagaaaaacacacaggagtatttttgaaaatcgggaggaagaaaaatgaaacttgtaattggaaacgatcatgcagcagtagaactgaaaaatgagatcaaagcatatctggaagagaaaggtcacgaagtgatcaatatcggaaccgacacacatgacagctgcaactatccggagtacggcgagaaagccggacgtatggtagcagcaggcgaagtggacggcggtgtgctgatctgtggaaccggcgttggtatctccatcgcagcaaataaagtaaaaggcgttcgcgcagcagtttgttctgagcctgttaccgcacgtcttgtcaaagagcacaacaatgcaaatatcattgcattcggtgcaagaatcgttggaagcgagactgcaaaagcaatcgttgatgcatggttaaatgcagagtttcagggaggacgtcatcagacaagaatcgatatgattcataaaattgaggaatagtccataaaaaggttgaaaaatcgcggtttttcatatagaatagagagaagtaataattaccattcgtttgtggtaatagaagaaaagaccgaaggtcttaacatacaaggaggattttttaatggcaaacgcaggaaaggtaatcggaaaaggtgttacaatcgagctggaaggcaacgtttacagagtagatgatttccagcacgtaaaacctggaaaaggcgcagctttcattagaacaagattaaaaaatattaaaacaggcggagttgtagagaaaactttccgtccgacagaggatgtagagacagcacacgttgacagatctgagaaacagtatctgtataatgacggtgatttatactacttcatggatacagagacatatgatcagatcgctctgagcacagatgcaatcggtgatgctctgaaattcgtaaaagagaacgaagcagttacaatgcttgctcacaacggagatatcttcgcagttgagccgccaatgttcgttgaacttgtgatcacagagacagagccaggcttcaaaggcgatacagctacaggcgctacaaaacctgctacagttgagacaggtgctactgtatatgttccgttattcgtaaacgaaggcgatgtaatcaaaattgatacaagaacaggtgagtacttatcacgagtataagaattagcaatcggtatagcgaactggttcttatgaattatgagtaagtaatgagcggattacgaattaccgctatgatactacttgtaatgaactaaatgaagtgtaatgcggggcagacgttttgtctgttccgttttccgtttaagcgaaacatattcgaacttttcaggctttgaaaatactgcctgtgagttgaaattaggagaaaaacatgaaatacgattttgacagaatggtaaaccgttatggtacagattgctacaaatgggacatgatcataaaacgaaaattagatccgaataccttaccgctctgggtagcggacatggattttgagaccgttccggaagtaaaagaacgcttaaaagaagtggcagaccgcggtatttacggttattccatgttgggagacggttattatgacgcattgaaaaactggttttccacacgatttaactggcagattgaaaatgactgggtgattgcaactccgggggtggtatttgcactggcagcagcagttcgcgcctacacaaaagagggagacagcgtcatgatccagcgtccggtttatcatccgtttacaaatgtggtaaaagaaaacggacgcaaattagtcaataatccactggtgctggaaaatggaaaataccatatggattacgaagatatggaacaaaagattacagaagaacaggtaaaactgttcctgctctgcagtccacacaatccggtgtcccgcgtatggacaaaagaagaactgtgcaagactgctgaaatctgcaaaaaacacaatgttatcatgatcgtggatgagatccactgtgattttgtttatgagggatatcatcacactagctttggcacactgagcgaatatgcagacaatgccgtgatctgtactgcaccgagtaaaaccttcaacctggcggaattacagctttccaatatcatgattccaaacccggaattaagaaaaacattccaggcagagatgaacaaagtattttattccgatgcaaacctgttcggacaagtatcctgtcaggcagcctacgagcacggtgcgcagtggttggatgaattactggtatatctgcagggtaatatcacatacatccgtgattatctggcagagcatttaccgaagattcatttgattgagccagagggaacctatctgctctggatggatttccgggagtatggactttcaacggaagcattaaatgcccaaattttaaaagatgcaagaatctggtttaacgaaggttccatgttcggaccggagggcgcaggctttatgcgaattaatattgcaagcccgcgcggtatgatcattgagacgatggagcgcctgggtgaagtttttggagaatagtgtattctgcacagatttcgcatacgttcgattgaaatgcaggaagctggttatgcagattgcttcgggagtttgggtgtcttacgcaggctgataagtgccagaccggagatcaaaatctgactggcaagcataccccatagataggcagacagaccgatccgtggaataccaacaaaaataaagccaatgcggagtatggctccggacaagttgatcagcattgtgagtgtcggtttcccaagaccatgcagaatgctgcacagcgtagttgcgaggaacagaaacggacagatccagcttaaagtccggacataaagtcctgccaaagcattgtggaacaggtgaatgccgatccagtttccgccgagcagaaaaccgagagtacacagcagtccaaggatgacacacaattgtgtcgtcttctggactgcttttttgatcagatccatgcggttgcggctgtttgcttccgaaatggcaggcagcagcataacggacagggaattgctcagcacgcagggaaacaggatggtggaaaaaaccataccagtcagaataccgtaaacgcttaaggaatcactgtttgtgtaaccaaaatcccgcagtttcatcggtatcaggatcgcttccgcactttgacagatgcttaacaaaatacggttgcaggtgagtggtaatgtcatggtgcacagctcccgcagaacctgcagataggatcgagattccggcggaagcgaaagagaggcttgcgtcggatttttttcgtgtgaaaaaagtaacatcgtaacggaatagagcgcagcggtcacttccccgaacagaataccccagaccgcaatttcaggagaaggcaggtttccctgttctgtcaggatctgtatgagcagccagacacctgccacacggatcaattgttccagaagctgtgaaatagaaggaatcgcagctttctttttgccaaaataatagccattgatacaggaatgaatacaggcaaaaggcagggaaaacgtcatcagacgaagcagagatacggtacgtgcatcttccagcaaaacagagccgatccatggtgcgtatgtctgcacaaatgcgatacagataccggagagcagcaaagaaagaaccagtccggtcacaagatagcgtctggcctgctgttcaatctgacattgggcgcagtaccgggaaatcgcggtctgtatgccggcagctgagaccgcgatgatcagggcgaataccggaaaaattagctgataaatacccagaccttctgcaccgatcgtacgtgacaggaatattttataataaaaaccgatgatcctgcttaaaattccggtcagtgtcagaagtagtgtgccggaaatgagattatttttgagtgtatttgtatgtaaaaccatagaaattaattgtttttttatatcatatgcaaaagggttgttggtcagaaccggaaggaaagggagactcttatgaagcgattggtttatctggataatgcagcaaccacacagccttttccggaagtgctggatgccatgattccttattacagcagatattacggaaatccttcgtctggctatgaactgggggaggagagcaaacgcgcaatgtctttgtcacgaaagtggatcgcagataccctgcaggttgcaccggaaacgatttattttacgtctggaggaaccgagtcggataactgggcacttatgtttgcggtgagtgccagcaaaaagtgtgcgccacatatcataacgactgcaatcgagcatcatgcgattttaaatacatgcaaaaatctggaaaaaagcggcgtccgtgtgacctatctgccggtaaacagaaatggaattgttttgccggaacacgttgagcgggcaatccgtccggataccgtcctaatttctgtgatgtatgccaacaatgagattggaagtatccagccaatccgcaaaattgcagaaatcgcgcatcgaaggaaggtgctgtttcataccgatgctgtgcaggcatacgggcagatcccgattctggtcaaagaagaagggattgacctgctttctgccagcgggcataaatttaacggtccgaaaggaaccggttttttgtatgcacgtcagggactgaagctgcagccaatgatccacggtggaggacaggagcggaaaatgcgctccggaacagaaaatgtgcccggaatcgttggtattggaatggcagcacgctgttctgctgagattctggaaaaaaagatgcgctatgagaaaagattgcaaaactatctgatcgaccggattttaactgaaatcccggaaagctgtctcaatggttcccggacaaaacgtctgcccaacaatatcaatatcagtattgcaggaattaacggaccggcggtggttgcgctgctggatctggaaggaatctgtgcatcttccgcttcggcatgttctgcgggaatacagaaagcgtctcatgtgcagcttgcgattggaaaaagtgaacagcaggcgtatgaggcgatacgttttacgcttggggttcataatacacgcgaggaacttgactataccgttgatatattgaaacaatgtgtgaaaagattacgggaatcttcggggtgccacgaagtttaaaatgcgtgatttgaaaaatgtagaaatcggcgaatccttctgtggcaagcggttcagtaagtgactgagttttgcaagttttgcgcgaacgggaaacgaccagcttttattggagttggaagtgagcgcgataaaaccgaagcaaaacgaaggtaacgaacggttagctggcacagaaggattcgccgatttctctttaaaatatcagatgggagctaatcccccatctgatatagcctccggcaggattacagaggtgcgcagttgaagtatgtcatgcaattgcatgacgcgcacctcgcaacaagaatgccggagcattcttgaataaatttgacccgaaaacttagcaaatcagaataaattccggtttccgtttcgtgaagacggtaaaataatcgaatccggcagctttcagaattcccggtactttttcgaaatcccaggcaatctgatccggagcatgtccatctgcaccgacggtaatgatttctccgccaagttcccgataacggtgcaggatttcttctgtaggatttggatgaccgagcccgtatttgaagcctgccatgttcaattcaatgccttttccacgggcaaccagctgtcgcaaaatttcatcgatcacatctttgaattttttataagtatagtctgcatttttatttggaccgtaacgtaccacataatcaatgtgtccgtatacatcaaattcatcaaatgcagcaatattttccagaattgattcaaaatattcccggtaagcagcagtctccgtgcggccttcataataaacaggataatacggatcaatgccgtgtacaacgtgagaagatccgattacaaaatcaaaatcctctgtctgtaacaaatcgtgatgtttttttgccagatgtggctgcagtccgagttcgattccatagttgatcgtcagaatatcggaaaagtctgactgcagtttatgaatttctttgctgtactgatcaaaatcaatgatgaataaatccggatcatccgggtaatcataatcaaggtgatcggtaatgcagattccggagagattttttgcaacggcagcgcgtgccatggcagaagaatccgcttcactgtctccggaaaagtgagtgtgcatatgtgtatcccaaagcatgaaaatagctcctttcaatgactgtattttatatcttgcataatacaaaacgctctgaatcgcgcagttacgcgactcctgggaatatgataaacactaaaaaggttttttgtcaatccaatacgtgcattttgaataggaaaaatggctaaaaatgtaaaaaaagaaaaaagttttgtgcatatcttacaaaaacaaaaaaacaatatagatatttgctataaaaacaagtaaatatccaattggtaagcttgtacattttgctaaaaaaagaagaaaaatgctatgagttggtgaaaaaattaacaaacttaaaataagcgcaggaaaagtattgaaaaaatcatagttattcgttaaaatatagtcagattggatgagatatccaaaataactcaccggcattgatccggatacattttaattctaggaggaatgaaaaaatggcagtaaaagtagcaattaatggatttggacgtattggacgtcttgcattcagacagatgtttggcgcagagggatatgatatcgttgcaatcaacgatctgacaagcccgaaaatgcttgcttacttattaaaatatgactcttctcagggtaaatatgcaaaagctgaaacagtttctgcaagcgaagattcaatcacagtagatggtaaagagatcaaaatctacaaagagccagacgcaaataattgcccatggggagaattagacgtagacgtagtattagagtgttccggattctatacatccaaagaaaaagcacaggctcatatcaatgcaggtgctaaaaaagttgttatttccgctccagcaggaaatgatcttcctacaatcgtttacaatgtaaaccatgatacattaacaaaagatgatacaatcatctccgcagcttcctgtacaacaaactgtcttgcacctatgacgaaagcattaaatgaccttgtaccgatcaaatccggtatcatgtgcacaatccatgcttacacaggtgatcagatgacacttgacggaccgcagagaaaaggtgacttaagaagaagccgtgctgcagcagttaatattgttccgaacagcacaggtgctgcaaaagcaattggtctggttatcccggagttatccggtaaattaatcggtgctgcacagcgtgttccaaccccaacaggttctacaacaatcttaaacgcagtagtagaaggaaacgtaacagttgacgagatcaacgcagctatgaaagcagcagctaacgagtcctatggttacaatgaagacctgatcgtatcttctgacatcgttggtatgacatatggttctttattcgatgcttctcagacaatggttcttccgttagacaacggtacaactcaggtacaggttgtttcctggtatgacaatgagaacagctacacaagccagatggttcgtacaatcaaatacttcgcagagttagcataatcggcactctataaagtataacaaagactcactgcagggtccggtcttttggaccggatcctgtttttgatttgcacttgcaaaaatgaaaaacaggattaaggagacaatatcatgggattaaataaaaaaacagtagatgatattaatgtaaaaggactcagagttctttgcagatgcgatttcaacgtaccgttaaaagatggcaagatcacagacgagaaccgtcttgtagcagctcttccgaccatcaaaaaactgatcgctgacggcggcaaagtaattctctgctcccaccttggtaaagtaaaaactgaagaagataaaaagacaaaaactcttgcaccggttgcagcacgtttatccgagctgttaggacaggaagtaaaatttgcagctgatccggaagttgtaggaccgaacgcaaaagctgctgtagaagctatgaaagacggcgatgtgattcttcttgagaatacacgtttcagaccggaagagacaaagaacggagaggctttctccaaagatcttgcgtccatctgtgatgtattcgtaaacgatgcatttggtactgctcacagagcacattgctccaacgtaggcgttgcaggtctggttgacacagctgttgttggttacttaatgcagaaagagattgatttccttggaaacgcagtaaacaatccggatagaccgttcgtagcaatccttggcggtgcaaaagtagcagataaattaaatgtaatctccaacctgcttgaaaaatgcgatactctgatcatcggtggtggtatggcattcacattcctgaaagcaaaaggatatgaagtaggaaaatccttagtagatgatacaaagatcgattactgcaaagaaatgatggaaaaagctgagaaacttggcaagaaattacttcttccggttgatacaaccatcgcagcaggtttcccggatccaatcgatgcagaaatcgaagtagaagtagttccgtctgatgcaattccggcagacaaagaaggtcttgatatcggaacaaagacagctgagttatatgcagatgcagtaaaatccgcaaaaacagttgtatggaacggaccgatgggtgtattcgagaacccgatccttgcaaaaggtaccatcgcagttgcaaaatcccttgcagagacagacgctacaacaatcatcggtggtggtgattccgcagcagctgtaaaccagcttggatttggtgacaagatgactcatatttctactggcggtggagcttctctggaattccttgaaggaaaagagttaccaggcgtagcagcagcaaacgacaaataaaaatcccatatatgaaataattgcttcgttagatgagacttgacgtacttttttgtgtacgcctgcgtctcatctgccttgcactgattccatatctgaaatttttggaaaattatatacaaatcagaaaaatatgtattgaaatggatgtaaggagaaaagataaaatggctagaaagaaaattattgcaggtaactggaaaatgaataaaacaccgagcgaggcagttgctctggtgaacgagttaaaaccgttagtagctaacgaggatgttgatgtagtattctgtgtaccggcaatcgacatcatcccggctatggaagctgcaaaaggcagcaatatctgcatcggtgctgagaacatgtattttgaggagagcggagcttacacaggcgagatttccccgaacatgttagtagatgctggtgtaaaatatgttgtccttggacattctgagagacgtgagtattttgcagagacagatgagactgtaaacaaaaaagttctgaaagctttcgagcatggcattacaccgatcatctgctgtggcgagactctgacacagagaaaacagggtatctaccttgactggatccgtatgcagatcaagattgcattccagaacgtaactgcagatcaggcaaaaacagcagtaattgcttacgagccaatctgggcaatcggaacaggtgagacagctacttctgatcaggcagaggaagtatgcggcgcgatccgtgcatgcatcgctgaagtttatgatgaggctactgcagaagcaatccgcatccagtatggcggatctgtaaacgcaggaaacgcagcagagttatttgcaaaaccggacatcgatggtggtctggtaggcggcgcttctctgaaagctgacttcggcaaaatcgttaactacaataaataaaaaacattaacaatactttaacaattcagagccatccgcaagtccgtttggctctgaatttatctcaaactaaattggtgtttctgctcatatgaagaagttttgaaaatgactttttgacggggacaacgatacagatattttggaggaaaacatgagtaaaagaccagtcgtattaatggttttagatggatatggcttaaatgacaatccggaaggaaatgctatcgcaatggcaaaaactccggtaatggacagcctgatgaaagactatccgtttgtaaaaggtgccgcatctggtctggcagttggtctgccggatggtcagatgggaaattctgaggttggacatatgaacatcggcgcaggccgtatcatttatcaggatctgaccagaatcacaaaagcaatcgaagatggcgatttctttgaaaacaaaggattgctgacagcgattgaaaactgcaagaaaaacaattctgacctgcatctgtggggactattatccgatggtggcgtacacagtcacatcacacatctgtacggtcttcttgagatggcaaaaaaacatggtctgacaaacgtatatgtacatgcatttttagacggtcgtgatacaccgccagcttccggaaaagattatatcgagcagctggaagcaaaaatgcaggaaatcggcgtaggtaagatcgcgtctatttccggtcgttactatgcaatggatcgtgataacaactgggatcgtatccagaaagcatacgattctttagtatccggaacaggtgtacaggcaactgatgcagtaaaagcaatggaagcttcttatgcagacggcgtaacagatgagtttgtacttccgacggttatcacagatgaagcaggaaaaccggtttctgttgtaaaagagaatgattccgttattttcttcaacttccgtccggaccgtgcacgcgagatcaccagagcattctgtgacgatgcatttaccggatttgagcgtccgttcattccgctgacctatgtatgcttcaaagattacgatgagacaatcccgaacaagattattgcattcgagaaagaatccatcaaaaatacattcggtgagttccttgctgcacagggcaaaaaacagctccgtctggcagagacagagaaatacgcacacgttactttcttcttcaacggtggcgtagaggagccgaacgtagatgaggcacgtctgttagttgcatctccgaaagatgttgcaacttatgatctgaaaccggaaatgagtgctccggaagtaggtatggatctggtagaagcaatcaaatccgacaaatacgatgtgatcatcatcaacttcgcgaacccggatatggtaggtcataccggtgtgatcccggcagcggttgcagctgtagagcgtgtggacagcctggtaggcgatgctgtacaggctgtcaaagacgtagacggaatcctgtttatctgtgctgaccacggaaatgcagagcagatgatcgattatacaaccggcaacccacatactgcccatacaactaacccggtaccgtttattctggtaaatgcagatccgtcttacggactggcagagggtggatgtctggcagatatcgctccaacactgatcgagctgatgggcttgactcagcctcaggagatgaccggtcacagtttattaactaagaaataagatgtggattttcttccctttctgattcaaatataacgtatgtaagaattgaatcaggaagtatcactggtaaagtgagcttttttcgccacacaacagttattctaattgttgtgtggctttttctatgtatatttacttgaaaagaaattattgatttaaatgggtacggttcagacagataagatatactgtttgaggatttacttgt

SEQ ID NO: 13126 - DNA, 6186 bp, Unknown
  gut microbiota DNA sequence
taattgaacgagacatttatgaaggaaaaaccgatttttccgctgttgctatcgatgtcccttccgatggtcatctccatggcggtaaattcgctttacaacattgtagacagttattttgtggcaaagatcagtgagaatgctatgacggcactttcactggtgtttccaatccagaactttatcaatgcagtagctattggttttggtgtcggaatcaatgccatgatcgcccagcatcttggtgcaggaagaagggacaaagcagacgaggcgctgacacagggtatggtgctgtcggtcattcatggaattattatgatgattttgtgcatcgttggaattccatactttttgaaattatttaccacagacgcaaatgtgattgcgtttggtgtgcgttacgcgaccatcgcattttcgttttccattattatcacggtaaatctgaccttggaaaaaatgtatcaggcgatcggaaatatgaatattaccatggtatgtctgctgatcggctgtggattgaatattttactggatccgatgatcatttttggcatcggaccgttcccgcaacttggtattgcgggagcagcgctggcaaccggagtaggacagtgtgtgccagtggtgatttatctgattgtgtatgtgaaaaaaacaaagagagtcgcattccgtcgggaatatatgcatctgacaaaaccggttgtgacacagttatacggcattggtgtgcctgctattttaaatatggcgctgacttccgtgctgaccacggcattaaatgcgattttggcggcattttcccagacctatgtgctggtgcttggtatttattataaactgcagacctttttgtacatgccggcgaacggaatcattcagggtatgcgtccgctgattggctacaattacggagccggagagcataagcgtgtgaatcagctttatcgactgacactgatcatgaacgtctgcattatggcagttggtatgattctgtgtctgacaatcccgggaaaactaatgggagcatttgcggaaaatccggagactgttcaggtgggtatcacggcattacacattatctgctttggatttgtggtttccgcagtatctgttactggatgcggtgcgttggaaggactgggaaaaggcgtaccgtccttgttgatttcgttatccagatatgtggtgctgatcattccgctggcatttattttcagccggttctggggagcagctggtgtatggcatgctttctgggtggcagaagcattgacagctatatttgcagcaatcatctatcaacgcagtgtaagagagtagtacatagaagcagagcgaaaaatatatataagtataactgattagtaagaaaaaatatacaaaaatacttataaatagagccggattttctacacccacttttccaatctgcggtcattgtcgattgacgaatgtttttcgaatgtattatacttaaattacattgcgaaagttttatttataaatgtgttccgttttatttggaaaatctatttatggataaaatgttttgcaggacatacagaaactaaataagtacaatacagagaaaaggggaatcaatcgctatgagtattcagacattcaaaccggtgaaagaaggaaaagtacgtgaggtttatgatattggtgacagcctgatcattaccgccacagacagaatttctgcttttgatgtaattttaaaaaataaagttgagaaaaaaggtactattctgacaaaaatgtcagagttctggttcgattttacaaaagatattttaccgaaccatatgatttctactgatgtaaaagatatgccggagtttttccagaatgagagatttgatggaaacagcatgaaatgtaagaaacttgagatgcttccggtagaatgtattgtacgtggatatattacaggaagcggctgggcaagctactgcgagaacggtactgtctgcggcatcaagcttccggaaggattaaaagagtccgagaaacttcctgagccgatctacacaccatccacaaaagctgagatcggtgatcatgatgagaacgtaagctttgagcagacagtcatcaatctggagaaaatctatccgggcaaaggacaggagtatgcggagaaactgcgtgactacaccattgcactttacaaaaaatgtgcagagtacgcattaagcaaaggtatcatcatcgcagatacaaaatttgagtttggcctggatgagaacggaaatgtcatccttggtgatgagatgctgacaccggacagctcccgtttctggccattagagggatacgaggcaggcaaaggacagccatcttatgacaaacagtttgtaagagactggttaaaagcaaacccggacagcgattatctgcttccggatgaagtaatcgaaaaaacagtggataaatacaaagaggcatatgaagtgctgactggaaagaaattcgaagcataaaactgtgtaagttggagggaaaagattcatgctggaaaacaaaatggaacagaccatggcacaggacgaattacatgaagagtgtggtgtctttggtatctatgatttagacggacatgatgtggcatctagcatttattatggactgttcgccctgcagcaccgtggacaggagagctgcggtatcgcggtcagcgagacacagggaccgaagggaaaagtatccagtttcaaggatatggggcttgtcaatgaggtgtttaacgcagaaaatctggagcgtctgaaaggtgacatcggcgtaggacatgtgcgttattctactgccggagcttccaccagagaaaatgcgcagccgctggtactgaactatgtcaaaggtacactggcgctggcacacaacggaaacctgatcaatgccaatgaactgcgtcacgatctggagtatacaggtgcgatcttccagaccaccattgactctgaggttatcgcataccatatcgcgagagagcgtctgaaagtcggcaccgttgaggaggccgtacagcgcgccgctgcaaaaatgaaaggtgcatattccatcgttgtcatgagcccgcgaaaactgatcggcgcccgtgatccgtttgggtttaagccattatgtattggtaaacgcgataattcttatattattacatccgagacttgtgctcttgagactatcggtgcagagttcgtacgtgatgtaaaaccgggagaagtcgttacgatcaatggtgagggagaaattttttctgatatgacaaatgccattgatccgtgcaaagaaggaaggtgtatttttgagtacatttatttcgcaagagcagacagtcactttgacggcatcagcgtttacgatgccagaatcaaagccggcagattccttgcacaggattcaccggtagaagcagatctggttgtcggtgttccggaatccggaaatgccgcagcacttggttatgcaatggaatccggtattccatatggtaccgcatttgtcaaaaacagctacgtgggacgtacgttcatcaaaccgaaacagagcagccgtgagcagagtgtccgcgtaaaattaaatgtagtaaaagaggcagttgccggaaaacgaatcattatgatcgacgattccatcgtgcgtggaaccacatccggactgatcgtaaatatgctgaaagaagcaggtgcaaaagaagtacatgtgcgcatcagtgcaccgccattcttatggccatgttatttcggaaccgatattcctgccagagagcagctgatcgcctataaccgttccattgaggacatccgtgatctcatcggagcagattcccttggttatctgcgcatcgagcgcctgaaagagatggtaagcggtctgccgatctgtgagggatgtttcacaggaacatacccgttagctccgccaactgaagatattcgtggcgagtatgagcgataaacagcaaacattttcaatttgagacgtttgttattttgagtaaaaaaacttgcattagaagcataaaacatactattataatataagcatgtatacagaaactggagcaaattggaatgactgaagaccgttgttccgtttgctacagttttgcttttgtaaaggagaaaaaaatatgagtacagacagatatacaagtccactttccgagcgttatgcaagcaaagaaatgcagtatattttttcaccggagatgaaattccgtacctggagacgtctctggatcgcccttgctgagactgagaaagagcttggtttggacattacacaggagcagatcgacgagctgaaagcacacaaagatgacatcaactttgaagtcgcaaaagagcgtgaaaaactggtgcgtcatgacgttatgtctcatgtatacgcatacggtgtacagtgcccgaaagcaaaaggtatcattcaccttggcgcaacctcctgctacgttggtgacaacacagatatcattctgatgtctgaggctctgaaattagttcgtaaaaaactgatcaacgtaatcgcagagcttgcaaaatttgcagaccgctataaaaacctgccgacactggcatttacacattttcagccagcgcagccgacaacggttggaaaacgtgccacactgtggacacaggaattcctgatggatctggaagaccttgattatgtgcttggttctctaaaattacttggttccaaaggaacgactggtacacaggcaagtttcttagagttgtttgacggagatcaggagaccattgacaagattgatccgatgatcgctgcaaaaatgggattcaaagagtgctatccggtatccggacagacttattcccgaaaagtagatacaagagtattaaatgtcgttgcaggaatcgctgcaagcgcacataaaatgtcaaacgatatccgtctgcttcagcatctgaaagaagtagaagagccatttgagaaaaatcagatcggatcatccgcaatggcatacaagagaaatccgatgagaagtgagcgtattgcttctatttccagatatgtgatgatcgacgcattaaacccggcgatcacatccgcaacacagtggtttgagcgtacactggatgattctgcaaacaaacgtctgagtgtagcagaaggattccttgctattgatggcgtactggatctgtgcctgaacgtcgtagacggactggttgtatatgacaaagtaatcacaaaacatctgatgagcgagctgccgttcatggcaacagagaacatcatgatggatgccgtaaagaaaggcggagaccgtcaggaacttcatgagaagatccgtcagctttccatgcaggcaggtgcaaatgtaaaacagaatggtctggataacaacctgctggagctcatcgcagcagatgagagctttggtctgacactggaagaactgcaggcaaatatggatccgtccaagtatgtgggacgtgctccgctgcaggtagataacttcctgaaaaatcatgtaaatccggttctggatgcaaacaaagaaattcttggaatgaccgctgaaatcaacgtttaaattctgtggtgaataaaatctaggtgatgtaactgaaataaagggaagaggatattttttcttgcgaagcgattgttagctagcaagaaaaaatatcctcttcccttttacacagtcccaaaactaaaagttcccaaaacctgaagttttcacgttgccggcaacattttaccggcgctcattcaaaattttcaaatcattcacaatctgctggatatgcgctttctgttccaacgtcagaccagtggattcgatataaattttctgatcatcctgcaattccaacagataatcggcagaacaggagagaacttcacagatccgtcttaacatgtcgatggatggcatgatgttattgttttcccagttactgacgctttgttttgacacgtttaatttttcggcaagctgtacctgattgagcttggcagcctgtcgaagtgcttttatctgatctccgaacatagttatctccttttttctccactttaaaggagataaggtctttttacaaaatacaggagtattgccaaactagattatgagtaaaatatttcaaactatgcagaaaacatcaattttatagtgtgtgaacaatt

SEQ ID NO: 13127 - DNA, 12506 bp, Unknown
  gut microbiota DNA sequence
cttttatgcgtattttgctggaaactcagtctgcacgatttttccgggcatattctgtgggtggcatacccatctgtttatgaaatacgcgggaaaaatacagactattgtcaaaaccgacggattcagcaatatccatcatggacatattgttgtgtgtcagcagataacatgcctgcttgatccggtattcgcttaaatattctttgggtgatttcccaagaactgcctgaaatgcccggcacaggtagcttcgactcaaacctacataagccgccatatcatcaactgtgatgggggaaccatagtttgaggagatatattcaatgcttttgatcacgtaactttcttttcgactcagcttgttctttttttctgcctcacgcatataaatagcaagaagcatgtacaggtagcctgccatttccacggaattgataaagtcatttccacgggcattgtagatctgattcatgcgctgattgatctccccgctgtggatattgttgtaagtcaccggaaaagacggggtgaagcgggttgccttcaggatggagggggcatcgtttccggtgaacccgatccaggaatattcccaggggtcttccttatccgcatagtaccagacttcatgatttggatagatcaaaaaggagtcaccggcttttaaagtgtagagttttccgttgcagtggtagtaccctttgccagttaaaatgtggtggatcaggtaatggtctttgcttccaggtccccagtgatgatttcggtcacatttttgatgcccaacattacagacggacagggaaaaaagttcatatttgcgtattttataagaatccttgtaaaaatcactcattttccatacctccagaataaaaataggttagcatagaaaaaagaaaaaaacaacatttttacatattttgcacacatttccatataggaatttcgtaagaaagaaagtacaatgaaactatcaacggcagagaaatgagtttgcgtgtactgagacaaaaatcggtgcaaacgaagaagcagtatctgcctggtaataacaggaaaaatgaaatagatggaggagttcgatgaaagagcagttattaaaagagttcaaagaaaaatttggcagtgaaggcgatatccgcagctattttgcaccgggcagagtaaacctgatcggtgagcataccgattacaatggcggacatgtatttccatgtgcactgaccatcggtacttatgcaattgtaagaaaacgtgaagaccgtaacttccgtttttattctacaaactttgagagtcttggtgtgatcgaggcaagccttgacaatctgaaatacgataaagctctggactggaccaactatccactgggcgttgtatgggcttttattgagaaaggttacccagtagattacggttttgatatgctgttattcggaaatattccgaacggttccggactttcttcttctgcttctgtagaggttgtaaccggtgtggctttgcgtgacctctttggatacgatgatatttccatgatcgacatcgcattattcggacagtattccgagaacaacttcaacggtgttaactgcggtatcatggatcagttcgcaattgcaatgggtaaaaaagatcaggcgatcttcctggataccagtgatctttcctatacatatgcaccgatcaaactggcaaatgaaaaaatcgtaattgcatgcagcaataaaaaacgtggtcttggtgattccaaatacaatgagcgccgtgcagagtgcgaggaggctctggcagaacttcagacaaaactggacatcaaagcacttggagaactttctgaggaagaatttgagtcaaacaaagacctgattaagagcgaagtacgtcagcgccgtgcaaaacatgccgtttacgagaatcagcgtaccctaaaagcagtagatgcactgaaagcaggaaatctggaagagttcggaaaactgatgaacgcttctcacgtatctctgcgtgacgattacgaagtaaccggtatcgagcttgatacactggttgagaacgcatgggaacaggaaggtgtcatcggttcccgtatgacaggtgcaggcttcggtggttgtaccgtaagtattgtaaaaacagacagcgtcgataaatttatcgagaacgttggaaaagcatatctggaaaaaatcggttatgcggcagatttctatgtagtagagatcggcgacggcggaagagttttagagtaataaggtaataacatgcagcggctcagaatcaataggattctggattgttgcaaaaacagacagaagtaatattgcatggaaaaatatctggttaaatagcagagaaatataaaaatatctgagttgaggaacagcagatattggaacatgtatcatgaggaggagcatacgaaatgtctgatttatatgtagcaagactggtacagtacggactggagtccggtctgattccggaggaggagcggatttacagcacgaaccagattcttgaggtaatgaaaaaagatgattatgaggcaccgacagccgaagaagtcggcacagagattgatctggcagataccttaaaccacctgctggatgaggctttggagagtggcgtgttagaagacggcggtgtggtatccagagatctgtttgatacaaagctgatgaattgtctgactccgcgtccggctcaggtcattgcaaaattccgtgaggattatgcagaagatccgaagaaagcgaccgatgattactataacttcagcgtggcaaccaactacatccgcaaggatcgtattgcgaaagaccgtcgctggaaagtgccgtctgagtatggtgagatcgatattaccatcaacttaagtaaaccggagaaagacccaaaagccatcgcggcagcgaaactggcaaaacagtctgcttacccgaaatgccagctctgtgtggaaaatgaaggttacgcaggccgcctgaatcatccggcgcgtcagaatcatcgtatcattccgattaccatcaacggtggaaactggggtttccagtattctccgtatgtatattataacgagcactgcatcgtatttaacggcgagcacacaccaatgaagattgaacgtgcaacgttccgtaaactgttcgattttgtaaaacagtttccacactatttcctgggatccaacgcagacctgccgatcgttggcggttctatcttaagccatgatcatttccagggcggacattatacctttgccatggaaaaagcagagtttgagaaaacaatcacaatccctggttttgaggatgtggaagccggaatcgtacactggccgttatctgtcatccgtatcagaagcaacgacgatgagagactggtagaactggcagatcatattttaaaagcatggcgtggatacaccgatgaggaagcatttatttttgcagagacagacggcgaaccacataataccatcacaccgattgcacgtatgcgtgacggcaaatacgaactggatctggcactgcgtaacaatatcaccacagaggaatgcccgcttggcgtatatcatccgcatgcagaactgcatcacatcaaaaaagagaacatcggtctgatcgaggttatgggactggcagtattacctgcacgtctgaaaaatgagatggacgtactggctgagtatattctggaaggcaaggacatccgttccaatgagaccatcgagaaacatgcagactgggtagattctttccgtgaccggtatacatttacaaaagagaatgtggaagaaattctgcagcaggaaatcggaaaagtatttgtaaaagttctggaagatgccggtgtatacaaatgcaccgaagaaggaagaaaagcatttgacagatttgtttcagttttataaaatggtaactgttcaaaaatggtcggatttgcatgctttttaacagaaagcgtatgtttcgcactctccctatggataaaagtagagtggtgtgaaaggaagaaatctgacttgcatgaatttaggaggtaaagatatgcatattttagtaaccggaggcgccggatatatcggcagccatacatgtgtggaactgttaaacgcaggctatgaagtaactgtagtagataatttgtacaattccagtgtgaaagccctggaccgcgtacaggagatcaccggaaaaacactgaaattctacgaagcagatattcttgacagagatgccatgaataaaatttttgatgaaaatacatttgatgcagttattcacttcgctggtttgaaagcagtcggtgagtccgttgcaaaaccaatcgagtattatcagaataatatcggcggaacactggtgctgacagacgttatgcgtaaccatggctgcaagaacattatcttcagctcttccgcaacagtatacggtgatccggcaatgatcccgatcacagaggagtgcccgaaaggaacctgcaccaacccatatggctggacaaagagcatgttagagcagattctgacagacattcatacttctgatccggagtggaacgttgtattacttcgttacttcaacccgatcggagcacacaagagcggcatgatcggcgaagatccgaaaggcattccaaacaacctgcttccatatgtagctcaggttgccatcggtaaattagagtgccttggtgtattcggtgatgattatgacacaccggatggaacaggtgtacgcgattacatccacgtagtagatctggcagttggacacgtaaaagcagttgagaaactggctgacaaagacggtgtatctatctacaaccttggaacaggacacggatacagtgtactccaggtagttcatgcatttgagaaagcatgcggtcatgcgattaattatgccattaaaccgcgccgcccgggcgatatcgctatgtgctactgtgatccggcaaaagcgaaaaaagagcttggctgggaggctcagtacggcattgaggatatgtgtgctgattcctggagatggcagagccagaatccgaacggatatgctgactgaaaggaactttagactgaatgaacgactataagattacgcagcaggtaaagcggaaatcaaagcgttttgcaaaaccattatcagttaccatggtcgtattggccgtggtactggtaattcttgcaattatatttgacacaggacttatgatgccggctttcttatttgcggcattatattatgtgttctccatcaatgcagatacagagtatgagtatgcgatggaaaatggaatcctgactattgatgtgatccggggaaaacgtcgtcgcaagacggcacatacgctggcactcaaagaccttgaggtgattgcaccgaactggcatgagtctgttgcaaagtacagaaaagacggcggtacagaaaaactgaaaaaatttgactacacctcttatgacgataatatcccatattatacgatgatcacatatgaggacaaagaaaaaatcaaactgctgcttgatttaaacagcagtatgctggaagcaatcaaacgagtttacccacagaaggtgtatttacaatgaaaaaaataaagggcaaaatggaattgcgttattatgatattccgcaaaatgagtttctgatcgcattgcagaatcagaactggcagaataaatatcagacggaatccgatctgctccattttcataatctgatggagatcggcgtctgccgtcgtggacacggaacgatgcgtctggaagatgatgtggttcgttacgaatccggaatgatcagtatcataccggtaaattatccgcacaataccataccggatatcggggcagataactgctgggagtatctgtttgtagatccggagaagatttttgctgttgtttatgaagatgatatcttacagcagcagaaaattctggaaaatatcaatagaaaagcctttttaggacgggaagaagatatcccgaatatgaaaaatattatctgtgcgatcatgagcgagatgagctgtaagcaggagttttacagggagagtacccgcggactgggtctggctctcatgatgatgatcgccagaatgaactccaatgtaggcaatgcaccggaaggacttcgccagaaaaacggttttgatcaggtgcgcccggcgctggaacatatcagggatcactatgcaatgccgatgaagattgctgagatcgcatccgtctgccatatgagtgaatcccatttccgcagactgtttgaggaaaatatcggtatgacaccggtggattatctgaatcaggtgcgggtaaagaaagcctgtgacatgatccgcaagacaggatattccatggaggagattgccgtaaaagtgggatttacgacgacctctacgtttaaccgtaattttaaacggatcgtgggaacttctccttaccagtggaagaaatcaccggaaaattttgagatacgtctggcagattttaatattctgatcgaaaaaggctggtagtacaaaaataaaataagacaaaagatatgccatgatgcggttctgccgtgttctggcatttttttatcaaaggaaaagttactgttttgagatctttgcataaaaatatgtgataatagtttgacttaaagggacatttgttttatttgattcataacaacagatgttttctgttgttttaaaacaaaacaaagcaatgttttggaaaataaaaccagaaaaagaacagatacgggcaaactgtcgaaaaaagcagggaaaatcttcgtgaaaaagacgaaaatgtgttaaaaaataaacgaaattgcggtataaatgcgaaaaaagtaaaaaaagatagttgaaaatgcgaaaaaatatgcaagttgacggtgaatgattgaatatgcgcatattgtagaaaaaaatgcgaacaatagttggaaggggtatagtataatatgtacatcttgatgcaggagataaaatgatatttgagtaaaatgtacaaagaaattttgatgcatcagaattaatttcatgaggaggagaaaacatgaaaaagaaagtaatttcacttatgctcattggtgctatggtagcttccatggcagcttgtggcagcaacggcggtagcgacaatggcaacgcagcaaatggcaatgacacatctgcagcagcagagtctgatggcggagcaagcgagggtggcaacacattaacagtttggacatgggatccagcattcaacattccggcaatcaaggaagctggaaatatttacaaagctgatcatccggatttcgaactcaaagtagttgagacattatccgatgactgtgagacaaaactgatcacagcagctgagtctggagatcttagcacattaccggatatcgttctgatgcaggataactcctatcagaaattcgtttccatttatccggaagcatttacagatttaacagattccggaattgatttttcacagtttgcagctggtaaactttcttactctacagtagatggaaagaactacggtgttccgtttgataatggtgctgtaatcggcgcatacagaacagattatcttgagcaggctggatacacaattgatgatttaacagacattgattggaacagattcatcgagatcgctaaagacgttaaagagaaaaccggtaaatatatgttatcaggacaggctgactctccggatatggtcatggagatgcttcagtccgcaggtgcttctctctttgataaagacggaaaaccggctatgacagataacgcagcattaaaagagtgcatcagcatttatcagaagatggtagaagaaggcgtttactacgaagtaaacaactgggatgattatgtatcctctatcacaactgggcaggttgcaggtgttatcaatggtaactggatctcagctacaatcatgggtatgaaagatacatctggtaaatgggctatcacaaatatgcctaaattaattgagacaccaaacgcaactaactactctaacaacggtggttcttcctggtatattacatcaaactgcaagaacaaagatctggcaattgacttcttaaagagcacatttgccggcagcgtaaaactttatgagaacattcttccgacaactggagcaatcggtacatatgcaccggcagctgattcaacagcttaccaggagccacaggaattctggaacaaccagccgatcttcgctaaaattgtagatttctcattaaagacacctacaaataacacaagcccatactactatgatggacgtaatgcaatcggtacacagattcagaacatcatgaacggtgctgatgttgatcaggctatcgctgatgctcaggcagaagtagagttcacaatggatgagtaattcctgtttgttgaatgattacaatgtagttttttaaatatgcgggggactgcctggcagttccccgaatattatttgcgaagggggttttgaggtggaacctaagaaaaaaggcatgaccttggttgcaaaacaaaaagcggcaggatgggcattcctgatccctgcatcagctatgattgcaattatgagctttttcccgatggtaaaggcatttattctttccttacagactggtaaaggagcgaatatgcatctttccggattttcaaactatgtgcgtatgttccaggataaagtatttttacgttctgtaggaaatacgttcatctacctggcaattcaggtaccgatcatgcttgtgcttgctattttacttgcacagcttctgaacaacagagatctgaaactgagaggtttcttccgtacatgtgtattcttaccatgtgcaacatctctggtttcttacgctttgatcttccgtttcctgttcgcacaggacggatttgtaaacaatgtattagtaggtttaggcatcttggatcagggatataatttccttggaaatgccataagtgctaagatcgtaattatcatcgctttggtatggagatggacaggttacaatatggtattctatctggccggcttgcagaatattgagtactccgtatatgaggcagccaaaatcgatggtgccaacggatggaagactttctggagtattaccgtaccactgttaaaaccgacaattattatgacatttatcatgtcaattaacggtacattacagttgttcgacgagtcagtcaacctgacacacggcggacctgcaaatgcaactattacaatgtcacatcatatttacaataccgtattcttacgttcaccgaactttggatatggcgcagcaatgtcattctttgtatttgtacttgtggcaatccttgcatttatcaatatgaaagtaggtgatacacgtgactaagaagaaaaataaatctatgattcagcgtcgactgatccctacctatattttccttgcaattgtatccctgatctccgtatttccattttactggatgatcatggcagcaacaaataactatgttgatgtatcaaaaggaaaactgacatttggtacttatgcagctgaaaacttcagaaacctgatctctcagcaaccattgggactggcaatgaagaattctttcatttatgcaatttcagttactgttatctgtctgtttatctgctctcttgcaggttacggatttgaggtatatcatgataaatggaaagacagactattctctgttctgcttcttgcaatgatgattccgcaggttgcaactatgatccctctgttccgtatgttcagtaaagcaggcttactgaatacagtacttgctttcttcctgccgatgatctcgacaccgtttatgatcatgatgtttagacaaaactcacgagcattcccggtagatatcgttgaggcagcacgtattgatggattaagcgagattaagattttcttccagatgtatatgccggttatgaaatctacatatgcagcagcagccgttattacgttcatgaatgcatggaatgcatatctgtggccgaaggtttgtatgacagatggcaaatctctgaacatggttatgttgatcgcaaacatgactggtggttacaagattgattatggtatgatcatgatgggtgtattattctgctccattccgacactggtaatcttcttcgtacttcagaaacagtttgcagaaggtatcacaggtgccgttaaataattatctcattgagataatcatgaacaaaaatattatattgcaattttatgcagccccacggtggtttcgccgtggggtttttaaaacagacaattaccggaaatgtgttttctggttttgataaaaaatgaacaaacagaaaggatttgcagacatgggcgttaaatttgatcgtttagtttatggtggagattacaatccggatcagtggttggagtatccggatattctggaagaggacatccgtctgatgaagaaagcgcatgtaaatacggtttcactggggatttttgcatgggcaaaactggagccgcaggagggtgtgtatgattttgactggatggaagaaatcatcaatcgtctgtatgaaaacggaatcagtgtattcctggcaactccgtccggcgcacgtccgcactggcttgcagaccgttatccggaagtgttacgtgtaaatgaaatgcgtcagagaaatatttttggacagcgtcacaatcattgctatacatctccgatctaccgtcaaaaagtacgccagatcaatatgaaactggcagagcgttttgaccatcatccgggtgtgctgatgtggcatatttccaatgagtatggtggagagtgccattgcccgttatgccagagcgcattccgtagctggttaaaaaaacggtataacaatgatatcaaagaagtaaaccgcaaatggaatactgcattctggagtcatgattatcagaattttgaccagattgagagcccgacaccgttaggagagacgtccattcacggactggtgctggattggaaacgttttgtcagtcatcagagcgttgatttctgtaaggctgagattcaggctctgcgtgatgcaggcggaacaaaaccggcaaccacaaacctgatgtataacttcccgacgattaattatcatgagatggcaaaagtgctggatgtggtatcctgggataattatccgcagtggcacaaaggaccggagcgtctgattgctatggataatggtatgcagcacgatattatgcgtaccttaaagaaagagccgtttatcctgatggagtcctgtccgggaccgacaaactggcagtctgtcagcaaattaaaacgtccgggaatgttagagacggcttctttgcaggcggtagcgcatggatctgacagcgtcatgtatttccagatcagaaaaggtcgcggtggatttgaaaaattccatggtgccctgatcgaccattacggaaaagaagacgagcgtacttatcaggagtgtaaagaggttggtgctgatttggagcagatcgatgagctgaaacattccaatgtaaaggcagatgtggcagttatttatgactgggagaaccgttgggcggtagaagaagcacagggaccgcgtaataaaggtgtgttctataaagaagcggtagaaaaatcctattatgcgttccgtaaacagggactgaacgtagatctgccggatatgactcaggatcttgacggttataagatcgtggttgctccaatgttgtatatgtttcgtgcaggatttgaagataaagtgcgtaaatttgtagaaaatggtggtacatttattctgacttactggagtggcgttgttgatgagaatgatctgtgcgtacttggtggtacaccgggcggtttgatggatgttatgggactgcgcagtacagagattgatggtctgtatgacggtgagagcaataccgtaaaagcggttgttggcgatgtggcttacaagtgcgagcacctgtgccagctggtagatgttaagactgccgagccgttatttgtatatggtgaggatttctatgcaggtacaccggctatgacagtgaatgagttcggtaaaggaaaagcgtattatgtatgcgcagattctgagcagaaattctatgatgatgtgtatgctgagatcgtggcaaaagctggggttgagaaaccgttgaaacagcatattccggaaggaattgaagtgtccacacgtcagggtgagaatgtggaatatgtgttcatccagaactttaataaggttccgacagcgtttacaccggagcttgacggggcagaggtgctctttggtgaagttaccggagaaatgaagccgttctctactattatcttgaaaaagtaatatgggttcctaaatatggtttcttaattttactaatttaggttattgacgaaatcggggaatcttacctcgtcagctaacaatcgcttgccgaggaaagattccc

SEQ ID NO: 13128 - DNA, 6539 bp, Unknown
  gut microbiota DNA sequence
tactttttaaaaaggcaaaaaaggagctgagatttctctcaactccttcatttcattgcatatttcgacaattagtcaactgcgatgatctcttttttattgtaagaaccacaggatttgcatactctgtgtggaaccataagttcgccacatttgctgcattttactaaagtcggagcagacattttccaatttgctcttcttctatctcttctacctttggaagatttattttttggacaaatagacatttcgttacacctccaatttatctgaatctaagtgaattgttctgaatcacactcaattgattatacacagaacatcatcctttgtcaacagattttttgtgttttgtgtaataattttgcagttcacacgcgccattcgcaaaacgcccttcgggcttctccgtagctactctcctatttttgctcataaaaaggcgctcccttcatcactatgtattcaggtaatttctcatgcaagcatgatcattaccagaattcatgtgatgagtgaactggagcaattattttactaatgctactgtctctcttgcaattgcaagttcttcgtttgtcgggattacacaaactgttactttagaatccggagtggagattacgatatcatcgcctctcttgctgtttgcttcctcatctactgtaattccgaggtatccaaggtatgctaatactttagaacgaacgatcggagcgttctcgccgatacctgctgtaaatgcgatcacgtctacaccattcattgctgctacgtaagaaccgatgtattttgctacgcggtagctgaatacttcgatagctgctgctgcacgctcatttccagcttccataccttcctcaaggtcacggaaatcactggaaagtccggaaataccctgtacaccggattttttatttaatacgttcataacgcctgcgatatcaaggttctcttttttagcgatgaactccatgatagccggatcgatatcaccggaacgtgttcccattacaagaccttccaatggtgtaaggcccatggatgtatctacgcatttgccatttaatacagcactgatggaagcaccatttccaaggtgagcaacgatgatcttggaattgttgatgtctttgccaaggaactcagcaacgtgtttggatacgaagctgtggcttgttccgtggaagccgtatcttcttactttatatttctcatagtactcatatggaagtccatagagatatgctttctctggcattgtctgatggaaagcggtatcaaatacacctaccatcggtacgcctggcatcagatcctggcaagcacgaataccgattaagtttgccgggttgtgaagcggtgcaagatcgttacactcttctactgctgcaagcatctctggtgtgataactgctgaagaagcgaatttctcaccaccgtgtacgatacgatgtcccactgcatttacttctgcaaggcttgcgattgcacctgttttctcatttacaagagcgtcaagtacaagctggatagcctctttatgtgtaggcattggagcctctgtaatctctttgtcaagacctgctttctgatatgtaagtcttccgtcaataccaattctctcgcaaagaccttttgcaagtactgcctctgtatcagagttgatcagctgatatttcagtgatgaactaccacagttaattactaatacgttcattatttatgttctcccttcattttcactttgactttccgtcaaaatacctgtcttttctattatatctcaaattttctgtttcgcaagaggttaccaactggttttttgtaagttttttctattgcatttgttttcatacataatattacctgttacaattcactcatcaagggggttttacgaatggctcgtgtgaacttaacatacgttttcttgcaaattttcctcacaattttatttgtttttctgtatgattcatgctatgctttttcttatccaaaagtactgtggtgcgctctggtaatacttacattgcccacaatacaatttttttcaaaactcaggagtatcagatactatgaacgtcaccggaatcattgcagaatacaatccgttccataacggacacgcatttcatatagaagaaacacggaaaaatacagatgccgattactgcattgccgtcataagcggagactttgtccagcgtggtgcccctgccctgttaaacaaatacgatcgtgcaaaaatggctctggaaaatggaatcgacttggtcattgaattgccggtaatcaccgccacttccagtgcggaaaattttgcacagggtggtgtctgcctgttgaacgcgcttggtgtcgtgtctcagatcagttttggcgcagaagcaaacacagcttctgatgtcaatctgcttggcagattagctgacttttttgcatttgagccgcctatatttcaggaatatctggatcaggccttaaaatccggttgtagttttccggcagcccgggcaaaagctgcactcacctgtctgcagcaagccaagcatcattcaatggacagccaaacgcttgctcagtttgaacagttgcttgcctcaccaaataatattcttgccattgaatatatgaaagcaatccgtcggcataactgcaaactgacaccatctgtcgttacccgaaccggtgcaggctatcatgatgcggatacggatacggcgcttgccagtgcttctgccctgcgtaaatttatttttcaggatacctctgaccagaaaaacaattttgatacgttgaatcaaatgctgacacgcacggttcctgattccgttcgcgaactgctgctgactgcatatgaaagccatgcatttttacaggaagatgatttttctgacttgttatattatgaacttcagcgacaacttctgcatccgactgcatctgacgccgataccacacgttctgatctgacacagcgcattgcaaataaactggaatcatttacctgctggtctgaatttgtgtccgatttaaagaccaaaaaccagacctacacagccatcagccgctatttgctgcacgccttacttggcattgatggtgaacttctgaatgctgccaaaacttactattatgcgccgtatgcccgcatccttggtttccgaaaagatgcttcacctttactgaaggaattgcaggcacacagtcagattccgcttctgcgcaaaattgtaaaagaacgccagaacttaacgccagaacagcagaaacttctggatctcgatgtttatgcagctaatttatacaaccggattctttttaaaaaatccggtatccaacgaaaaaacgaataccgcgaacctttaattattttataatttctatactaaatgcgctgtgattctgaacatttaccccaattcacatttgtcagagtcacacgcatattttcatttacattcactgtaaattttacatcgtatcctccaaaagcaacgaattcttctcttgttttccaacaaatcttttgcattttcatcatcgtttcatgcattttctatggcatcatcacgttactatcatgcagtaaatcttgcatagtatacattttttactttatttttgaattatccggcattatttcctgcatttttccttgttatttatttaacattatcattttttcatacttttttgaattttttcactttttctcttgcatttttctttcaacttccatatacttttaaacatggtgtcgttctaagacactaaggggaaaattatttcaattgataaaaaggagtatgacacatgaacaatcaggtacagatcagaaagttcaaaaaagttctggtagcaaatcgtggtgaaatcgccattcgtgtattccgagccttgaacgagctggaaattacaaccgtcagcatttattccaaggaagaccgttatgcactcttccgttccaaagcagatgaatcctatccgctgaatccggaaaaaggaccgatcgacgcatatcttgacattgatactatcatcaagattgctctggcagcaaacgttgacgctatccatccgggatacggatttttatcagagaatccggattttgtagatgcctgtgaaagaaacggcattgtatttatcggaccttccagtcagatcatgaatgcaatgggtgacaaaatttcttccaagaaaatggcaatcgatgcccaggtaccgattattcctggtgttgactacgcaattaaagatattgatacagcaacaaaaatcgcagcagaggttggttttccaatcatgctgaaagcttccaacggcggtggcggacgtggtatgcgtatcgtaaacgcgatggaagatctggaaaaagaatttaacgaagcaaaaaatgagtctaaaaaagcgtttggtgatgacaagatcttcattgagaaatatctgcgcgcgccaaaacatatcgaagttcagattttaggcgataattacggaaacgttgttcacctttttgaccgtgactgttccgtacaaagacgtcatcagaaagtcgttgagtatgcaccggcattttccattccggaagaaacccgtaaaacaatttttgactctgccatccgcctctccaaagccgttggctatcgcaatgccggtactctggaatttctggttgacgcagacaaccacccttactttatcgaaatgaaccctcgtattcaggtagaacataccgtcagcgaagaaattacaaatatcgatctggtacagtcccagattctggtagcggaaggatatccgctggattccgatgagatcaacatcaaatctcaggacgacatccactgcatcggttattccatccagacccgtgttaccaccgaagatccggcaaacaacttcatgcctgataccggtgagatcactgtttaccgttccggttccggaaaaggtatccgtctggacggcggtaatgcttacaccggcgctgtcatctctccttattacgacagccttctggtaaaagcaatttccatcgaccgtacctttgaaggtgctgtacgcaaatccatccgtgcattacaggaaatgcgtatccgtggtgttaaaacaaatatcccgttcctgatcaatgtactgcatcatccgactttcattgccggaaaatgttataccactttcattgaggagacaccggagctgttccagctcacacagagtcaggatcgtgcgaccaagatcattgagtttatcggcgaccgtatcgttaactcccagaaaggtgagaaaccgcactatgagaaccgtgtgcttccgaaactggatcagtcaaaaccggtatatggtgcccgtgatgagttcctgaaacttggtgcagaaggtttcatgcagaaaattctgaaagaagataaattatacgttactgatactaccatgcgtgacgctcagcagtctctgatggcaacccgtatgagaagtaaagatttgtgcggtgctgcttacgctacaaacgcatacatgcagaatgcattttctgttgaggcatggggtggtgctacttacgataccgcttaccgtttcttgaaagaatctccgtggaaacgtctggaacttttaagagaacgtatgccaaacacactgatccagatgctgctgcgtgcttctaacgccgtcggatacagcaactatccggacaatgtggttcaggagtttatcaaaatttctgctgctcatggtattgatgtgttccgtattttcgacagtttaaactgggtggaaaatatgaaaatgccgattgaggaagctttaaaaaccggcaaaatcgtagaaggaaccatctgctacaccggcgatatcacaagcccgacagagacaaaatatacactggattattatgtaaaaatggctctggaactggagtccttaggatgccattccattgcaatcaaagatatggccgcactgttaaaaccgcgtgccgcaaaagaactggtaactgctctgaaacaggaacttcatgtaccgctccatttacatacacacgattctaccggaaacggtgtcagcacggttctgatggccgcggaagctggtgtggatatcgtggatctggccattgagtctatgtcttccatgacaagtcagccttctatgaatgctgtcgtagaagctctgcgcggaagcaaacgtgataccggtcttgattttgaagaactggatgagctcagccgttactacggacgcatccgtaaagtttacgagcagtttgagagtgatatgaaagctccgaatgctgagatttacaaatatgagattcctggtggacagtactccaacctgttagctcaggttacaagcatgggttctgcagatgaatttgagtccatcaaagcattatacaaagatgccaacgatctgcttggaaatatcgtaaaagttactccgacttccaaagcggtcggcgatctggccatctttatgtttaaaaacggtctgacaaaagagaatatcctgacggctggtgccggact

SEQ ID NO: 13129 - DNA, 4890 bp, Unknown
  gut microbiota DNA sequence
caaacggttcgtcttgtaatattttcttcatttgcgtatccaacgtaatcggaagattatctgcatcagtccaccctaaagcggttgttaagtctccctgtggatcagcatcgaccaataatacttttcgcccctgatgtgcaagaccaattcccagatttaatgtcgttgtggtctttgctgttcctcctttctgatttgcaagggcaattactttgcacttggtcatatgatttcctccttcctcgaaaaatttaatagccaatcctttttacgggactggctatgtataaaaatgagcatgaaaaaagccgattgattcctgattgaaccaatcagttatgtatttactctatgcatatggaacgaaccatttaagcgcttactaaaaaatagggagtatacacacaatcaattggtagtgataaactccctatgtatggattgatttcttcctacatattgaaaataattattgcaagtataaactttgtcaaacaaaacttaagctgtctgcgtaaagcaaacagtttgcttaggtttcctatttctcgcaattctcctgtaataaataattttcgccttccaacttgtaaaaaacattttttttgaactcttccggatatgtgtctattccagttgttaatattatttgatattgggttttcatttcttccgtatatttatcagcctctgccaataaaccaatatttttaattaaattttctttgtcaattccctccttattgggtgtatcaatcattaaaaattgggggaaattagcttcattttttaaactttcaatcaacattgtcaaaaagtacattaaccttttaggaacagctgcacttctttcacgatatgctcccaaatttatatgaggcatataatcctctcctatatacgcagaataacagtgttcatcagcacgtttcattagactaaaataaacttcgtcaaaatccttcttcttattcaacatatcttctcttgcagcattaaggaaagaatctacccttatttttaagccttctaccttatttcttagctgaatcacttgagaagcaagtgtttctctttttttggccaaatcttttgcctgttttaactccaatattattccatttaattctcgttctcgctcgtcaagttgacgaatatatgctgaattataatttgttgcaatatccttcgtcaattcatcaatataaagccttattttttcaatagattgttctgctttttcaatatgaccaattattattttcaatcgttgactttttctttctaacaactgttcaagtgactgaatagactttttctttactttcaaaatgtctaagtattcttcatccgtatagaaaaatttttcatactgttcttcttcaatgtcgtttccacatatacatttccctttttcacgttctacttctcttaaacagtaagggcacgtattcggagtaaacaatttcaactttttattaacaagcctaattttttcaatttcactcagttctttttctgattcatcaatcaaatacaaaattttatcaatagattgtgttgttaaattttttgcagattcccactcttccaacttatgttggtttaatattaactcttttttttgttgacctattagttgccaaatttcatctgaattaccttgttctcttgaagcaatttctcgttcgatttgaactttctctatcatttcctgattttctgatatcattgaattaatatgaacaacattcgccaaatcatagtctaaaacttctccaaggaattcatcataactatccataactgcttgtgctttctcaagctctttcattgttaatttatactgtcccaatgttgaataataatcattgtacgtcttcccaagcaaaatctcgaatattgctttcctaatctcaagtgaatctgacaaaaaattagaattatccgcttctttataaactttatcaacctccgtttcttgatcatgataaaccaatctcaataaatcagtaaaattaagtttaaagcttcttgtcccttgtacaatatcaaaaacgtttatatttaattttcctaatatccaatcagaaaaaaccatagtatgttcatcactttgatttcttaatacacaagtctccctgacttcctcatcttctccaactacaaatattaagttgtctcctatatagcgtgttagctcatatttttcatcatcaatttcaattagtaattctacgtaattatttgtatcataaaatatctcattatgtttttttgaatcattatcatcatttttattaaatgcttgtactcttcctcccaatccataataaatcaaattcatgaacgtgctttttccatgcccatttacgccttccattattacgattccatcattcaaataaggagattcgaaactatatttatctccactatacacaactcttctaatagctaatcttcccattttgacacctcatcatatccgaacacctttttttgcaatgtttccaatttcaaacttcttattctgggaattagttttcttacagtaaaacatctatttaaatcctcatccaatattttcatttctatcagattgttaaatgcttcgctctcttttaaagtgacattaatattactatttttaatacttctggtcagctcaaccatattttgtttttctaaaaaaaagagaactctctttattacagaaacatttaatcttgaatcgcaaaaaaacttaatcgctttatcactatcaaaaatatttagttgactatgatgtattaatttctgtagaaatatgatattctcttcactttttatagcttctaatactattcctaattttctatagtcttcaaatggttttttgtcacaatccagagcctttaaaattgaaaggagttttattgtaataaagtaataatcttcttcaagaatgaacatcattctttttttactatccatttacgtttcccccttcatctaatgccaaatagcactcttgaaacaatataattattgtttttcttatcatatcttgatcttcaaaagctacatcgtatgttttagctttatcttggataaacccatatgctccatgtgttagctcttcaataaacacttctatttcatcttgtgtaaaagcactgtttcgctccttcaagaatttctttattttcttctggcacgctttatatactctgtaattataagcctttacctgtctatgattttgatgatggctttgctcatatgcaccatcaatatattcctcttccagttcttccaaagaatctttttcaaaatctggacatacgcacaaaaacttttcatttatatttcttacatcatcacattgtatatcatcccatttttcgtacattggatctaatttctcttgtattttagcctcttgtgcaaattctaaaaataaagatttgatctccgcgacatgtacaatacgacataaaaaatcatcttcaaactttctggattctatcatatctagcatttgtgcgacgattgcaggtatatatttttcattcacattatatttaagacatatctctcccactaatctttcgacatttttcctaatttcaatctcatcagcctttccaaaattccattctatcaaatcaaaaaattttttccatttttctttatccatagaatctaatattttttcaaaaagttctatatcttcttctttgttgatatgctttttatgttgttctaaataatatgccctaaaaacaggcagaacaaaaggaaacgcttcatcatatttcttttcacacaacaactgaattaacggttcttctggcaacgtctcttttattttttttaattcgccaactttcttttctttttttatatttgtatttgtataaaaaacaaatttgatactctcagacacttcaactgtaccataccaagtatcaaagaagattcttaaagaattctttacttcatgactgttcattgaaaaatctgttgaatacgatttattttgttctgccgtataattagtggtttcatgctctacatcaacctctaagacatcatcaatatgttcaatagtacaaaacacagccctcttattctctaaaagggcccctaacaatctctcagcagcacgtatcttttgcaaaccaatgcctttgatacttgaatctgcatctgtattaatctgttctgtctgaagtacttccttaatcatcttctcacctttatatgtacatacttttactgttccattatgctattcttagcatatcataaatcataaacaaaatgaatacatcataacatcaattatatcaacagaatacatattatttttaagtatccctcacaaatctaatcattatcttgcatatatacccttacacgaatttaggtcacaaatccgattcgcattattccgtccaaaccgtgttttatatccaaattatatggaaatatggatcaaatgaacgtttcagcactgaaaataacttgaaatcagattaagagacaggtattctataatatgcctcaccatctaacttttctctattataatctcaatttctcttttcatcaatcggaaaatacttccacgacaacttacgaaaggttggggaatcttacgctatcatacatcaaaagttgggaaaatattggggagttacactactccccaacaaaataaaacaggcaatcttcgcctacttatttcagaagaatgaggcgaagtttcacacgccagttggggagttgaaattccccaactcactccccaacttttacccaattccatgcataaatagcgataatttacgataagtcaaaatttattccccaacactaaaaaaggtccaccggaccttt

SEQ ID NO: 13130 - DNA, 1975 bp, Unknown
  gut microbiota DNA sequence
cctaattcatctgactgcaatgacacctgcaaaatcttccgaggctgccagaccaacttacaacgaagatgattatgacagtacaggctcacctgtcgcattaacttttgaatatggattggtaaatgatttcctttcggaatggtgtgaaatgaaaacgaaattaaatagtggagagatttctcctaatgaatattttgagtggaaaataacatggcctcaggcgtaaatgaaactattcacgcacagctcactttagtaccattttagtaccacaaagcaaaaaacaagctcgcaaatgcccattttactaggctttgcgagcttttgaaaattattcaaactcaatcgttccaggtggtttactcgtcaaatcatagaatacacgatttacacccttcacctcattaataattctgctcatcaccttatttagaacctcataaggaatctctgcagcttctgccgtcataaagtcaatcgtctttacagcacgaagtgcaacggcataatcataagttctctcatcacccataacaccaacagaacgcatatttgtcagtgctgcgaagtactggttgatatcctgatccagtccggcttttgcaatctcttctctgtaaattgcatctgcatcctgaacgatacgaaccttatcttcggtaacttcgccgatgatacggataccaagtcccggtcccgggaacggctgacggaataccagtctctccggaattccaagctccagtccggctttacgaacctcgtctttgaacaggtcacgcaacggctcaatgatttctttgaaatctacatactcaggaagtccacctacattgtggtgagatttgataactgcagactcaccgcccagaccactctctacaacgtctggataaatagttccctgtgccaggaaatcaacggcaccgattttctttgcttcctcttcgaaaatacggatgaactcttcaccgataattttacgttttgcttccggctctgttactccagcaagtttgtcataatatctctgctgtgcattaacgcgaatgaagttcagatcaaactgtccttccggtccgaatacagcttctacctcatcaccttcatctttacgaagcagaccgtgatctacgaatacacaagtcagctgttttccgattgctctggagagaagtcctgctgcaacagaagaatctacaccaccggataatgcaagaagtacacgtccatcacctacttttgcacggatatctttgatggtgttttctacaaatgcatccatcttccagtcaccggcacatccacatacttcatatacaaagttagaaagcattgtcttaccttctactgtgtgaagtacttccggatggaactgaattgcatacaattttttctcctcatattctgctgctgccaccggacagtctgcagtgtgagcagtaatcgtaaatcccggagctgtttttgaaatataatcaaaatgactcatccagcagatagtggatggagatacgttgtggaataatttggaactgttctccacaaatacctctgttttaccatactcacgcacctcggcgcgctctacttttccgcctaaaatatgctgcatcagctgtgcaccatagcaaagaccaagtaccgggattccaagttcaaacagctcttttgtataagtcggtgaatccgcttcgtagcagctgttcggtcctccggtcagaatgattccctttggattcatagctttgatcttttcgatatcagtcttataggaataaatctcgcagtacacgttgcactcacggacacgtcgtgccacaagctggttgtactgaccgccgaaatcaatcactatgacagtttctctgttcattggatcgtttcctccttcgcaataaattatttacatgtgatattgatattcatcatggctgatttcattttttatatatgattctatataattata

SEQ ID NO: 13131 - DNA, 10346 bp, Unknown
  gut microbiota DNA sequence
gggagttacgatcgtgtatacactggcagtctgggggctggtttccgcgattccgggagcgtttatccggatgtttggcggaagtggtgatacgctgacgcttggaatttcggcaatgcatttgtatttcttcggatttttctttatggcgtttcagttttgcggacagtcgacgtttacggcacttggaaaggcaaaacatgcgatgtttttctctattttcagaaagattattatcgtagttccgttgactttgatcctgccgtatttgtttggactgggcgtgcatggtgtgtttattgcggagccgatttccaatgccatcggtggactggcatgctttattaccatgattgtgaccgtgtatcgcaaacttggcagggaataaagttgtttttgtggataaaacagaggtgtaatacatggagtcagaaagaggatccgattttcagaaatagagattggatccttttctatttgttccgaattgtataaaaaggtctgcccgggcaagtgaaaacggcaagcattcaatccggaaagggtatataatgaaacacgtaaagtagttcagatatataaaaatatgtaatccaaagaaaaaattcattaagaagtgttatgtgtgcaactgtgaaaatgaggagccattgttgtgacatagaaaaagaacatgtatgttaaaatggggattggcatacatttttcacctttaaagagcagacaacaatatggtgtaggcgagaaaaaaagagtacttaatgaaatttggtgaaacagacagagcgacaaaaagaagttgaatatttgaactgtatattgtggcaaaggtaggacggttgtacctgcggaattgataaaagacattacttatgttaaggatcggggaacatgaaacagatgaggagaaaacagatacatctgtctgtccattgccagtgaggaaggatcttcttttccatttttaatgattatatatagtaaaattcccatgccgaaggtgtgggaattttgctctctatataaatataaaaggatgtgaaacaagtttattacatccggtaacaaaggcaactatggggatcatgcaggaggagaaaaagtatgaggaaaaaaattgtagtccggatgctttgccttgcaatggcggcatcaatgatcggaacaatggttccgacaagtctgtatccggttacagcaaaagcagcagaggctaatcaggatatggaagcatctgatcagaatgaggatcagattgcagttcaggcggagctggaagatggtgtcaatgatgaatggacactggagaataaagttggggatgatgcagtttgttcagtagaggacgaatggctgcatttgaaatcaggtgttggaaatggaaataatccaggctccaaaccggcaatgtttgttaatccaaccacatttgatttttccaaagatggatattttgattttacaatcaaaacagacgcaacggaagctacaaacaaccgttttggtgtatatcttggatacaataccgattctgttggtatgatgatcggctttgatgcaggcggatggttctggcagaaatacggtgcaagtggaagtccgtggtatactggtgacagaattgcatcaccaaccagtggtgaggaagtaaatgtacacatcgagtggactgcagctaaaaaagtaacagttaagattggtgatacagttgcattccagaatgaagacttcagtgaaatcggtagtctgggcaataaaatcgcattcaaatgcggaagctacggcggaaatgcgacagatgtatttgtaaagaatattcactataccggacagaagacagtggatcagatcaagacttttgcagtaagtggtaaagttgtagatgcagaaggtaaaccgattgccaatgcaacagttgcagttggaaaacagagcataaaaacaaacgaggacggcgtttacagcattaacgtaaaaccgggtcagtatcagcttagcgtaatccgtgatggatatgtaagtacaacacaggatgttactgtaggtgagcagaatgtgaatgttgaaaatatcgttctgacacaggaagctcagcttgagacagagacactttccacagaagacatggatgttgttgtttccaagacatttccaagtgttgccagatatgagatgaagaaaggtgatctggctggtaaagtgttctatggacagagcgagaagatcaatacagtaacgatcaacggaacagctgtagagctggatgatgctgatgtaaaagctacttttgacggtgcaaaagcgacttatgtaatgacagtcaaaggtgacaaaattgatgcagtgatcacatctgagctggttgctgaaggtaatacactggcatttaacattacagatatcaagaataatctggaggatacagtagatggaaatccgatccagacaatcgagattccgaaccagagccttgtttctgtaagaagttcacagaatggtgctaacttcaaaggtgcttctatgtcttctaataccaagaccagtggtgactactatctggaaattaaagacaatacaacacacaacagagattatgcatatggatttgtatccaatgatgagatgagtgccggattatggagtaattccgagcatgatggatacacagcatcaacaactgtatccggaggatctcataatacccgtgtacaggcaaccacacagaaaaaacaggattatgtatctctgggactgagcagttgtgcatggtattatcatcgtgtagtaacagattctcacaacagatcttatatggtaaaagagacagaaatgcctcgtacaaaagtaattatagcaggtgatatgaatgaggatgcacagattgactggcaggatggtgcagtagcataccgttctatcatgaacaacccatataagagtgaagaagttccggagctggtagcataccgtatcgccatgaactttggtggacaggcacagaacccgttcctgacaactcttgataatgtaaagaaagtagctttgaatacagatggtctgggacagtccgtactgttaaaaggttacgcaaatgaaggtcacgattccgcacatccggattatgctgatatcggtaaacgtatcggtggtgctgatgacatgaatactctgatgacagagggtgctaaatacggtgcaagattcggtatccatgtaaatgccggcgagatgtatccggaagcaaaagcgttcaaagatgacaatgttcgccgtgacacagcaggtaacctccgttatggatggaactggctggatcaggccgtaggtcttgacagtatttatgatctggcaaccggtgagcgtgaaacacgttttgatgaccttgagaaactggtaggaacaaaccttgatttcgtatatgtagatatctggggaaataataccggaagtaatgatgatgactcctggcagacacgtaaactgtcaaaagagatcaacagcaatggatggcgtatggcaaatgagtggggtgtagcaaacgagtatgatgcaacattccagcactgggcagctgacttaacttatggtggagcaaaccagaaaggtcagaacagtgaggttatgcgtttccttcgtaaccatcagaaagactcctgggttgctgattatccttcttacggcggagctgcaatgatgcctctgcttggcggttacaacatgaaagacttcgaaggatggcagggacgtaacgactatgatacatatatcacaaacctgttcacacatgatgtaacaaccaaatttatccagcattacaaagtaatcaaatgggtagatggagatccggtaaatgcaggcggagctacaaactggacaccggatatggaaatcacattgaaagatgatgatggaaataaactggtactgaaaagaggttccgataatccatctgatgctgcctacagagagagaaccatgacattaaacggaaaagttgttgcacagggtgcaccttctgctggtgatcgtcgtgattctgatattcaggcaggtaacaaacgtggtacagagagctacctgattccgtggaactgggatgctgagactggtgagaaagtagcatctgctgatgagaagatgtatcactggaatacacagggcggcacaacgacatgggatgttccggacagctgggccggattaaagaatgttaaagtatatcgtctgaccgatgaaggtaagacagatgagcagactgttgatatcgtaaatggccagttgacacttacagcagaagctgaggtaccttatgttgtatacaaaggtgagaaaggtaatatcgatgtaacttggagccagggaatgcatatcgtagatgccggatttaacggtggagcagcttctcttgctacaaactgggcaaaagttggtgatggaacagctgagatcgctaagagtcagtacagcaatccgatgctgaaactgagcggtgatgtagctatgacacaggaactgacagatctgaaaccgggtcagcagtatgcagtactcgtaggtgtggacaacagaagtgacagcaaagcatctatgaccgtaaaatgcggagatgaagtcctgggaacaaattatacagagcgttctatcgcaaagaactttgtaaaagcatatacacacagcaattccagtgcaaccgttgacggaagcagctatttccagaatatgtatgtatactttactgctccggaaagcggaaaagtaactctgacacttgcaaaagcagcaggcgaaggagatgcttactttgatgatgttcgtatcgtagaaaatgatgcacagaatatcacaagagacaaagacggcaatatcgtgaaattcgagcaagatttcgaaaataacgtacagggaatctacccattcgttgtcagcggaattgaaggcgtagaagataacagaatccatctgtctgagcttcatggaccatatactcaggcaggctgggatgttaagaagatggatgacgttctggatggaaactggtcagttaagattaatggcctgacacagagacagactcttgcatatcagacaattcctcagaacttccgttttgagccaggtgtaaaatatcgtgtaagctttgattaccaggcaggaagtgatggaacatacggcgttgtagtaggcagtggcgagttctcagaagcaacagaagttgatacactgaacaaacacatgggcaaaaacaaagacggacattatatctgtgagatcacaggtgacctttccggacagacatggtttggtatttactcaacagataaagcaccggatctgcagggatcccagggaagtgcacagaacttcggcggatataaagagcttgttcttgataaccttgtaattgagcgtgtagatgagaaaattacagcaaaatccttaaagaaactggttacaaaagcaacaggtcttgatgaagaaaaatataatgcagctgattggaagacactgacagaagcaattgacgatgcaaatgttgcattaaacagagacaaaacttcttccgaagaaattgaagcatgctatcgtcatttgaatgcagtattagagtatctgtcaactcgtgaggtttctgcaaatgcaggtgaagaattggacattccggttgcaggcgtgaaagtaacagcaggaagccaggacaatggtacacactatggttctaacttcggtaacccggcatatgcaattgatggtgataccaatacgcactggatgacaaactttgatgaatatagtaccgcaatcaaaaacagaaaaggctggattgatttcgaattcccggaggcacatacggtagacggacttcgttatttaccgggaccgaatatgggcggataccttacaacaatcacaaaattcgaaatttctgtaaaaacagctggttctgatgagtatcagttagttcaggaaggagaatgggagaactcctcaggatggaagaccacagagtttgagccggtagagaatgtaacaaacgtaagattacttgcaacagaagcaaaatctaccaactggtgggcagtagcttccgaaatccgtgttatgagtaaagtagaaaacggaaataccggtggtggtgatgaagacacaatcaataaatccagtctggaaacacagattgcaaccgcaaacaaacttctctccaaagagaaacagtattctgcaaaatcctggaagacatttgcagcaaaactgaaagcagcagaagatgttatggcgaatgccgatgcgactcagtatgatgtaaaactggctcttgcaaatctaaaagacgctatgagcggattacagatgaaagatggtctggcagatgtgaaaaacgaggatggcaactggtattactacaaggatggtaagatcgcaactgacgtaacaactgtagcaaagaacataaacggctggttctatgtaaaagacggtaaagtagacttcaaagcaaatacagtagcaaagaatgaaaacggctggtggaagatcacagacggcagagttgatttcaaagcaaacacagtagcaaagaatgaaaacggctggtggaagatcacaaacggtaaggtagacttcggctacacaggaattgcaaagaacgaaaacggctggtggagaatcgtcaatggtaaagttgatttcaactgcaatagtgttgagaaaaacgagaacggctggtggtacatccgcggcggtaaagtagactttggctataccggagttgcaaagaacaaaaacggctggtggagaatcgtcaatggtaaagttgatttcaattgcaacagcattgagaaaaacgaaaacggctggtggtatatccgcaatggtaaagtagacttctcctacacaggtgtagcaaagaaccagaacggctggtggagagttgaaaacggtaaagtaaacttcaactataacggaatcgctaaaaatgaaaatggctggtggtacatccgtaatggtaaagtagacttctcttacaatggcggaacacacaacgttgttaacggtaaagttcagaaataataacttctgaagcggtttgtaataacggaaagtgaagaagtggggcgctgtaacgcagataatatatctgcggagcagtgctccattttttttgtgttccgaattgtgtaaaaagagacggtaagaaagttgaaaacaccaagtttttgatgcatgaaaacgatataataaggctaaagcacagtgagaaggtagcacaaaacaggggtattttacatgaaaaaaggaaagaaaaagcaatggctgatcgtactggttctgacagtagcagtgattgctataacctgtgtcggaggttggaaacatgcacagaagacggcattttcactgacaattaacgggactcagatcagtaaagaagagtacattcaatgcatgaatctggtgcagtacaacacgatggtaacccttcgttcggagaagcatgatgtttcagaagatgaactttggacgacgacttataaaaatggaaaaaccggatatgaatatctggcgcagcagacagttgaacagttgaaatatatgcatgcagtatatgatatcgcaaaagacaaaggctatattaaagatgcgacctatgaggggatgctgaaccgtatggagcaggaaaatcagtcacgaagtgagaaaatcgaaaaaggtgagactgtctatggattgaaagaatattccacagaaatgtatcaggattatgaactgaattatcttcaggaaacatatatgaatgataaatcaaatgaagatatgaattttactgaggaggaaattcagaaacattatgataatgatgactggtttgtcggagaagaagccagagaggtggatctgtcagaagcgcgtgcagcagtcattgatgaattgcgtcgtgcaaaatatgaggaaatgacagaagaaaaagcaaaggttgctgaagtggacggagatatggatgctttatctcagtttactttgaaacaactgtaatcaattggactatggggaatttgatataaaaaaattatatccggtgattacagtcatacaattaggaggagaagaaacatgagaaaaaaatgggcgagcagattacttgcaatgatgctgaccggtgttacggtagtaagcatgatgccggcaaacatcgcacatgcagaagaagctgacggacagcaggggactacatattatgtaagttctcagaatggtgatgatgccaatgatggaacatcggagaaaaaagcgtttaaaacgctggataaaattaatgagattacgttaggaccgggagataaagtacttctggagaagggatctgtatttacagatcagtaccttcatgtacagggaagcggaagtgcagaagcaccgatagagatttctacttatggtgaaggcaacagaccacgaattgacgccaatggcaccggtgtatggtatcaggattatggaaatcatctggataatacaggacataaatggaagggaaatgtttcttcaaccattttgctgaaagatgtagaatacatagagatcagaggtctggagctgacaaatgacagagagaccagtaaagtagacgatggattaaaatataacgacgcaaatgttatggatcgtaccggtgtggctggtgtagcgaaggataaaggtacggtagatcatattgttctggatgatctgtatgttcatgatgtagacggcaatgttatcaacaaacatatggcaaatggtggtatttattttattgtagagaaaccaacagatgagaatgctaccggcgcttccaaattcaatgatctgacaattgaaaactgtagtgttgtaacaacaaaccgctggggtatcgcagcagcttatacctatgcatgggcacagcttaacagtgcacatttgaatgaagcagcattggaaaaatatgcttccagtaatgtgacaattcagaacaattacattaaagctgccggtggtgatgcaatcacaaccatgtatgtagatcagccactggttcagtacaatgtggctgaggattgttcccgtcagatgaatccgacagattatccaagtggctggcagcgtgtagcagccggaatctggccttggaaatgtaaagattctgtgttccagtataatgaatgttataataatcagtatgcatatcatggtaatggcgatggtcaggcatgggatgcagactggacagacggaacactctatcagtacaattacagtcacggaaactcccgtggagcaatcatgttctgtggagcagaggctgtgaatacaacattccgttataatatcagtgagaacgagttgacaggtccgttagatttaccaggcaatccggatgctcatatttataacaatacattctatatgaatgagaatattaagagtatttttgaccgtaccggtggaaatgcagtgctcgagaataatattttctattatggtggctcaacgccgttaaatcagaactggtatccgggcggaacacttcagtatgacaataacctgtactataactttgcaaatacaccaagcggagataagaatgccgttgttgtaaatgcaggtacaaaagttctggaagatgcaggatccggtccgtcttcaaatacatcaggtattgcttatatcaaagagaatgcatctgtatttgacggttataaactggcagaagattcgccggcaattaatgcaggtaaagtgatcacagataacaacggatatgatctggagcatgatttcttcggacatgcactgacagatataccggagattggagcagcagaaagtgattatgtaacagtaactgctacttctaatgtatataatgtggcaaatgatcagatcagtggtctggcaaaacatacaacagtcaaagaattactgaagaatcttaatatagacagcagtacgcaggttacagtaaaatccggtgataaagttttagctgaaaatgatgtagtaaacggtggatgcacagtaacaatttcctatggcgagaaatccaaaacatatacgattgtagcaagttctgactgcgaattaaaatctactgtatacatgatgacaggaacaacaatcaagattccgtctaccgagaagaatccggcaactgtcagcgaagtaaaacagaatgtaaaaacaagcagtaccgcaaccgtaagtgtaatttctgatgacaaagtactggcaaacactgatacaattgcggatggaatgacacttcgcattacggcagaagatggtacaacaagcgactatgagatcgcagtaaagaacgactatcattg

SEQ ID NO: 13132 - DNA, 994 bp, Unknown
  gut microbiota DNA sequence
cttcatcccttaaccttgccagtatgcacaactcgccggaccgttctacaaaaagtacgccgtcgggcatataaagcccttcgacagtttgtaaacacagggtttcaggttctctttcactcccctcccggggtccttttcacctttccttcacagtactatgcgctatcggtcactaagtagtatttagccttacggggtggtccccgctccttccatcaaggttccacgtgtctcgatgtactctggatactgccatgctgaatcacttttcgcttacggggctttcaccctctccggctggctttcccaaaaccattctgctaagctcttcagatcaattatgcagtccgaaccccatggtgcacgcaccatggtttgggctcttccgcgttcgctcgccgctacttacggaatcgattgtttctttctcttcctccggctacttagatgtttcagttcaccgggttcccctccatacgttatggattggcgtatggatacatgaggtgttctcatgtgggtttccccattcagaaatctgcgggtcaatggatatttgctccttaccgcagcttatcgcagcttatcacgtctttcatcggctcttagtgccaaggcatccaccctgcgctcttcttcgcttgacctctgcataagattttcatcttacggtctgataacagttcgtatatagcgttatactctgttatcgctttgttgaaattgaattcatttaaatcaattaaattgagttatttgcatttaatctcggatgtcttgatatatctgaggtgtcacatctttcgatgttccacttcttttagatcaatcacttatctgtatgaagttttcaaggtacatattgactgttttatcagtcatcagaaaactcaaatccttttgaactctctgaccactggtaaatccagcgtatatcttaacagcttttcccgctgtaatgggtggtacacattccgtacctctatgttca

SEQ ID NO: 13133 - DNA, 16088 bp, Unknown
  gut microbiota DNA sequence
ctttttctatttattttttatgttttcactctggttattctttacaccgaaacgtaactttcacccggaacagatcatcctccagactgatctcaaatttgcctcccatcagttcggtcagcatttttgaaatagacagtcccagaccgcttccttcggtgctgcgggattcatccccccgtacaaaccgttctgccagtgcatccgcatccacattcaacagtttttccgatatgtttttcatagtaaaagatgcttcgtaaccatcctttgccacttccacatacacgcgggtatccggcatcgcatattttgacgtattgttatacaggtttccgatcacacgccacagctgccgtccgtctgcatagatcatcaccgcttccttcgggaacttactgatcacgtttaagcctttctgctccagtttctcgttaaattcaccgccggtctgacgcaccagttccaccagatcgatgtcatccatctgtaagatcacattaccggaggaaatacgtgatacatccaccagatcttccatcagctgttttaaccgcatcgctttggattccagtacttcaatatacgattctgcattcgggttatcgattttttcccggcgcagcagaccaatataattgatgatggaagtcagcggtgtcttgatatcatgggaaatatttgtgatcatatttgctttcatgcgctcatcccgcacactctcaccaatagcatttgccagaccttcgctgatatggttaatgccctctgccagctgatattcgtctccctgatactcttccagattcagtttataatcaaattttccctgcgtgatctgatcaattccttccaatattttccgtcgctgaatgacacgctgtgaaaaatagatcagcgtaaacagcaggaatatgatcagcaaaatatatgcccagataaatccacagtgaaatgccagatatgcgactacaacattttccagtacaattccccagatgaccagagtcattctgttcccaagataacggttatgcagggtatccttcaggttgacgatcaaccagtgcagataactgttttcaaaaaacgtatccgctttgacacggcgcaccagacttaagtacattcccataaatgcacagtcgcccagtaccgtaaacgtaccaacgattaccatgcgccccatgacaccgtaatcctgatgatgtacccgcatgccaagtgccgccaatgccacactgaatacaaatagcagggcaatcgggatttccgtccgcagcttatcaaaatttgccagatgaatttccttatcctcacttcgttttgcagctgccacggtcatataacacagtcccactaaccagacgataagaccaactgctgccagtacaaggctccgctgcgcccatgggaataatttgtcaaattcccgttttgccaccgcaaggtcatcttcctgtggaaagttcacatccacggcaacgatcagcgtataatcgcctttttgcagctcattatactgcgccatattctgataataattgttttcaattccaccgatattcgtctcaaaacggaaggttttgttgttatagctcagataccgaccataattgactgctttctcataagcatcctcctgtttttcaacatcatgcatattggtcacatatgtgccatctttcagatctccaagccagtaatacacattggtattattctgatcgtatttgttgttgtagattttgtaatctgagatccgctcctgagaagcattcactgtttcaggacgattttcatcataaacgccatctgtctcaaactgctccttcaggttcagataatccaacagttgcagcatctgttttgaaaaggtacgctcaaaatatccggattccacaaaagaggaattttgcagatctcccatattcagcatattctgattgacacaggtgctgaacagcacaatgctgaccgaagccagcaccgccgcgatcatctgcagaccgatcacaatcgcctttgccagagatgaataacgctttctgttctgttccatcgactacctcggttctattttctcaatcttgtatccaacaccccaaactactttcaggtactgaggatcttttggattaatctcaattttttctctgatatgacggatatgtaccgctacggtattgtctgcgccgatggcttcctcattccagatgctctcataaatctggttgatggaaaatactttgccctgatttttcactaggagcagtaaaatattgtattcgatcggtgtcagacgcacgttctgcccgtccacagttacttccttcagatcatcgttgatggcaagtccgcccgtctgaaatactttgctggattcggttgcatttccaagctttgtataacggcgcatctgggaatttacccgcgccaccagctccagaggattaaacggtttcgacacataatcgtccgctcctacattcaagcccagaatcttatccgaatctgcggtctttgcagacagaacaatgatcggcatgttactttcttcacgaatttttaaaattgcacggattccatctaaacgcggcatcatcacatcgatgatcaccagctgaatatcttcttttttcagcacttccagcgcctgcacgccatcatatgccttaaaaacctgatacccttcctgctgcagataaatttcaatggaatcaacgatggaagtgtcatcatcgcatactaaaatattgttcaagggaatccctcctattcttctttaccgaaaatcagatcttttaaaatggaacttgcatcccgtttttcttttttccgatgtggatgctgctcctgttcctgtgcaaactcgtcctccagtaccgcacggcgtatagacgcttcatccggaaattccggattcggatgttcctgagtttctgtttccggctctgcctgctgtgcctcctgactggctttccacttaaaataagccgcatcggtattgatcttgatatccggtttttctgccggtgccccatccgataagatatcctccggtctctttgttccggagttttcaaagtactgctcgtttactttaatgtcaggttcggatggcggaatatacatcatatttcgggcatactgtacaccagcctctttttctgcctccagatcgcggtttttccgtgcccgctgacgattgatatcatcaataatagacaggtatttcttcgtatctgccaggtctgcaagctgtccctgcaattcattttcatgggactgcagcttgtccttctgctcccgcagatcttttttaaactgcataaacagatcattcatggaatcgttggtctgatccatcagatcacggatagctccgatcatatccgcagtgtaaataacagatgctgcgtacacatcctccgcattggcatttgccgcctcaatgatctcatcgccctttttgcggaatgcccgctccgcgttgttccggctctgacgtgtctgctcgtactgatccatcatatcgtaaatcccctgattcagacgatccagcaatcccagaaatttctttcggtcgataattactttatccggatgtccgtccatcatctcacttttggaaaaagtgacatgaatctcctttaacacccgctctactttatcctgtggactcatgctttcctttgtttctccttcttctttttcctttcccaaatcgcatttttctcaatctggcatgtagctgttcaacatccagttaaaacgctctgttcttcagatcacaatgctctttttatacttcgatcaattcatactgatccgtaccaagtcctatttttaccgcatgctcaatgcagcttctccagttggtatccggatgtgtgaaatagaaatgatcatgtccatgctcacagtcgcagtcaccatgctcatgcttatgctgctccatattctctgccagcacactgtttgaaagtaccggctgctgattgcacagatctgcacacgccatatcaagagcgaccggatcaaaggatgccagcataccgacgtttggaatgatcggacggtcattttccgcatggcagtcgcagttcggtgacacatcgcagatcagtgaaatgtggaaacacggacggtctttgcaaattgccagtgtatactctgccattttgcagtttaagatatcgttggactcagaaaattccggtgtgactgcatctttcggacagacaccgacgcatcttccacatccgacacatttttcatgatcgatctctgccttgcgttcatcaatggtgatcgcactatgggcacagactcttgtacacataccacaacctacacaaagtctgcggcgtacatatggttttccggcgctgtgctgatccattttacctgcacgggaaccgccgcccataccgatatttttgatagcaccgccaaaaccggttgcctcatgacctttgaaatgagtcagggagatcagaatatctgcatccatcagcgcacgtcctacttttgcttctttgatatattcgccgtccactggaactaatgcctcatcggtacctttcagtccgtctgcgatgatcactggacatccggttgcatatggggtaaatccattcatgtaagccgtctccagatgatctactgcatttttacggcttcctacatataaagtattgcagtctgtcaggaatggttttccaccctgctcttttacgatatctgcaatgacttttgcataattcgggcggagaaacgccaggtttccgtactcgccaaaatgaattttgattgctgcataatgatcctgaaaatcgatggtttcaatgcccgcagtttttaccaggcgcgccagcttctgcatcagattttcggtaaaacttgtcttaaaggaagtaaaataaacttttgatttttccatttcctaaactccttctatattcgtataaattcattccatatttcttatagtttaccataaccattcctgtgtttacagttaaaattttcttaaatggttgtaagtatggttgatttacatccaaatgttctctgcatttcacacatatcgactcattgcctgtcatcttgccattttccccgttttcctgtaaaatgctatcgaaaaaaacaaaatgaaacttatgacaagattttaaagaaatcgcagcactcccaccaggaatgatttgttattgttcatcatgtgaaaaagtggaagtctcaatttcgactgaggtaaacattaaatttatggaagtaattcgtacttatggaaatatcataaaaaaatatgctcccgaccatccgctggcagctttccgcatgatcaaagccggactggctctggagcagtttcgcagtaagcatctggctgacaaaagaatgcccggcgcttaccagtatttaaatacctatgcggttggagaagttctggctgctttaaagcaccctgagacctccgtctgggcaaatatttttgctccggtggaactgctacagtgctttggcttgcacagtctgtccattgaatgtctgtcctcttttttatccggcttcaccatcgaagattattttctggattatgccgaaaatgaaggtcttgcatccaccctgtgctcctaccataaaaatttcatcggcgccatcgacagctgcatcatcccgccggcagcttttgcagtaacaacctctaccatctgcgacggaaatatcaacactttccgacatctgtctgaaaaacatcaggtgccgtcctttctgatcgatgtcccgcagtacaatacaccggatgcaaaagcctatgtcacggaacagttaaaagaactgattgccatgctggaagataccttccaccaaaaatttcaggaagaagaactggttcctattttacaacgggaaaatgcatccaaagcctgttatgaacgctgcttaaaaaatctgcggacgcatcattatccatctacgctgactatgcaaatgtatatgctgtttgcgtcacatatgaatattggcacaccggaaatcctgcatttttatcagcagatggaagccgaaaccgcagctgcaccggaatttcatggcaccaacattctctgggttcacctactgccttattatcaggaaactttaaaggagtactttaatctcaccgatgattatcagattcaggcgattgaaatgaatctggattaccgcgcgccgttggataccgaacatccgctggaagctctggcagacaaaatgatccacaatgtctacaacggtccttatgagagaaaagcagcactggtatcggaactggcacaggatctgcagtctgacggcgtcatcaatttctgtcactggggatgcaaacagtcctccggcggcgtcatgctgttaaaagaagaactggataaaaaagatattcctcttctgatcctggatggagacggcatggaccgcagaaacagtcacgacggacagatccgcacccgatttgaagcatttttagaagtattaaaacagcgaaaggaggaggcataatgctggcttatttttgtaaatatgtcccggaagaattgctgcaggcgttcggcacagagcttgtctgtctggaaccgcatgtaacgaatttcacccaggcagatgccctgatgcacccaaatatgtgttccttctccaaagcggttctggaagaatttgaaaagcaggattatgaaggaatggtctttacctcctgctgcgacagttcccgccgactgtatgatattttatgtcagcagtttccggataaatttttcttctgtctggatctgccgcgcaagatcaatgattttgctgtgacgctttatacgaaacagctgcaaaaactcattgatgcctatgcggatttttctggaaaaaccttttcggagcagaagttgttggaaatttgcagagaatgtgctgatgaacaaaaactgattgaaactggcaaaaaacatgatacaaaacagaaaacggcaaatgatgctcagaatttcgatgcaactgcttatcagacaacagctcctgtcgatcacacctccatctcatctggcttagctgataacccaactgccgattcaccgatgaatggtcttcatatcgcccttgttggtgcccgtccgggcagtgagatccgtcagctcatcaccgatcatcaggcagagatcacactggatctgacctgcaccggcatccagcgcagctacgacctgaattctgaacagattctgtctgcctatgcacatgctctgttagatcagcttccctgcatgcgtatggctgccgcatccaaccgccaacgtattctggaagcctatgaagatcgcattgacggcattatttaccacaccgttaaattttgtgatatttatgcttacgaatataccaaactgcacgaaacatctaacctgccgattctgaaaatcgaaaccgatgctaccgctcagtgcggcggtcagattttaacccgactggaagcatttttagaatccttacgtgcacaaaaaggagaatctatgttatttaaaaataaacgacagcagtcagaaaactattctactgaaacacaagatgccgtttccgatactgcaaatgcaaaaacagctaatacaacggatgcacctgtctatgtcatgggaattgacagcggttccacttccacaaacgctgttatcttaaacggtaatcgtgaaatcgttgcttccgcggtcatccgcaccggagctaaaagcggcgaaagtgcacagcgcattttagaagaaattttacagaaggcaaacctacagcgctctgatctgaccaaaatcgtgtccaccggatacggacgtgtcagcattccgtttgcagatgaaaacgtaacagaaatcagctgtcacggaaaaggtgcacattatctgaatccggaaatccgcacgattcttgatatcggcggacaggacagcaaagcgatccatctgaatgaaaaaggggatgtgactgattttgtcatgaatgataaatgtgccgccggaaccggacgttttctggaaatgatggcgcggacgttggaagtggatatttcagaactgggaccactgtctttgaaatctacagaaaatattgagatcagcagtatgtgttccgtgtttgcagaatcggaggttatctcactgatcgcccggaataaagaaacttctgatatcgcccacggcattcatatggccatcgccgcgaaagccatttcactaatgcgccgtgttggactggaaccaaggtttatgatgactggtggtgttgcaaaaaatccgggcgtggttaaggtgctggaagaacagttgaaggcgccgctttttatctctgaggaaccggaaattgtgggcgcactgggtgcggcattgtatggactggaaaatatactttaggaatatttaacttctcttgtggctaaattgtacgtattgaaaaagaaagcaggctattttgtcccggtagctaacaatcgcttaccaggaaaaaatagcctgctctctttcatttacgttttgcatttatactttctatatgacagtttgtaaaaaatgaaatatagcatttttctttattccatcattcgttttcgcttctgtcatattcttcgttcaatatttctgccaatttatgtatcgtattcgacaacgtctcataacaaataccataagtcaccagctctgccccatacggatccagaatttccagctcatcaccggtcagctctgtcagcacttccacattctgtgcgccttccatctccagcactttctcttttgctgcctggtcaaaggtcagaaccagtgtatgttccccaaaatcagacggttccagctgactggacatataattttccagtgtaatcccattactgatcattacagcttctgctttctgattcagcggttccggaaataatactacaatgccccgcgccagtatctccaccggaaaattcagatgttcccgctgcaagattgcagccgccatcggttcccggcagattgcccgtttccccgcaaagattatcttctcgattttttccaaattgtcacctccagctaaacttcgatcacctgatgtcccgcagctttcagcagacgattcataatcgcgtgaccgatacgcggagtggcaaaactttcagaaaagatcacatccacatccatatcatcaaaatcacgcaaaatagcatacaaatgctgtgcaatgctatcttcatcctgtctgctgccggtgcttttgatcacatcaccgacatactgtgaacggctctcatctgtacatatgattccgactttttctcctttttgctgatgctcttgtgtcagcgcattgatgcgctcgatcactgccccagcttctccggatacgatcgtcagatttgcctttggtgcataatgtctgtatttcatgcccggagctttcggatgtacatttggatctgcactggcaaatcccggatcatcctttacttctccgatcacttccgacaacatttcttttgtaatataacccgggcgcagaatcatcgggatttcttcgctcagatcaatgatcgttgactcaataccaatgccaactgctccgccatccaggatcatcgggatttttcccttcagatcttcgtatacatgctctgccagcgtcggactcggtctacctgaagtattcgcgctcggcgcagcgatataaccgccgccttcccggatcagagccagcgccgtcggatgggacggcatacgaacggctaccgtgtccagcccgccggtcgtctcatacggaaccgcatcacttttctgaaaaatcatggtcagcggtcccggccagaacgcatctgccagagcctttgcctgtggcggaatataagaagtaattttcttcagtgcttcaaaatctgcgatatgcacgatcaatggattgtctgacggacgcccttttgctgcataaattcgtttcgccccttccggcagtaacgcgtctgctcctaatccatatacggtctctgtcgggaatccaaccagtccaccctgacggataatttctcccgcttcccgcataatatccatatccggatgcattgcatccacttttttcacctgtgtgttcatcatttcattatctgtatttttattcgtattcatgaaaaacagtataccacaaaagattttacttgtcagcacctgtcacctgcgcgtatactatagatacatttacctaacttaaaacagaaagaatgagggttttgaaatgaatattacaaaaagttcttttggaatcacaaatgacggagaagaagcttttctttaccgtctggaaaacacatccggcgcatatgttaccataaccagctttggctgccgcgtggtaaatatctgtgttccggacaaaactggcactctgcgtgatgtatgccttggctatgacacccttgctgaatatgaaaaagatcaggcaagtttcggtgccgttgtcggccgacatgcaaaccgtattgaaaaaggtacgttcacattaaatgataaaacatatcatctggtaatcaacaatggaccaaaccacctgcacggcggcacccgcggtttccactactacaactgggaatctgcacaggttggcaacaccgttcgttttacccgtgtttcaccggacggagaagaaggttatccgggcacactgacaatgagcgtgacctatgcatggagtgaggacaatgaactttccatctcctacgaagcttccagtgatcaggataccgtattcaacacgacaaaccattcttattttaacttaaatggcgaagcttccggatctgttctggagcatatactgatgatcaatgctgaccagtataccgaaactgatgaaaacgacctcaccaccggtgtaatctccgacgtagcaggcacaccgtttgatttccgtactccgaaaccgatcggacaggatatttttgcagatcatccgcagttaaaatattccaaaacctacgatcataactttgtattaaacggaagcggtctgaaggaagcagctactctgtatgcagaagaatccggcatccgcctgacctgctttaccgaccagcctggcgtgcagttatatgtaccggcacagtctccggcagaacatggcaaaaacggcatctgctacccggcatacggcagcgcatgcttagagacacagcattttccaaatgcaaccagccacccgaatttcccatctgttatcttaaaagcaggggaaacttttaaatccaaaacattatttcatttttccgtgacagccaataaacgataggagtgatcgatatgtcgatggagcattacaaagctgccgcaagggcaggcaaaaaagacttacagaaccgaacagcacagaaactgccgacccaaatgcccgctttagacacgattctggaacatgtagacatcagcggtgaagttccattaggtctggtggatatcccaacagaactgatcatcggaaccaaaacctatggacgttcttcctcctttgccccgaattttatgccaatcctcggcgaaggtacagaatttgctgccaaatggtccgcactctgcgatgcacatttacaggaaggtattcgtgaacccattgttgcttatgaatacatgaaccaatattatgtgcaggaaggcaacaaacgtgtcagcgttctgaaatattttggagcgatcagtgttcccggctacgtcacaaggatcatccctgcaagggaagatacgaaagagagccgtatttactacgaatttctggatttttataatgcaacgaacattaattacctgtttttcagtcaggaaggtgcctatcagcatctgtcctaccatctcggacacagccgctatgagcgctggagcatggacgaccgcattttgttccgttcctgctacaaccgttttgccgatgcgttccgggaactgggcggtgacaaactgaatatgaccattggagacgctctgctcatctatctggatctgtttgattacagccagctttccgatgagacgccttctgagatcaaggaaaatctgaaaaaaatgtgggcagagatcgaactccacgatacgaaagagaaaccttcggtcaaatatgatccggaaccggaacagaagaaaaatatctttaccaaactgctcaccggtaccgatgaagaaaatatcacacatattgcatttattaacagaaagacaccggagacttccagctggacttatgcccatgaacttggtcgtctgtacctgaaagatgcttttcatggcagtgtacagactaaagcttatgacaacatttccggaacagacaatgctattgctgccattgaacaggcaatcgccgatggcaatgaaatgatttttaccacatcaccggaatttttaagtgccagcctgcgcgctgcggttgaccacccggaagtaaagatcctgaactgttccctgaacgcttctcataaatatatccgcacttactacggacgtatgtatgaagccaaattcctgatcggcgttctggcaggcgttatgacagacacggacaaaatcggctacatcgcggactatccgatctacggcatgactgccaatatcaatgcctttgctctgggtgtcaaaatggtaaacccgaaagcaaaagtatatctggaatggtccaccctgaaagaaaatgagcatgtcgacctcacaggaaaactatatgcgctgggagctacttatatctcccatcaggatatgatcattccgcgcaagatcacccgacagtttggtctgttccgcgtcaacggagaaacacctgtcaatctggcatttccggcatggaactggggaaaatattacgaacggatcattcgaaatgtacagaacgggatctggaataccgaagaaaaatccgatgccaagaaagcattgcattactggtggggcatgtcctccgatgtgatcgatgtggtctggtcctctgcggttccggacgaaacacggcatctgctggataccctgcgaaatgccatccgcaattacgatttcaacccgtttgacggcattttgcattctcaggacggacttgtatcaaaagatgcgaaccaccatttgacctcaaaagagatcatttccattgactggctcgcggacaatattatcggtcggattccaactgcagacgaattgcgcgaagatgcgcagaacgttgtacggcaggagggaatccgtaaggaggaacctgtattatgagaatcatggcaatctccgatacagaatcaactgcattgtgggatcattacaacagtaacaaaatcaccgataccgatctgatcctttcctgtggcgatctgaatccaaattatctctcatttctggtaagctgtacgaatctgccattgctgtatgtgcatggcaaccacgatgagaaatacgatcagacaccgccggaagggtgcatctgcattgatgataaaatttacgttcacgaaggcatccgtattcttggtttaggcggttgtatgccgtataagcccggcaaatatatgtatacggaaaaagaaatgaaacgacgcctgttacatatcaaacaccagttgattttctatcatggcttcgatattctgctgactcatgcaccggctcagggactgggcgatggcgatgatcatgcacatcagggatatgaagtttttctgaaattgctggacaagtatcagccaaaatatatggtgcatggacatatgcatttgcagtatgatcactcgttgaaacgcaccatgcaatataataatacgcagattattaatgcgtatgaaagacatacctggaaatattaaattcttgtttagggatagcttaaaaatttactatgttggattttaataggaactcctgtaattttgtctcagtcgctagcaatcgctccttgagaaaaaattacaggagttcttaatttacgcagtgaattttgtgaatttttgcgccaccctgcacttcgtgccacgcatgcatatatacattgaaataatacgctctgtgttacatgcgctaatttctatgatgtaaatgtcattgtaatgcgacacaaagtgaagtcgtgtgcattggctgactttaatgctgtaaatagagaaaacaaagaatcctgtcagggaaagcgattcagtgagcgactgagtttcacaaggttttgcgcgaacgggaaccgaccagcttttataggaggtgggagtgagcgcgatgaaaccgcagtgaaatgaaggcagcgaatgtctagcttcctgacaggattcttcgttttcttatcatataaattttcagtcaaaaacgcgacaaacaagaatatatcaattttccaaatactcacaaattcctttctgtagcgcatctaccaatttatcctgatattgtgcagtattcaacaacgtctcttcttccggatttgataaaaatccacattccacgatcaccgtcggcgccgccgtgtttttcagaatataataactggtattggctttcgccatccgatgattctccggatctgcatgctcgatcaggctcttttgtaatatttctgcaagcacttttccttcttttgattctgaataataaaatacctgcgcgccttttgcggaactgttagtataactgttctgatggatgctgatcaccgcatccggctgctcggaatccatcttcgccacacgatttttcatatccgacgttttttcgtttgttgcattcgcatctgccagatttctgtcatcggttcgcgtcataaccacccggatattttgtttttccaaactctttttgagttttaaagcgattgccagattcacttctttctcttttgtcccagcaactccgatcttgcccggatcgtttccgccgtgtccactgtctatacaaatgcagtaccgcgctttctgtacactgcgattcatgacatcatactgcactacccgcggcactcgtatggcagcaactacaaggcaaactaataacgctgtaacaccgattctttttttcacgcaaaaatacccgaacatatgtaatctcacttacaatgtattcgggtatttactacactattactaattcatatactctgcaatggtatcccagatcgtatttttctcatatccaagcttccagaaagatgcacctgccagatgattatttttcatcacatccagcttttctccgatggatttctgatcttccacccagattttgtacgtcttgccgtcatgctcatattctgcataatactgtccgcagtcatccagccactgaagcgttaccgcatttgttgccacacgggtatctacttcactcatgctgaccacttcactggatacagtataaccgctctgtgcctcatccgatgcctgatctgactgatcatctgaagcagtcaccggtgtcagctcccacactcttgtgtagaacggaactccaaggatcacctgctctgccggaacatcctttaacgtatcttcaattccctgacgaacgaagccgatggatgccacagaaccttcatctgatccattgtaatgctcatcgtatgccatgatcacaatgtaatccgcaaatacagcctgctctccacagtcatagaaagagttataagatgccggaacataattatccacggacaatacaatgtcattattttcacatttgatagaaagctcccggataaattccagatatccgtctgccgcttctgcacttaaggattcaaaatccacattgatgccatccaaatcatatttaatcgcttctgccaccagattattcaccagattatctctgctggacgtgagattcaatacagaagtagaatctacgtcactgttctccagattactcaccagtccccagacttcaattccctgctgatgacagtaagtcacataatctgaactgcacagggaagcaatatttccactgttgtcattcaggtaaaaccatgtcggtgaaattacatttacccctttggtacgtcccagtacatctgccacatttccatttgcagtc

SEQ ID NO: 13134 - DNA, 9043 bp, Unknown
  gut microbiota DNA sequence
tcgtacagaacatcctgctcactgccaacagctttcgttttcatatatccgataaatccatcctgactgcacactttactccaggatccgacggtatccagaacagtcaccagatcaccttttttgatttcggaaaggatcgggctcttgacgccgcctttctgccggatctgtgtattctttttcaccgtctgataagtcacatcatcccactgatcagaaatcacgatgcgtcccggatctgtatatacttcatagtgaatatccgtgtatttctgcacaaaagacatggacagatacatttctccatcccgcaccagggcgatcacatgatccgctgtctcagatgattttccaagcagatactgtgtgctgtccggtgtcacattgatcagtccatccggtgtcacataacgcaaaacctgctctgtcgcatcccagtaaaatcgcttattcaaatatttatgcacggtctgataattaacatacacctcatcatcctgcaggattgcatgattttgtacctgctcattatcatagaccacaaacagctcatcatcttccgataaactgtaatattccttgtaatcagttacctcctttgacggagaatattttttcaaaaaagtcgtaagtccgacgatcaaaacgatcaatatgatcagcgccgtcaccccgactgccagaattaatttttgctttcccctttttgtttgctgtcttcgtgaagccatcgctccctccttttctcacctgtatatcatcccctgcggatctctcttatatacgatagatagtatgtaacattttccacagattttcagacatgtctgaatgctactgttatgttcagtatacatgaaaaaaaaatgcgatgcaaccattccgatcaaaccttaatgaaggttttataaaacatttttcaaacggcaatcggtacagcataagggcatggataagtattcgtgtgaacctgccggctctgtttttgcccctgccgtaccgttggtatttgaggaaaccttctgccgtttttgttattcttctgtttttactacatcaaatctaagctccgataatgcgccctcatcgaacacataatcgcgcatataatctacattttcccggacaaacatggtttctgacacttcatccgaattactcggaaaaccttccagccagatagaaatcccctgtttttcataattttgaagttcgatcaggagtggttgtccggaaccagcaaatgtctgcttcataaaaatacctcatctctgaccatagcggaagtaagttcgtgatatacaatccgccaataactttatttcaagaatatctttcctattcctgctgcgaaatgtgtgtcctgcaatgcatgatatctgctcccacacacttccgtaatcttataaaactttggatatgattctatgtttcgtcactgttatgctccggcaaaaaggtatgacaacgttgtcttcgtctttatctttctttttacctccgtatctatattcttacagttttatcttttctgactgtcacagatttctgccggatttctcttatccacccccagttctttgtcagtttcggcaaatgcacatatactaacaaaaaagtattcttaagaactttcccccataccgacagctcgtcctgataaaaataatacatcaggtctgcaccttactttacttttcaccccaaaaaagccaagtattcgggcaaaatctgtgacgcgtctgaataaataccagatttctctcctggatacataaaacggaaaatataaagatggtcagttgacctacctagatctgtgggatctctccccttgcagcaaaagcatctgtaaaatgtacagaattgtacgatgcatgaaatctgctgcagtccccagtctgtaaaaatccttctgctgaaacaacattacaaaagaattattaacaaactgatatgaatttgatctatccgtatgtacggaaaacttcttgagccataatataccacaatcaatttgaaaaatcaacttaatttttaatttttctttaaaaagaataaaaaacaggaaattgtcattaatttcatacattctttatgaatgaatgcttgacgaaaaacacaagattatatatacttttctaacaagtaaggaagtgatgacatgaaaattgaaaaattaaatgaccatcagattcgctgtaccttaaccagtgaagacctggctacgcgcaatatcaaactcagtgagctcgcctatggttcagagaaagcaaaagctctgttccgcgatatgatgcagcaggcagctatggattttggatttgaagcggaagatataccaatcatgatagaagcaattccactctcctcggagaagattgttcttattatttccaaagtggaatcaccggatgagctggataccagattttccaacttcactcaggcggacaccgacaatgaaaatgaagatgacgacatcctctcctttggttctgatacctttggcgacaattccgatcaggaaccggatgacacgtccatgcagttacttgatctgctccagcagttaaagcaggcacacaaaaaagaggaatcttccacagggaagaaagagacttcttccattccttctgatcttgtccgactgtttacgttccgtgaactggatgcagctattcttgcagctaacaccttgcagggattttatcagggaaaaaatacactgtataaagatcctcaggagggagattattatctgatccttcaccagagtcagcataccatcgctgaattcaatcaggtgattcatctgatcaactcctacctgcagtcgaagaaatatgtgaccggtactcaggcttattacgaagaacatttccagaagatcatcattggaaatgcattacagcaattaggcgaaattgcctgatttccgaatctgaaatcaaaaagtcaaaagaaaagcaacaagaaagtgcgctatcgtccacacgaagtgcttttacttgataggaaatttatcgtaatgtcctatcaaatgaaaaaactgctatgcaaagaacctctctgcatagcagtttttatttgaaattatatcgtttacagtgccaagcctgtgccttatgctacaacatcattgaggcggtctactaattcctgcggctcaatgccatgcaccatagcagcctgctcgatggtctccatctgagaagacgggcatccaaggcagtgcataccaatgccgaataatacttctgcaatgctgtcgatatgctcctgatcacgtaataattcaccgatcatggtgtctttggtaatctgtgccattttgctgtacctccttatttttactaagcgtagtataatacgtttgctcaaaatatgcaaccccagtttatcctccgatctgggacatttttcttgtatccgcttccccggaagctggcgcatcaacagatgactccgcctgtacttcaccaaaatgatgttccttcggttttcgttgaatcgcatccgcaattgcatctgcgatctcctcatccgtacttccgtcacgtaacatctgacgcagatcaatccctgctccggaatacaggcataatttaaaaaatccttccgaagtcagcctgatccggttacaggtgctgcagaatttttcatgcaccgcaccgataataccgatctcccctgcaaatcccggtgcccggtaatagactgccggaccgtttccaaggatttcctttacttgatatgcctccggatagcgtgcaaaaaacatttccttgatctgttccgcggaaaatgcctcatactgatctccgtatccgatgggcatcatttcgataaatcgcacggcaatctgtttttccttagcccatgtaaaaaaatccggaatctcatcaatatttacgccctgtaccggtacacagtttatttttaacggaatcccgcttttatataccgcttcaataccgcgctctacctgctcatacatatctttcccggtcacttccagataacgcgctctgtttcgcgtatccagactcacattgatggcatccacgcctgcttcctgcagctgtggcagcatttcttccaacaggacaccgtttgtcgtcagtgtcaccatatcaatgccctcaatctgcttaatctcacggatcagactgtcgcagccacggcgcaccagcggttctccaccggtcagctttacttttcggatccccagttttgccagaattttcacgatccgcaggatctcctcgtaacgcaggatccgctcatgcggaataaacggcacatcctccggcatacaatatttgcatcgcaggttacagcggtcggtgattgatattctgatataatcaatttctctgttataacgatctgtaatcaaaatattctcctgtttaaaataatatagttacgaccatacccgccgcatttttatacacggacggattggcactttcttttccacagtaaacgcgaaatggtgtggttcccttgatcggtgcaaaatgcagatcttcatctgcccagctgctggtatcacccttttccagaccatcctgtgaacgctgatcctgctcatatgccaacaggaagcgatatgctgacagctcatttgcctccagcacgatcttttccttgtaattgtcattggtaaaaatctgaaacttcacagaaccattttccaattcttcccgctgtggaatctccggcaaaagttccagcaaagtcaatagactccagccttttgcagtgacacggcgctgaccgccctgtccgtggttcatgttatggttgtaatactcataggtttcacagctttccaggtcaccaaaatcatgtaacagttcccgcaaagaatagtcatggcaagccacagtctgtccctgttttacgacctgaatataaaattcactctcgtccgcgcgtgtgcccggaacacgaatctgttttccaactttccgttcctttaactcacctgcaatgactccggaaaactctgtacaaatattctgaccgtcaaaatatccgacctgtttaaacgcctcatctgccagaaacagccagatgtctccggtaatcttgctgatttcctgtcccttcgcatccacagccagtaactgatctattgcctccggtgtacactctgcctgctctgaccaaaactcccgatgcagtctgactgcaggtacacggcgtatgctctcgtcctccatctgcacttctgcccagtgcatgatccctgcatgcttgctgtcccactcaaaaaagcggctcagcgaaaaataccggttacagcgcagtccggttccacgaacccagaatccctgctcggcacttcctgccaccagcatccggattcctttggcaaaataatctttgttcttgtcatcaattccctgctgcccgaacataatggtcgggtgcggatagtattttactggtataccatttttgccaaaagaaataaaagcctcccgcggctcctttccttctgcactccgttctaataatcccgggaaaaaataacgtctggatcctaactctgtgaccacagattcaaatccatccacgctgccaagccggatctcatttacatctgttgctcctgctgcatccagataccgctgcagcggaaatccaaatccttcttcaatatcccggctttccgcatcctcatgattatcatatacagaaaatcgctgacgatctgttttttcctgctgatccaggtcggtacaggtatacagtacatttctttctgcggcgctgccgctgaggaacagtcccacctgttcttcttcggacaaaatcttaatacttttaatattcattcaagtatctccctcttttttatttttcgtccaactataccaagtaaagggcagatcactctgccctttaaaaatcctttatacatatcgcaactatgtattcctatattatacgtttttggtatcttttgcaacccccgaaaatgctttccccttcggttcgatcacaaattccatttttttctttgtcacaggatgtagaaatccgatccggcaggaacacagcgccaccggacaataccgaccgccctgctctggctttccatactttgtgtcacccaccagcggatatcccgcatgtgcaaactgcacacgaatctggtgatgccgcccggtgtgaagccagatatgaaccagtgcctgctgcgcgtcctctaaaacctgttctacctcatagtccagcacagcctcttttgcctgcgaagttcccctggcaacaacggcggatgtatttgtttttccatcccgcagcagccagtcccgaagttctcctttttgtggctccggcacaccggttgtcaccgccagatattctttttccatgctgcgactgctgacctgcgcagacagttttgctgtcgcctgcggcgttttcgcaaacaccatcacgccctccaccggttgatccaggcgatggatcagcccgatatacggttcttccttcttttttgcacgatagttctttaacagacttaccacatctgcctgaccggcacgggcagtctgaaccgccacaccagcttccttgcggcagacgatgattgcctcatcttcatatatgatttccggttgctttattctcatgtatccaatccttataacttaaatctgtagcccacgccccagattgtctcaatgtactgcggttttgcggtattgaactcaattttttcacggatcttcttgatatgaacggttaccgttgcaatgtcaccgatggactccatatcccagatcttggaaaacagctcatccttcgtaaatacatgattcgggttctctgcaaggaatgtcagcagatcaaattcctttgtcgtaaactgcttctcttcgtcatttacccatacacgacgggcagttttatcaatgcggatgccacggatctcaataatgtcatttttctgtacattgcttccgatcaaacgctcataacgcgccagatgtgcttttaccctggcaaccagttcactcggggaaaatggtttagtaatataatcatccgcaccaagtcccagaccacggattttatcaatatcatcctttttcgcggacaccatcaggatcggtgtattttttttctcacggatctttttacagatttcaaaaccatcggttcccggcagcatcagatccagaatgtacatgtcaaattcttcactcagtgcacgctccagaccgctggttccatcattttctatctccacatcaaatccactcagctccagataatctttctccagatctgcaattgcttcttcatcttctacgattaaaatcttactcatttggtacctcctgatattttcgaataacaaagtacatggtcgtacctgtcttttctttacttgtcgcccagatcttgccaccgtgatcttcaatgatcttctttacgatggacagaccgatgccgcttcctccggtggaagaatttctcgaagaatccgtgcgataaaaacggtcaaaaatatacggcagatcccgggcagaaattccttttccgttatcctcgatctcaacctggataaaatcacccacgtccttgatccggacattaatctgtcccttctgcttgtccatatatttgatggcatttgtcacaatattattgatcacgcgcatcaactgttccggatctgcgatgattacaatatcttcatccgcatagttaaaatatgtcagaccaatgcccttggtctccagatccagaccgatctcctcaatgcagtcgttaaagtaatctgccacattaatcttcttaaagttatatggaatgcggttcgtatcaatcttggaatacagcgtcagctcattcagcagacgatccatctcattcgccttattataaatcgtcctgatgtaacgttcctgtttctccggcgtatccgcaacaccgtccaaaataccctcagaatagccttttaccgctgtaattggtgtcttcaggtcatgtgcgatattgctgatcagggcacggttttccttttctgctgccatcttctcttcggtggattccttcagacgcttccgcatctcctcaaagttccggcacagatctcccatctcatcctgttcatcataatcaatggaaaaatccagatttccctctttgatatttttcgtagcgatctgcaatttcttaagcggcaccatcgttccacgatagatccagatcgtcataactccggcagtcaacgccaggatcaacagtaccgataccgcaatatcgatcatcagccgcttgatctccggttgaatactctccgaagatgtaatgatatagacactgcactgatcgttattgcttccctcaaaatctacctgcttcagcaaagactgtgcatcgttatcaatataatatccggaacccgtttccttttcgccttctccatatggtggcaattcctcctgccactgttcatcattgatgacggagtctccgttgtaaccgttatataccagttctccatttcttcggaagatcagataagaactcttttcctgtaatttttcattgatctgttttaaataatcttctgattccagtttttccggatctgactttgccagtttgcagatctcgtcatattctgtcttcgtatatctgctcatcaactgcagggaattagaaagcacgccctgtgtatccactgcttccagaccataatttttctggatcgctttcgtctgaatatggtacagaccaaaaatcgctgcacctgccagaccgaccggcaaaataatgatgatgcagaatgcgacaatcaaacgtgtctttagtttcataggcatctccatttttcttatactgtttttcattataacacgtctgctgttcaatttacattctgcaatcgtaaagtttttataaattacagagaaaagacttattggcagttattcatctcagtctgagttgagactcccacttctgcaagtggtgagtagtaacaagtatttctcagtgggag

SEQ ID NO: 13135 - DNA, 5412 bp, Unknown
  gut microbiota DNA sequence
aaactccaatacatcctcaaatttcatatttccgtcaaagagatccagcgcacttccaatcgtataattcagatgatgctgtccccactctgccagttcttccagattttgaaaacttccgattccgccggcatatgtcaccggaatgcgattccagcttccaagtagttctaccagttcacgctcaatgccggacgctttgccttccacatccaccgcatggatcagaaactcatccgcatactgatacaagcggtccagcaattccacagtcacgcgttcttctgtaaatttctgccagcggtccgttacgatataataagcaccatcctttttgcgacagcttaaatccagtaccagatgttcctttccgactgcctgcaccagtttctccagacgctcataatccacttttccatcccggaacacataagacgtcacgatcacatgactggctcctgcccgcaaaaattcatgggcattttctgccgtaataccgccgcccacctgcagtccgcccgggtaaacctgaagtgctgccagtgcctgtaacttagttgcctcataatgcggggaatcctttccatttaataggataatatgtcctccacggattccataagactgatacaattttgcataaaagggtgcatcctgctccgacacaaaattttctgccgccagatctccctgatccttcagcgtaccacctacgatctgttttacctttccattatgaatgtcaatacatggtcgaaattccatacaactctccttactgtctctctattaattgccatcgggttgcaagtaacaatatctcatttcaagtcgaacgtacgtgagacttggtgcgtgattctggtcagcgtatgctgacatattctcctcagaatcactgcacatcctcgcggagcattttatctcagtcagaaattagactgagataaaaaagaccggttgagaaattaccttattatatttattaactctgcttatttgtgctttggttgtttctcctaacattttgcaaagtatacacttaaaatatcacaaactgtaaaaaaaagaaacctttgccgaaaagtcattgacattacaattttaaattactataatattttcaaaattaatttatttatttttagaaatcagaaaaacagcagtgtttttctttttttgctcacaaaacagataagggaggatacaaaatggcaaaaattattggtgaaggtattacttttgatgatgtgctgctcgttccggcatactccgaggtaaccccgaacatggttgatcttacgacaaaactgaccaacaaaatcacactgaacattccgatgatgagtgccggcatggatacagttactgaacaccgcatggcaatcgcaatggcaagacagggcggtatcggtatcatccacaaaaatatgtctatcgaagcacaggctgaggaagtagacaaagtaaaacgttccgaaaacggagttatcacagatccattctccctttccgcagatcacacacttcaggacgctgacgacctgatggcaaaattccgtatttccggtgtgccgatcgtcaaagaagatggtacactgatcggtatcatcacaaaccgtgatcttaaatttgagactgatttttccaaaaaaatcagcgagagcatgaccagtgagggactgatcactgctccggaaggcatcactttagaggaagccaaagcaatccttgcaaaagcaagaaaagagaaacttccgatcgttgacaaagacttcaaattaaaaggtctgatcacaatcaaagatattgaaaaacagattaaatatccgctttctgcaaaagatgagcagggacgtctgctctgtggtgctgctgttggtatcacagcaaatatgatggatcgtatcgatgctctggtaaaagcacatgtagatgttatcgttgtagattccgcacacggacattccttaaacatcttaaatgcagttcacaagatcaaagaagcttatccggatctgcaggttatcgcaggtaacgttgcaacaggcgcagctacaaaagcgctgatcgaagctggcgctgacgctgttaaagtaggtatcggacctggttctatctgtacaacccgtgtcgttgcgggtatcggtgttccacagatcacagctgttatggactgctacgaagttgcaaaagagtacaatattccgatcatcgcagacggtggtatcaaatactccggagatatgacaaaagctctggctgccggtggtagtgtatgtatgatgggttccatgttcgcaggatgtgacgaagctccgggcgctttcgaattatatcagggacgtaaatacaaagtatatcgtggtatgggatctcttgctgctatggaaaatggaagcaaagaccgttacttccagcaggatgctaaaaaactggttccggaaggtgtggaaggacgtgttgcttacaaaggcagcgtagaagatattatcttccagcttgttggtggtatccgcgctggtatgggttactgtggagcttcgacaatcagagatctgactgctaccagtcattttgtaaaaatctctgctgcttcactgaaagagagtcatccgcatgatattcatatcacaaaagaggctccgaactacagtattgaggagtaattaatttccgtatttttataatgtagtctaagaaaggagaagaactcagacgagtgctttgggctaagacgccctgcatcactaatctgagttcttctccttatttcagttttggctatactacaaaagttgctccgccagcttatacctattcgcattttgcagtattctatcaaaaattgatgtgcaaaccttttttcataattttactatttcattctagggtaaaatttttcttagttttattaataactctatttacttttattcaatgtgttttttcgatatttttatctgccactgttattgttttcagttacgcccgtattgttgtctgttccgactgtattttcggtcgtatttccatttgtgccatccttatgatctctgttggtatctgtgtcaccggtgacaccatttttgatcgcctctccggtatcctcaatcgactctttcgcattttctgctgcgtccctcatattttcaccggttgttccataatctgtctgattggtatctgctctgtcattgacgattccgttattgtccgtcacagtattatcatccacgacattattatcgttggttccatttttgtcagtgccgttctctgtgacagaattattgttgctcccatcgttcatatccgtattcttctttccacatgctgcaaaggtcgtcaaactcaatgccagcataagtataaatgcaatctgtctgaattttttcatcttggtatctctccttctcataacttttttcactaatgaaaatgaatcgttgattttctgtcagcaactatcagcaaacgatcatcaagcatattcatttctgtatcgttaatatggttcattttgtattttttatacctgtctgataaaaatactctacgttttcttcattccccctcattgtttttgtgcgcatagcaataaccatagccttcaaatcgaatgcatgtgaaacttggtacgtgattctgttcaacgtatgctgacatattcttctctttgaatttattgaaaatctattttgagctattatttccgcatcttggaattaaatatcagagatgccagatagccgaaaattaatgccgctgatacacctaccgcacaggcagtaaatccaccggtaaaaagccccagaaaaccactttcatcaacggcagttttcatccccttccaaagcgtatttccaaagccaagcaacggcacatttgctcctgctcccgcaaattcagaaaaaggttcataaattcctactgctcctaataccgctcctgagcagacaagaagcaccatgacacgccccggaagtaattttgttttttccagtaaaatctgcaccaacgcacagatcagtccacctatccaaaaggcattgacataatccatcattacacttccctccattttataacttttacgtttcatttttgctttatatatttttttactctaaataatgtgtatcacttgcgtttcgcaaaatacttcacatttatccataccacttaacataatcaccaaatatcatttttctgcacttcattctttcgaatttttttaacgattttctagtacttctaatactactgcatgtgcaattcccggcacgttttcaccctcattaaaactgattttggacagcagggcacctgtcggcacaaacagtacacgttttaattccccgcgccgcatcatcggcaaaaaatgtgcactcatagttactgccgcacatccgcagccacttcctccacttccggttccctgccgctcattatcaaaaatctccagcccacaatctgtatggcagctttcgatatcaatatttttctgctgtaacagttcaatcaggatttcccgtccaaccgcccccagatcaccggtaatgatcttgtcataataagacgggcttctggaaaaatcctccaaatgtgctgcaatacaagctgctgccgccggtgccatagcagctcccatgttcatggaatcacgcacgccataatctacgattttgcccggtgtgatgccggtgatgcagacatcacaacacgcttcccccttgcattctttttgctgtactccttgtgtttttgtacactcttctttttctagtccgcttttacatctattttctgttttatacctgtctctaccaagtacaaaggcaccggctcccgtaaccgtccaggtagtacataagggcctttgattggcatattccaagggaaaccgaaactgtttctccgcactggcaaaatgactggatgtgaccgctcctgccagattcgcatatccggcagacacggtcattgccgccagagccagcgattctcccgctgttgagcaggcaccgtacaatccaaataatggcagatcaaattgctgtaagccaaaagatgttgccatggactgtccaagcagatcccccgcaaacagatagcgaagttcctctgctttcaatcgcgcttttcctaatgcaattgtcaatgcctctttttgcagtgtgctttccgcttcttcccagatgtcacatccaaaattgtcatcttctcccaccaggtcaatttcatgcccgatcggtccttctgcttccttagttcctgccacgcagccgctgctgataatccagggtggtttttcaaaagtgatgctttgttttcctgtctgtgttgtcatcgcattattctcctcacacatattctcatgcaaagtatctgtaaataatcaaaaaaaat

SEQ ID NO: 13136 - DNA, 3084 bp, Unknown
  gut microbiota DNA sequence
ttcttattattaaaaatccggatggctttttcttttttaactacatatttgtatgttcatatttttcaacattgtttttgatctggtcaatgatctgatgcacttcctgatcttcatttttaaatttactgctgaacatgaacacttttcgtggactgtttttcttacataaccaataatctctgccagccaaaacagatctttccgttgtcacttcaacaaaatatccctgttgataatgatatcttgcaattacttcaatacccttttccataaaattcaccctctgttgataattatttttttatgaattggttgtgtgagttatcaacaacaacatgctcaagtataacagaaaaaaagtttaagttaagtattgaagttttttttcttgttgttctcattgatatagaaataaaagattggttttgatgtaagtgaaaaaattttttgtttatcaacgacaccgttgttgataatattctattctttttatttatttgtaaacaacatacttatattctttatattatatccacaaaaaatgtcgaaaaacgttgattttacgggattcttgaaaataaagtacggacatttacaggctaaatgacggtggctggttggaaaagatgcgaatatacgtaggtgaagaagcggacaaatgtgggatgcccggaaaatcgaagaaaaagcgggctattggcgaagaaaaaggcagaaatgggcaaagaaaaaggcagatattggtcccagatttgtccgttaaaagaaaaattgagccttatttttggccatttttgctattttacggacatttatgggcaataatttgtgaactaacggcaattttgaggagaattgaattgttttacaattgttttttggaaagaaacggacagatatgggattaaaaaactggaactaacggacagatttaggatgctttttggttaattaacggacaaatgtaggacttttcgggggatttttgtggaagaaacggacaaatttgggatcaatgagtggaactaacggcatttttgaggcaaacaaatgttttaacggacatttataggatgtttagttttaagagatatctacatattgtgccgtaagtttggaaataatacttttttaacggacaaatttaggatagtagtttgggaactaacagacaaatgtgggataccccttgaagaaacggacatttataggatgtaaaaaaataagaataagacatttgtgggttcgaacggatgtttttaacggacatttgtaggaccccatcgaaagaaacggacaaatatgggatgccaaaatacaagatatggacatttctgggtgaaaaaatggatatttagtggacaaatgtaggatgctaaaaattttttagcggacatttctgggatattgtggtgaaataacggacgtttatgggatggatttaaatcttttaacggacatttttgggtgttgataactttttcaaaaaagtctgacagttttttcgttgacaaattgaggatttaaaggcataattaaggaagtaaattagaacggaaaatagttagtttatctggtgcatttttgcatcagatcgttttgagggatacaaaagagagaatataaaaaggaattttatcactaatggcaaagaatgagatagcgaaatcggataaaacgatgttcccggacatgttaaagaaaagtaattttctgatttcctccgtatacagagcatcgcttttagagaacaaagtgctggcactggcattgacaaaagtgcgtttgagtgatcaggggcgtccggtggcgacactccgtacgaaagaaattaaagaagttttacatgtaaccggaaatgcaatgggtacatatctgaaagacgttgctacttctctggcaggtcgaaccatgttcatcgaatctgcagatggaagttttaaatgtatgagtctggtcggtgtggtaagttatgaatccggttccggtacgatggaaattaagtttgagcctgagatcaaagattatatttatgatctgaaggctaattttaccatgttaaatattcctatgatgttgtcatttcgttccggatggtcataccgtctgtacgaactgctttcttcgcgcgcctatcatacgaaatatgataaggaaacaggcaatgttttccatataaaatatggtgtttcggagatcaagctgcatcttggaaccgttcagatcaaagatgataaaggcaagatcaaccgtgatattcagcgtgaattggagaaaaaagagatcgattatgactatattgtcaacgaattagtgcatgaaaagctgaaatcctttgataaatggtgtgatttcaagcgtcgtgttctggatgttgcggtcaatgagatcaatgagaagtctgatatttctgtaaaatatgatctgatgcgaagcggtcgtggcggaaaaatctatggaattgattttgaagtaacgaagaaagatatgacggtggaaccgacactggaagaagaagttccgacaccagcagatgcagaactggatgatctgatcgataaagtcatggatattattgatgaaaagatcaagatttctcaagcgaaagcattattaaaagtagcaaattatgatattaataagattgaatatgcgtatgaactggcatgtaagcaggaaaatatcaaaaatctgatcggctggctgactgctgcgattcagaatggatatgaagatgcgccgattcataaagtaaagggatattctcaggaacagacagaagaattcgatgaatatatggaacagatgcgtctggaacattatgcaaaggcagattctacgaaataattttatggattttgtaaaaaataatggtgtaaataaagtcaataataagaaaatgtgatgtatagaaatgtacatcacatttttttgtacaaaaattgggtcccataaatgtccgtaagttcgcccatagatggcgtgagtaaaaaatatagcctataaatgtccgcaagtttgcctatatatgtcgtacataaaaaatagatcccataaatgtctgttagtttacccatagat

SEQ ID NO: 13137 - DNA, 4237 bp, Unknown
  gut microbiota DNA sequence
agcctataaatgtccgttagtttgcctatagacggcgtgcatgaaaaacatagcctataaatgtccgctagtttgcctatatatatcgtgcataaagaatataacctataaatgtccgttagtttacccatgggtggcgtttataaaatatagcctataaatgtccgctagttcgcctatagagcgcgtgtataaagaaatagcccataaatgtccgttagtttacctataggtggcgtgtataaggatatagcccataaatgtctgctagttttcctataaatgtcttgcataaatatacatcccataaatatccgtaaatttacctataaatgtccgttaaaaaagacagaagaatgaaatcttctgcctttttatgagcttaatcctgtagcaatgcaagtaattcttctctggaaaatgccggatttttggttgtctctccaccaagaatctgatctgccagctgtgctttcttttcctgcagtctcagaattttttcttcaatggtattctgtgcgatcaggcggtacacaagaactttatttttctgaccaatacgatgtgcacggtcggttgcctggttctgtaccgcggtgttccaccatggatcgtaatggatcacgatatctgctgctgtcaggtttagtccggttccgccggctttcagggaaatcagaaataccggtgtttcatcctgattgaaggcggttacaagctgcatacgctcctgttttggcgtggagcctttcagtacatagtatggaatattttcctggtttaaacgctctgcaatgccatccagcatggtagtgaactgggaaaatatcagtattttatgtccgccggagattgcattctgaacaagttccagacacagatccagtttggcagaacctgcctgataattttcatataatagtgccggatcacagcaaagctgccgcagtttggtcagttccgcaagaatttcaattttggactgattaaattcttcctgagactgtttggataacaatacctccaaacgctggacatgtgcccggtaaaggtcttcctgctctcctgttaacggcgtaaacatgtttttctccagtttttcaggaagatcttttaatacatcctttttcagacggcgcagtacaaatggtgcaatcagtttctgcaaacgttccagtgcatcgggattgccaatctgaacaatcggaatctcaaaggtgacatggaaccgtttgtaggaataaaggtatccgggcatcagatagtcaaaaatactccacaattcgcccagatgattttctaccggtgtaccggtcagggcaatgcgaaaatcggaagaaatctgtttgactgcttttgcagctttcgtggtggcatttttgataaactgtgcttcatcaatgatctggtaggcgaaggtcagctgctgatacaactcagtatcccggcggagcagatcataggatgtgatgaaaatggaacctttttggtggtgtgtaagtacggattttcgttcttctacgtttccggctacggtataaacggtcagttccggtgcaaaatggtggatttcccgttcccagttgtatacaagggatgcagggcagacaatcagtgtatttttgtgtgtttcctgccgttcaatgtaatgggcgtagagaaatacaatcacctgaagggtttttccaagtcccatatcatcagcaagaattccaccaaaaccgttctggcaaagggtttccagccagagataaccggttttctggtattcgcgcaatactttctggaatttttccggaacttcaaaatcactgtcttccactgttttcatatttcggatcagttcgcggaagctttttcctttttgtacggacagaaaacttccctgccgtagctgttcgtccagataaggggcacggaattttggcagggtgatatcaccggaagccagttcctcataagtgagcatcagtccttcctgtaactgagccagagtatccagatctgtgtcctctacagggaaaaattcaccggattttaagcggtaaaacttctttttgcggtcgtatttggacaaaatgtatgccagttcgtccagatcaatgctgtctgattcaatctgaaaattcagaagatcttctttcatcgtgataccgatggatattttcggcggctgaattacccggatttttttcaaacgatcagagataaagacttcagcaacttcttcaaaggctcccagtcctttggtcagaagttcgaacatgcagttttcatcactggaagctactggattgccggttcgatcatcgatggcattacaataactggagatgagtgcagcaacttttgcttcttcccgcatatttcgattactgtctttttgacgattactgccgtcaaaaacatggtaaacctggtcatttccgtagtctgccaccagatcgcaggtgatcagattctgttgtggaagatccagatatacacggaaagcagcttcatctggaaggtatttttccggaacatagccaattttctgaatctgatacacggattccagttctggaagaaaatcacgggtaaataccggtagatcgtcattagcgataaaacagtttccgtcccagcgaatagtcatatttttctcaaatgtatttagtgcggttgaatttcgacggctgatccggtagattttctgatcgaaaaatacatattgccagtcgtgactgtaaatgaccggtggttgttccaacgtcagttcaattccatcttctacggatgaaatctgcagagatttccgatagggttcgtctaccggataccacagtttggaggattttgtataaggtgccagatagattcctgtggtgcgcacaacgtccataaaggaatccagcgtctcatgccgaagaaaatattctctggaacttgtgaagttataccatgcgtcactgtcttcaaactggcgcataaaatactccatgagcggtcggctttccgcatcaaaggcttccaactgatgggtaaatccgaattgttttccataagcaaaccactgtccggtctgtacgcgattcaccagagctgcaatatctttgactacatacattttgttttcgccgattctcagggaaacacatggatatcttgtgtctgtatgtaaaattgcttccagatgaattttgcctgcgatggaaccggaggtaagaagccagttttcctgctctcccatccgacgtaaaagctgtgccattccataatctgtagaacgggcactggtattgtcctcagggagttcaaccaggggaatacgtgaaaaggtatgttttggctcatctggcgtgaaatcatcgtcaatcgtaagtaatgattttttgggcttatggatatagtgaagcaatgtggcaacacagtgtttgcacaggtctttttcttcgcggaaataatcacagggacaataatagtcaaaacgatcttcttccatgtcgtcatcgtagtacatggtcacttctacagagtaggaatgctcatttttgtcccgaacttctgcaacgatatccaactgaagatcaccatattcggatgtggatttataagtttcaaaagaatatacgccgccggtcagctcaatcagtcttccctgataaaaaagctgaggatccagcatcgtttgtaaatcacgttctgtccacatagattcagagctccttctttctttggtaataagtttgataactatattttgcattaaaaagataaaaatagatatatcaaatgagagatgtttcccaccgctataggtgggagcaacaatgccgggatcattcttgaacctggtatcaaaaatatagttatcagttgtaagaaaataataaatcagatgttatcattatacattaggaatctatgatggcacaagtgaaaaccgtgataaaatcgaaaaaatgttcgattacatttgcttaaaaataaaaacattacagataaatgcctttcatggcccggtaagttgctgccagtgcttcggaaaacggtgtgtaagtcagactgagttcatcggtaagtttggaaccgtcgaataattcactttctgcttctgttaatgggaaaggaaatggaattcgggcagtcagtgagcgggcaacggtcacattctgttcggtaaaatccacatcactggcgttgtgcagttcatcaagaaatgtccggtaggtgagaacttccggtgcgcttaaat

SEQ ID NO: 13138 - DNA, 2078 bp, Unknown
  gut microbiota DNA sequence
cccccccccgatagacttcgtcaggtatatctgactgtatatccttcagacactcaatcagtatcggattaaaattaccacactctccattcaggatcatctccattgtcttttcatgggaataaccttccttgtatacacgtttgctcacaagcgcatcgtacacatctgccagggaaaccacctgagcagcaatcggaatctcctctcccttcagaccatccggatatcctttgccgtcatagcgttcatgatgccagcgacagatcgaatatgccattttcaccaacggttcctcctgataccattccagatcttccagaatggacgcaccaatcagcgtatgtgtcttcatgatctcaaattcttccgcagtcagtttgcctcttttattcaaaattttatcgtcgataccgatttttccaatatcatgcagcgacgatgccatcacaatgatatcctgctctaaccaggaaatatgatacttatcggtcacttgccgcaaacgctccaacaacatttttaccagcacattgatatgctgtacatgtagaccactctctccattacgaaactctacgatatggctcaaaattgccaccatgatcttgcggctctgctccttcgccttgatctgttctgtcaggatcgtggtcagacggcgctgttttgcatataatttaatggtattgtatacacgtcggataactacattggcatcaaacggtcgattgataaagtcagaaacgcccatgtcataggcttttctgatatatgctgcagaattttcactggagatcataataaccggtgtatcttcgatccatttttggtggttcatctgctctaacaccgcaaagccgtccattcccggcatgacaatatccagcagcaacagagaaatatctctgccatactgtttcatcatatcgatacacagctccccgctttctgcttccagaatttcaaaatcgtcatgcaacatttcatagagaatcgcacggttcatttccgaatcgtccacaatcagaattttctgctttgtactgtcactgtaatgcttcttccagtccgcgggatgacgatctctatcccactcagtcacaatggaatttttctgtttctttgcaatgtacatcaccttatctgcccgggacattgctttttccacggtctgttttcttgcaatcacagcaccgatactgacggacagaaagacacctctgctgtccggaatctgtatcatatgaatctgatactgaatttcttccaattttttctcaaaatcttcttctgagacatttggcatgaccagtaaaaattcatctccgccgtaacgaatcagcgcatccgtcttacgaatcagacccataatagtgtaagaaaccagatgaagcaaacgatcacccaggtcatgtccgtatgtgtcgttgctcactttaaaatcatccagatccaacatggcaatgccggcattgacaaccttatttcgcacacaatcttcaaaataccgtcgattgtaagcacccgaaagcgcatcaatatacagcttgtcaaacagagaatccttgacatttccggacaggtcgattccttcccgttcaatgatccgttcttcctccacctgatgcgccatctccattacatatggtttgccgtcaatttccacataccgggcaacgatctcatacagatcacttccgatatattccagcttggttttctgagtttttcccgcaagcaccttagctgcgatacatccgtgttcactgcgcgcctgttctgagcaggatttgcattgacacatctgcgtcagtttttcttcctctgactcaattgcctcgttgctgccaacttcctctgcactcagcagacgtacttcttcaaatatttttctgaacaggtcaatttctgcctgtgcctgctcccaagtcatactcataccctttatcatagcactcctttaattattcctgactttattgataagatatagcattttatccaaattcaagaatgctccggcattcttgttgcgaggtgcgcgtcatgcaattgcatgacatacttcaactgcg

SEQ ID NO: 13139 - DNA, 4831 bp, Unknown
  gut microbiota DNA sequence
gatcgcatcccgctcaatctccatgctggatctgacgattccatccggtgtgatgatccattctgcatcaatctccaggaaacgctgccggaagatgggagccatggaagaggttgtgtgcagtttcagggaaccatcttcctgtgcttctacagttgtattataagctcgctgtgtcattttatcataacctgcttcataccacagtctcttaaccacgcggtcattgtctgtcggagcacgccagatattcatctccatcggacgttttaagaagctgtgatttttgtagatcatgctgtcaaacataccggtgagtttgttgtatacatagacaaaatcagcaccgttgatcgtaatgacacgatcgttttctgtataagtaatagcagaagcagtgccatttgcagcgcaagagcaggagtctgcagatgctttttccgcatccagcagagcggttaatgcatcggtgcagttttcattcaacatgatctggtcaaaaccaagtttgaaaccggccggtgtaaacggtttctcatgcagctgatgagaactgatgatgacagagcaggcaccgttttctaatggcttaattggcagctgaaccgtcttcttgcttcttggagcaacatctaacagctcagtatctctgatctcaccggaagcaactgccataccattttgcagaatttcataggtcagatataattcttcttttaagtttgtaaaatcaagattgttctgcaggatgtaagtaccggaagcagcatcctccagatgtacacgaaccggacgatgcacatttttatattcttttaaaccggtgctcggtgtacggtccgggtaaacaagtccgtccatgcagaagttgccatcatgtggatattcgccggaatcaccaccgtagtagaatttcctgcggccatcgtctgtggttcccatgtaaacaccgtgatcacaccattcccagacaaaaccgcccacgaaagtgtcatattgttcctctaactgatagtagtcctcgatgtctccaggtccatttcccatagcatgaataaactcgcactgaataaacggtttgtccgggttattgtccagataggcatgcatttccgggattgcagcgtacatgcggctgcgcagatcaatattggagaaatctgtttttccacgtttcggattgcgcggatggtgcattgagctctcataatgtgtcagtctggtcggatcataagattttgtccaggcaagggcatcttcaaaggtgcagccgtaaccggcctcatttcccatggaccagatcacaacgctggtgcggttcttatcacgcatcacatttttctgaacacggtctacaacgctgtctgtccagtcttcgttgtcagataaaaacggtgggaacgggtttttctttccttctttccagatattcaggttgtacaggtttacaacaccgtggatctctatatcggattcgtcgatgacatagaaaccatactcatcacacagctcataaaattccggcgcattcggataatggctggtgcggatggcgttgaaattatgctgtttcatcaggctcatatctttgcggatatgatctaaggtaacggcagaacccacataaggatcactgtcatgacggtttgttccgcggaaacgaactttctgaccattcaggtatacaatggaatctttgatgctgatttcacggaaaccgatgcgttggcgaatcgtttcaccatcggtggaaagagtcagtgtatacagatacggatgttctgcattccacagggtgagatcggaagcagaaaatgtaatgctgtctccttcagaaacaccttctgcaacaacgcagccgcaggcagtggtcagtttgtaagaaaccggaatggattctttggcaaacgtcagcggaattgttacgtctgcagcagtataattgttttttaactgcattttgataaagaaatcacggacatagttttccggtcttgcaagcacatagacatcgcggaaaataccggaattacggaacttgtcctgatcttccaggtaactgccgtcacaccatttcagaacgagaacggcaagtgtgttttcgccttcacgcagagcgttcgtaatatcaaattcaccggtggaatgagaaacctgatgatatccgataaaggtgccgtttaaccatacataatagcaggagtccacaccttcaaaattcagatggtaagttgaggttccttcgggctttttgtatgtaaagctgcggacataagcaccacatggattttcgtgtggtacatatggcggatcaaacgggaacggatagcgcgtatttgtatactgatgaatatcatagccgtgatcctgccagtttgatggaaccggaagtgtgtcgaaatgacgggtatcataaccctcctcgtaaaaagcttcctgacaatcataaatgctgtcaaaataccggaagctccagtcgccgtttaataagaagaaacgatcagtttcctgacggcacttccagtccggattctgcgcggtagatgtcggaatgtaataagcacgcatcggctcatcgttgacaccaaaggtatgattgtcttcaaaatactttggaataatcatgtaaaaaccctcctcatgaaaatgattttttccttgaaataatgagtaaaaaacttaatactcatatggatttattatataaaaaagcggactacatagcaaggtatgcagtccgttcttaataattatttcactgtttacacacactatttgaaaaacatctttttacagaattttcacagcgtggatattattttttgtatttagcttcacagtatttgcagcggtatacttcgtgctccggatcggtcagaaggaagatctgatccagttcctgctcgatggaagtgatacaacgcgggtttttgcatttgatgacattggtaacggatgtcggaagttttaatgcacgtttttccacaatgcgctcatctttgatgatgtttactgtgatgttgtgatcgataaaaccaagaatatccaggtctaagttgtcgatgttgcattctactttcaggatatcttttttgcccattttgttgctttttgcatttttgatgatagcaacacagcaatccagctcatccagcttcagatcatgatagatggaaaggctcatgcctgctttgatatggtctaatacaaaaccttctttgattgcacctacgtttaacattgcttatacctccactcctaataatgtaagaatcagggccatacgaacgtaaacgccgtactgagcctgtttgaaatatactgctctcggatcatcatctacttcggtagaaatctcattgacacgtggcagcggatggagtaccagcatatcttccggagccagttccatttttgttttgtctaaaatgtagaaatctttcatgcggatgtaatcttcctcattgaagaaacgctctttctgtacacgagtcatgtaaaggatatccagttccggcagagcttcttccagacgaaccacctctttgaaaggaacattgttttgggcaagtacatcttcacgaatatagcttggaacacgcagttcttccggagagatcagcacaaattttacattagggtaacgaatcagagcatgaatcagtgagtgaacagtacgtccaaatttcaggtcaccacataaaccaatggtcagattgtcgagatgacctttgagactgtgaatagtaagaagatcggtaagtgtctgtgtcggatgctgatgtccgccatcacctgcattaatgacaggaattgtggatttttcggaggcaactaacggagcaccttccttcgggtgacgcattgcacagatatcagcataactggagatgacacggatagtatcggaaacactttctcctttggcagcggaagaactgtcagcactggaaaaaccaagcacggatccgccaagatttaacatagccgcttcaaaactgagtcgggttctggtacttggctcatagaagcaggtagcaagcttcttgccggcacatgcatgtgcatatttttccggattcttttcaatatcgttcgcgagattgagcaatttatctgtttcttccacggataaatctaacgggctcattaaatgtctcataggtctcctccttgattgtatatagtttcacagtttacctattacatatgagaaagcttcttggaagatgttcttcgggaagccttctgcaatccggaaaatccgttgatgacgatcctgcgtgcatcaggagttatccggatacattgtgatgggacaactgcattgtttatcttaaatatcatatactatgaagttgcaaaattcaataggtagttggcattcctgatgtagaaatttgaccattcagtcagtgcttttgtgcgaaaattcagacattgttcagagtatggaaaaatgacagaaacgtggagacgatgactgcggaagtaagttgcctgagacacagaacagagcgaagtttcatatcttaaatacaacggtaaatcaggggttgaggctggtatgcggcagacggaaaaattgttgcaggggcttaaatggcgatgtatccggggagagctgccccgggaagtgacgcaggtggcatatgacagcagaaaagtagagccgggagcattgtttgtctgcattcagggaagcaggcaggatgggcatgcgtttatccgggaggcggtggaacggggagcggcggcgatcctgacggagaaagatgtgatagatgaagaacagataaatcaaattaataatttaagaaaagttaataac

SEQ ID NO: 13140 - DNA, 14299 bp, Unknown
  gut microbiota DNA sequence
tctgtgtgttggaaactaaggataccagagctgcgttggcttctatttcacgtcaatggtttgataatccacaggaaaatttaaaaatcatcggtgttacgggaacaaaaggcaagacttccactgcctggatgatctggaaaatgttcaccgcagctggtcagaagagtggtctgatcggaaccattgaagtctgctatgacacctggcagcagaagatccacaacaccacaccggaatcgtatgaattgtatgaaatattgcgaaaaatggtggatcagggctgtcagtacgttgtcatggaagtttcgtctcaggcgctgaaactgcaccgggtagatggaattatgtttgaggcggcagtgtttaccaatctgcgggaagaccatatcggagcaggggagcatgccgattttgcagaatatatggcatgtaagcatcggttgttctgtcagtgccgaattggaatttttaatcaggatgatccatactggcaggaaatgtggcgcggcagcagctgtgagaaggtacttacctatggattttccagacaggcagattactgtgcagaccgggtacagcttttgcggggaagcgaccgtctgggtgtgcagtatcatctgaacagatatcggatcggaaaaaatcagggagaaatggaagctgcttcggaaaacagctggaatgtggtggtaaatgctccgggcaagttttctatatacaattcgctggcagcgatttctgtggcggaacagtatcagataccggaggaagcaattgaaaaagcactgcatactctgcaggtgccgggacgcatcgaaatgcttccggtatcgccacgttttatcgtcatcgtggattatgcgcacaatgccatggcactggatgcgttgctgaggacgctgcgggattatcacccggggcggattatttgtattttcggctgtggcggaaaccgggcggcagaacgcagattccagatgggagaagtggcagggcggctggcagatctggtggtggtgaccacggataatcccagagaggaagatccggaaaaaattgcggatgagatctgtcttgggctggaagcggcaaaaggaaaatacggcaggattccggatcgggagcaggcaatcgcctatggcatttcccatgcaaaacccggagatatcgtggtgattgccggaaagggtcatgagacctatcaggagatcaacggggaaaaatatccgatggatgatcggaaacttgcgatgaagtgtaaggtttggtaagataacagtcagcagagaagagtaaaaaggagcactatggataaaaaaacattgtatgcaaacattattatcgacatttccctggaaaaactggaccgtacgtttcagtatctgattccggaaatgctggcagatcagattcatccgggcacaccggtggaggttccctttggaaatggaaaccgacatatgcgcggctatgtggtggaagtgacagatcagccggaatttgacgtaagccggatgaaatctgtcctgcgggtcgtgcgggaagggattccgatcgaagggcagctgatcgcgcttgccgcctggatacgggaaaatttcggcgggacgatgaatcaggcattgaaaacggtgattccggtaaaacagaagacgacggaaaaggaaaaacggatgatctggcttaagccagacatcacaacggcaaaagcgcagcttggcgaattgcagcgcaagcatcagaccgcgcgtgcgcggctgatggaagcgctgctgaaacagtctccgctcccctatgagacggtgacacagaagctgaatattacagcttctgtgatccgtgccatgcaggagcgggagctgatccgtgtggaacacatccgaaactggcgcaatccgctggatcagatgaaaaagcagggaaacattgtttccctgaatctgacgcagcggcgcgttgcggatgaaattttggcaggatggcagcgggacgatgaacgcccgtgcctgatccatggcgtcaccggcagcggaaagacagaagtctatatggaaatcattgagcaggtagtaaaatccggaaaacaggcgatcgtcctgatcccggagatcgcgctgacttttcagactgtacttcgtttttacaaccatttcggtgaccgggtatccatcctgaactcccgcatgtcagcgggagagcgctccgatcagtttgaacgggcaaaaagcgggcttttggacgtgatgatcggtccgcgatctgcgctgttcacaccttttccaaatttgggtgttatcatcattgatgaggaacacgaagcggcatacaaaagtgagaccgtgccacggtatcatgccagagagacggcaattgcacgggcgcagatgtgcggcgcaagagtggtgcttggctctgccactccttcggtggagagttacgaccgggcaaagcaggggcagtatcgtttgttcgagatgaaagaacgtgtcagcgcccgcccgctgccgagtgtatacacggtggatctgcgggaagaattaagaaacggaaaccgttccattttcagtgataaactgcgggagctgatcatggatcgtctggagaaaaaagaacagatcatgctctttatcaaccgccgcggtgtggcaggttttgtctcctgccgttcctgtggagaagtcattaaatgcccgcattgtgatgtgtcgctgaacctgcacaacaacggaaagttagtttgccattactgtggatatgagcagccgatggtgaaagagtgcccgtcctgcggttctccttatattggaggcttcaaggcaggaacccagaagatcgaagaaatggtgaaacggcagtttccaacggcgcgggtacttcgcatggatctggacaccacccgtaaaaaaggcggttatgaagaaattttatctgcatttgcaaacggcgaggcagatattttgatcggaacccagatgatcgtgaagggacatgattttccaaatgtcacgctggttggtgtgctggcagcagatttatcactccatatcagcgattaccgtgcggcagagcggacgttccagctactgacacaggcagcgggcagagccggacgcggacaccggcagggcgaggtcgtgatccagacgtatcagccggaacattacagcgttgtgacagctgccgagcaggattacgaagcattttttgaacaggaaatattcttaagagagatgatgcattatccgccaaaatggcatatgctggtgattcatgcggcaggtgcacaggaaatgctggtcaaacaggcacaggatgtgttaaaatataagatgctgactcagtcagataacgaaaaaagcagtctgcaggttattggtccggcagatgcggcagtttccaaagtcaatgatatttatcggaaaatgctgtatgccaaagctgcggattatcagaagctggtcagcatcaaaaatatgctggaagaatatattcgtatcgatccggcatttcgcaatgtaaatattcagtttgattttgatccgatgaatggattttaacaaatggaaaaatgaaaaggcaaacagaaaaatacagtggacagaatacgaaaaccggtgaaaaaaccgggaaaatctgaaactgaaaaaagaggaaacgaggagacaaaaatggcacttagaacaatcagaattatgggcgatgaagttttgacaaaagtatgtcgtgaggtgaaaaaagtaaccccgcgtatttcagagctgatcgacgatatgctggagactatgtatgacgcatgcggcgtgggtcttgcagcaccgcaggtcggcgtactgcgaagaatcgtagtaatcgatgtaggagagggaccgatcgttatgatcaacccggagatccttgagaccgccggcagccagaccggtgacgagggatgcttaagccttccgggcagagccggtcaggtgacacgcccgaactatgtaaaagcaaaagcatacgatgaaaatttggaaccgtacgagatcgagggtgaaggacttcttgcgcgtgcaatctgccatgagctggatcatctggatggacatatgtatgtggaaaaagtagagggcgaactccacgacgtacagtatgcggatccggaagatgaggaagactgggaagaaatcgacgaagagtaatctttacaggtcaggaggaatcaaaaagatgcgagtaatctttatgggaaccccggatttttctgtgggtacattaaaagcgttaatcgaagcaggacatgaagtagtcctggcagttacacagccggacaagccaaagggcagaggcaaggcaatgcagtttccaccggtaaaagaagctgccgttgagcttggcatcgaagtatatcagccgcgccgtgtccgggagccggaatgtgtggaatatttaagaaaatacaacgcagatatcatcgtagtagtagcgtttggtcagattttgccaaaagaaatcctggaaatgccaaaatacggctgcgtgaacgtacatgcgtctctgctgccaaaatacagaggtgcagcgccgatccagtgggcagtcatcaacggagataaagtatccggtgtgacaaccatgcgcatggatgagggactggataccggtgacatgatcatgaaagaagaagttgttctggacgaaaaagaaaccggcggaagcctgtttgaccgtctgagcgaagttggtgcagatctgtgtgtccgtactttgacagctattgaaaatggaacagctacttatacaaaacaggatcatgaggcagcgacaaaaacaaccctgatcaaaaagcagtttggcatcattgactggacaaaaccggcaaaagagattgaatgtctgatccgaggtttaaatccgtggccgagtgcatatacttatctccatggaaagactttgaaaatctgggcagcatctgtaaaagacgaaacttcggaacatgcaccgggagaactggcagttgtgacaaaacacgaagtcggtgtgcagaccggagacggtatcctgatgctggaagaagtacagttagagggtaaaaaacgaatgaccgcagatgcatttttgcgtggaaatgccttgagcgacggaatgaaactgggaactgaaaattaagcagaaagaagtgactactatgccttatagatattatggattttactggatggactatacttatattcttgtagttatcggagcaattatctgtctgatcgcatcggcacgaatgaacagtacctttaaccgttatcagcgggtgcgcagcatgtcgggaatgaccggtgccatggcagccgagcgaattttacgggatgcgggcatccatgacgtgcaggtacagcatatttccggaaacctgacggatcattacaatccgatgaataagaccttgagtctttcagacagtgtatacaattccacttccattgcggcggtcggtgtggccgcccatgagtgcgggcatgcgattcagcatgcaaaaggatatgttccgctgcgtgtgcgtggtgcctttgtgccggtggcaaatattggttccaacctggcatggccactgatcattattggtctgtttatccgcggttccatgagtacggtgctgattcaggcaggaattattatgttttccctggcggtattgtttcagctgatcacactgccggtagagtttaacgcttctcaccgtgcgatgcagcagttggagcgcaccggtattttaggcggaaatgaactgcgggatacgagaaaagtcctgactgcggcagctatgacttatgtggcaagtgcggcatctatgatcctgcagcttctgcggttgatcatcttatttggaggacgacgcagagatgaagatgattaataatagaaacgacaatgtcaatacgagaaatctggtggtggatatcctgttagctgtgaccagagatggagaattttcccatatcgccatccgcgatgtgctggataaataccgttatctgccaaaacaggatcgtgcctttatcacccgcttatcacagggaaccttagagcgcatgatcgagctggatgccatcatcaaccagttttccaaaacaaaagtaaaaaaaatgaaaccggtgatcgcagtcattctgcgaagcggtgtgtatcagttaaaatatatggattccgtgccggattccgctgcctgcaatgaggcagtgaaacttacggtaaaacgtggattttccggtctgaaaggatttgtcaacggtgtgatgcgaaacattgcccggaatctggatcagatcaaactgccggatgctgacaaagagccggaaaaatatctgtccgtgcgctattccgttccggaatggatcgttgcccgttttatccgacaatacggaaaagaagcctgtgaaaagagtctggaagcatttttacagccgcatccgacttcggtacaggtagatacggaccgcatttctatggaagaaattacggcatctttgcaggcgcagggaattaccgtcacacaaaacccggagatcaaacgggcattattcctgtccggatacgaagctctggatgaaatcgaagaatttgaaaacggtctgctctatgtacaggacaccgcgtccatgcttgccgtggaaatggcagcaccaaagccgggagataccgtgatcgatgtctgtgcggcaccgggtggcaagagtgtgtacgcagcccgcatgatcggtgaaacgggtcatgtggagtccagagatctgacagaatataaagtcgagatgatcgaggataacattgaacgctgtcagttatcgaatatgacggcaaaagtgtgggatgccactgaatttgatgcatccgcggaagaaaaagccgatgtggttatcgcggatctgccatgttccggacttggtgtgatcggaacgaaaaccgatatcaaatataacgcttctgaggaaaaaattcaggagctggcagcgttacaacaggaaatcctgcaggttgtctgccgttatgtcaaaccggacggtacgttgttatacagtacctgcacgatgacaaaagaagaaaacgaagaaaatgtacataaatttttagagacgcatacagagtttgaactggagcagatgcgtcagtgcttcccttatgagggatgcgatggattctttatggcaaaaatgcatcgtaaataatatcagatgagaggcgaaatctcacatctgatcgcagcaagaatgtcagaagacattcttgaacggagtataatatggaaaaaacagatttgaaatcattgcccatggaccagctggaacagtgggtattagaacacggggaaaagaaattccgtgcgaaacagttatatcagtggatgcacgtaaaactggcagattctgtggagcagatgagcaatcttccggcaaaactgagagaacagatttcggaaaacagcacttttacggtattaaaacaggtgaccatgcaggagtctgccatcgatggaaccagaaaatatctgtttgagctggaagaccacaatatggtagagagcgtgctgatgcgctacaaacacggcaattccgtgtgtatttcctctcaggttgggtgccgtatgggctgccgtttctgtgcgtcaaccttagatggactggtgcgtaacctgacaccggcagagatgttagagcagatttaccggatcagtgcagacaccggagagcgtgtttctaatgtcgttgtcatgggaaccggcgaaccgctggataattatgacaacctgctgacgtttattcggatgctgaccgacgaaaacggattacatatcagccagagaaatattacggtatccacctgtggtctggtgccacggattcgggatctggcaaaagaagaccttcagatcacactggcattgtccctgcatgcttccagtcaggaaaaacgtctggaactgatgccggtggcaaaagcttatgagatccatgaagtggtggatgcgttgcgggattattttgaggaaacaggcagacgtgtcacctttgagtacagtctggtggcaggtgtcaacgacagtgaggaagatgcaaaacaactgtccgaactgatcagaggcatcaattgtcacgtcaatttgatacctgtaaacccgattaaagagcgtgattttgtgcaacctgacggaaaagccgtgcaggaatttaaaaataaacttgaaaaatgcagaataaatgttactattagaagagaaatgggccgtgatatagatggcgcatgtggacagctacgcaaacggtattcagaaaggcaggactcttagaagatgaagataagttctcttacagatattggaacaacgagagaaatgaatcaggactatctctattcctcagaggaagctgtgggaaatctgcccaatctctttctggtagcagatggaatgggcggacataaagcaggagaatttgcatcccgctttgcggtggaagctgttgttgcggccatcagagagaatcaggagaagcgcccggtggcaatcctttcccagagtattcagagagcaaaccgcagactgaaggaatatgcagatgagcatcagcagatgaaaggaatgggaacgaccattgttgctgccgtgatcgatcaggatacgctgattgtggcaaacgtgggagacagtcgcctgtatatcatcggagatacgatcgaacagatcacggaagaccattcgctggttcaggagatggtgcgccttggcaaaatggacgaggaaagtgccagaaatcacccgaataagaacatcattacacgtgccattggcacatcagaagatgtgaagatagatatttttgaacgacaggtccatgcaggagaatacattgtactttgttcggatggactcaccaatatggtagaagacagtgtcatccttgaagtgctgcatggaaccggaagcctggcggacaaaaccgaacggcttgttgaacttgcaaatcaaaacggtggaagagacaatatcactgttactataatagaacctaattcagatgaggtgacagaatgttaaataatggaacatttattgcaaaccgctacgagatcgtaggtcaggtcggaaccggaggcatgtccgatgtatacaaggcgaaggaccatgctctgggcagatatgtagcaattaaagtgctgaagtcagaattcagcgaagatacaaattttgtaagcaaattccgcacagaggcacagtccgctgcggtattagagcatccaaacatcgtaaatatttatgatgtcggaagtgaaaacggcattcattacattgtaatggaatatgtagaaggaattaccttaaagacttatattgagaaaaaaggtcagctgacttataaggaagcgctgagcatcgccatccaggtgggacgtggtattcaggcagcccatgcaaaaaatatcgtgcatcgggatatcaaaccgcagaatatcatcatttccacagatggaaaagtaaaagtaaccgattttggtatcgcaagagcggtatcagaaaataccattcattctgatgtaatgggatcggtacactatgcatctccggagcaggcgcgcaatggctatgtcagcaaccgaagcgatatttattctcttggtatcgttatgtacgagatggtgaccggccgtgttccgttcgacggagacagcaccgttgcagtagcaatccagcatctgcaggatgagatggatccgccaagcaaatacgcaccgaatctgccaatcagtctggaaaaaattatccagaaatgtacgcagaaaagtccggatcgccgctatgattccatggagagtcttctgatcgatctcagaaaagcactgttaaatccgaatgaggatttcgtgacactggttccgttcagtcaggacaaaacccgtgtcctcaccgacgatgaggtcaatgagatcaagaaaaagaccgaggcggtgaaacaggatgagccggaaccagaagaagacgacatgagcgagtacgacgatgacgacgatgatatgagtgagtatgatgaggacgatgatgacgcggaagaaggacgtttcctcaattccaagatggaaaaaatcgttggaatcatgcgaattgtcgttgcaatcattatcgtaatcattgtggtatatattttaggaagcttttttgatgtgttccatttcggatcaaagaaaaataacagtaaaaatgacacccttgtatccgaagatgtcgaggagtctgttgttatgatcgacctgaaaggaaaaacactggacgaagcaaaaacagagctgaaaaaactgggcttaaatgttactgaagcaggaaccgagatttctgattcctatgaaaaaggacagatcattgatcaggatgtagcaaaaggcgagaccgtaaagaccggaacaacgattaaagttactgtttctgccggaagtgaagaagaaaatgccaaagatgtagatgtcccggatgttaccggaaaaacggcagaagcagccatggcaacactggaggacaaaaatctgacagtttccagagaatttgaattcagcaatgatgtgccgtccggtcaggtgatccgtcaggatccgaaagccggtaagactgtaaaagaaggcacaaaagtaactatttacgtcagccagggaacagaatccattaaagttacagatgtaagaggcaaatccgaggcggacgcgaaagcagcactttctgattttgatgtcacaacaactacagaacacagtgatactgttgctgagggcaatgtcatcagtcagagtatttccggtggacagtatgcagaaaaaggtgcttcgattaccatcgtagtcagcagtggtccggagaagatttcctactatattaaatctccggtaaaagcaccgacaaatgtaacggttacatccgctgatatctcgctgtataaagcagaaagcagcgatctgatccagtcctggagcggtatcacctccttcccgtatacggtagaggcacacgacatcgatgttccgaagggaactattgtgatcacatggcattacacggattccaacggcacagagcaaagccaggaacagagccaggatgtaaactttaacaaagagtaacgggttatgaagcagggaaagattgtaaaaggaattgccggattctactacgtatcagtagcaggatccggtatctatgaatgtaaggcaaaaggagccttccgccagcagaaactgaaaccgctggtgggggacaatgtacagatagacattatcaatgaagatgaaaagacaggaaatgtggtagagatacttccacggaaaaatgcgctgatccggccggcagtggcaaatgtcgatcaggcattggtgatctttgcgggaacttcacccaaaccgaatctgaatctgctggatcgatttttactgatgatggagcagcaggaagttccgacactgatctgctttaataaagaagatctggcatcggagactgagattcaggagcttcgggaggcatatgagaccagtggttatccgctgtatttcctgagtgcgaaagaagaagatggcattgcacctttacgggaagcattgcagggaaagacaacaactgttgcaggtccgtcaggtgttggtaaatccaccctgatcaatctgctggcaccggatgttcagatggagaccggagccatcagtgagaagattcagcgtggaaagcataccaccagacattcccagttgatcatgctggatgaagaaacctatatttttgataccccgggtttcagttcactggcatctgattttttcgaaaaagagacactgggaaccttattcccggaatttatggagtatgaacaaaattgccgttttaccggatgcagccatatcggtgagccggattgcggcgtcaaagaggcactggcagaaaggaaaatcagccagagccggtacaataactacgttcagatttacaacgaactgaaagacaaaagaaaatattagtagttattgtattttgatcattttatacgatttcaggcatagaacaaaatgctaatatgataaaaataaggagtatgaaaaaatgaattgtttatcaccttcactgcttgcttctgatttctctatcttaggagaacaggtaaaaatgctggatgaagcaggtgcacagtacgtacacattgatgtaatggatggcagctttgtaccaagtatttctttcggacttccggttatcaaatccatccggaaatgtaccgaccgtatttttgacgtacatctcatgattgatgagccggtgcgctatatcgatgaatttgtagatgcaggcgcagatctgatcacggtacatgcggaggcatgtaagcatctggatcgcaccattcatgcgatcaaagaccgcggcgtgcttgcaggcgttgcattaaatccggcaacaccgctttccgtactggattacattcttccggaatgtgatatggtacttttgatgagtgtaaacccgggatttggcggacagaaatacattccgtatacaacacagaagatccgtgatctcaagcagatgatgaaagagaaaaactgccaggcagatatcgaggtagatggtggtgtttctctgaaaaatgtgcaggaagttctggatgcgggagcgaatattattgtagcgggaactgccgtgttcaaaggagatattcaggagaatgtacggggatttcttgatattatggagaagtagaacataagtaggtgaagaattatgcgttgcctgattataacaggaggaacgattcagactgaatttgcgattaaatatataaaagaaagaacttgggattatgttgtttgtgcagatgcagggatgaagttctgtcatgaagcgggaattatgccgaatctgattttgggtgattttgattctgtagatggggaatcttatgaatatttccagaaggtttgtctggaacggatggagcggtttccgacacataaggatgagacggacacggaacttgcgttgcttcgtgcgattgatgcgggggcggatgcgattactatgatcggtgccaccggaacacgtttggatcatgtgatgggaaatatccagatgctgaaactggcattggatagaaaggtttcctgccagatcgtggatgctcacaaccggatccgcatggtggatcaattcgcagaattaaaaaaaacagatcagtttggaaaatatgtatcattgcttccgtttactccggaagtcagaggaatcactttaaaaggatttgcttatgaagtggaaaattttacactggtcagtggaattgcccgcggagtcagcaatgagctgaaagcggaaacagctaccatttcctgtgaagaaggaatcttgttggtaattgagtccagagattagcaaaattaagaaagtcccctgctataattgcgtgaagcaataagcagggggctttcttatatttagaaggggatatatgtccttctgataagctgcatagcagctattttgctatgagcaaacagcgtaagcgaattgcgaatatccgtttgaactatgtaaatgatgattattcctctgcctggatcaattctacaatatactgaatgcagcgttctaatccaagtacgctggtattgaggatcatacaatggtttttgaaatcaccccatttacggtctgtatagtattcataatgcagccgcctctttttgtccatatcctgattcatattgcgagcttctttttcacttagatcgaaaagtttctgtgtacgcgcaattttctctgcttcatttccacatatgaaaatatgatatgcatccggatcgtctttcagaatataatctgcacaacgtccgatgattacacaggaacctttctgtgccagatctctgattacctgtgtctgagcggcataaacctgatcagacaaagaacttccagtgcggtcgcgtcctacaaacgcataggcaaacagattcttcgatggagcatattcggattgttcctgaatgaaagactctgaatagccggttttttctgcaatctggaaaataatatccttgtcatagtaaggaatattcatgcgttttgccacttcttccccaatgaaatgaccgccgctgccaaattcacgactgatggtaatgatcgttttcttcatataaataccttcttcccatggtgtagtagtattgtttcgtgtccctctccagagaccatatcagatggaattattttatctcagtcgagaagactcccacttctgcaagtggt

SEQ ID NO: 13141 - DNA, 22238 bp, Unknown
  gut microbiota DNA sequence
tggctcccaccactgatactagcttgtttctcaccacctatagaggtgggagtcatctcccatctgatataacttcttctcaaaaatcatccgcttacacaaacgaaatccacacttccattcccgcatacgttcaccctgaatttatttttgggtaacaaaaaagcgggtgatgggaatcgaacccacgtatccagcttggaaggctggtgttctaccattgaactacacccgcatgtacaatattttgttgcgtcatctcatcgacaggtagtatattatcacaatcacatatcgatgtcaacaacttttttatttttcaatgcccagttccggaatcgaaccagagacacgaggattttcagtcctctgctctaccaactgagctaactgggcaattgacttgtttattctatcttacttttttatttctgtcaagctatagttctcccgtatattcacaaaatctaccacttatcaatgagattcctgccaatacatatgcaaacagaaaattattcgtgtcattgcacatgtattgccggaatccatttatatcatagattttgcgttaaccaattccaccttattctagcgattttccgctgattcaaagcatttctgtgcattcaccggttcgccggtctgaacagcatgtacatactgtccatctgccatctgtactcttgcttttacattatcagacatcaacacattgaaaatatgcaggacacgtttcttgatatcttcatcatagatcggtgtcgctacctcaacacgacgtgtcgtatttcttgtcatgaaatctgcagaagcaatatagacatcatcatttccgaagatataaattctggaatgctctaagtaacgacctacgatactccgaaccgtgatattgtctgtaacacccggaacacctgcgatcaggcagcagcttccacgtaccaccagttcaacgtccacacccgcctgcgatgcttccattaatttttcaataatacgtttatctgtcagagaattcatcttggcaccgatgtaagccgcctctccgcgttttgcccgggcaatctggatatccatcttatcaaggatcttgttacgcaggcacttcggtgctaccatcagatattttgtctctttcatcacctgaccaagacacaatttccggaacacttcgttcgattcctcaccaattccctggtgtgctgtcatcaaagagaaatccgtatacaattttgcggtcttctcgttatagtttccggttccgatctgtgtgatataggaaatatgtccctcagtctttttcgtgatcagacataatttcgaatgaactttcagcttatccaatccgtataaaatccggcatcctgcatcttccaggcgtctggaccactcaatgttattttcttcatcaaatcgtgcacgcaactcgaccaaagcaactacttccttgccattttctgccgcattgatcagcgcctcaacgaccttactgtcatttgccacacgatacaacgtcattttaatagaaacaacttccggatcttccgctgcctcattcagcatacgcaaaaacggctgtatactgtcgtatggaaaaaacaggaaacggtctttttcctcaatctgcttcataatactctcagacatattgatatctgccgggagctgtggtgtatatttcggataaaacagctcttttttgtttctcagaagatcgcggatcttggagaagaaagacagatccaacggtgcctccgaatggaagatatgttttttcttcagatccagataaccacacaacgtatccagcacagactcatccatcagacgggtatactccagtttgatcggacataatttacgcctacggctgaccagctgctccataacctgacggaaatcggtatcatcatcgtacatttcctcatccggatcgatgtctgcgtttcggataatacggatcagtgatttacttttgatatgataccggtcaaaaataagcggcatgtaatgaaggatcacttcttcccgcagcataaaacggttctcatgtcccggaatccggatcaggcgtggaaatacgtctacattacatggaacgattccaagcttgtcccgtttctttttctctaatacaacgactgcataaatatctttacttttcaaaaacggaaacggttgtttctttccgatgatctgcggagataataacggacgcacttcatgctcaaaataagcatccataaattccacatcctgtttttccagttctgcataactgcagatctctacgccataagtctccagaccttctttcagattcgcataggctgcatccttacgctgtgtcagcagttttatctgttcaaagatcgcattcagctgctcctgacaggtcatatttgtcttattgtcccgaatgtcctttgacaccagcatctgatcatacagagaaccgacacgaaccatgaaaaattcgtccagattgctctgaaaaatcgatgcaaacgataaccgctcacaaaacgggttcgccagatcttctgcttcctccaatactctggtattaaattttaaccaggataactctcggttgtcataacatgaatgtaccatatgttccccactcctcattgtctgtgcttctgttacctgtacttgcgtgtcctgtgtcttcatagctgattcctcttttctcattgttttcacaggcatcttttgaatcattttttcagatttcggtgcggttgcacgtcccatctgtgaggcagtgctcttattctgttgatgtacgggctttcttccaaataacccccgtattatatttgaaattctactcatatcttattttatcctcttgtgcttccacttatgctctgcaaaatccctgcgtatcttttatactatttctttttggactctgccactatcatcagcgtataaatttcatgtaaaatcgacgtaaaattcccatatcacaactgccttgtgcatacagataacaatttctgtgatacgctttactctccagtttcttccatcaccagttcatccccaactttgatggttccgccctgtaatacttttgcaaacacgccttcccgcggcatgatacagtctcctactactttgtagatctcacagtggctgtgacattcctttccgatctgcgtcatctccagcagaacgtcattgcagcggaatctggttcctaccggaagattgcggaaatcataaccatccacgatcagattctctccgaatgctccaaactccacctccacgcctctggcacggaatgcctctattttttccagtgaaagcaggctcacctgacgatgccagtgtccggcatgtgcatcattttcgatgccccagtcggcaatcagctttgcctcagaaacttcatgcttttgtgttcctcttttttcactgatacatatccctttaataattcccattgctgatactcctatcccttttgataaattctattctatcatctttttcgcagaaaaaaaagtggaacagtcggataaatcgactgttccactgcctcgttttaacaattcactttatttcatagatcttttctttttttcatgtactgccagtgtgatgatcatcatgccaacacccgcaaagagtaccacaaaccaccagataaagccattgctgtcaccggtcttcggactgtttacagatgtatttttcgcattatccaacgcagctttcttctcaatagtaaacatcgtcgacgccgttccattttcggatacgatactgagggtatgctctcctgcggagagagtattcagataatctgccttcagttccacaacggtacttcctgccgaaacagtatacttgctggcatctaatactttaccatccaccagtacttttacaaattcttcaaattcagcattgctgcggaattttgcatttgtatcagatcctgctttccagatctgtcctgcgccttcaataatagacggtgcataggaaattttctcaagttcttccatctgttttacaagactgttcatcttactgcgtgtatcttcctccagcatagacttttcattttcagtcagattgtcgtaaatctctttcacacggtctacgctttccttgtcgctgtgtttcagatcatccacatttggaagctgttcgatctcttctgtagctttctttgcattgtcaattgcagtcagcgcatcctttacgttctcaagctgtttctcaagttcctcgcgctcgctctctgtataattgccatcataatcttttaacgcttcctctaatgctttttctgcatctttcagtgcatcttcatcttccacttttacagtctcatcggtaatctcttttacctctgtaatttcagatttttctgacgcatcttttgccgctgcaattcgattttccaattcctcacagtttgtcagagcatcctgtaatttatcccactctgcctctgtagattcctcctcatcaaatgcttctgtaacatcacgaagctgatctctcacatctctaatcacttctgtatcactggactttgcattatccactgtgatctctgtaattgtatctgtaatagaagaaatcggtttcatcacgattgtatactctgttacatttccggctttatctgttgcgcagatcacataagtagtctctgtatcaccctctaatgtaacagttccgtccacagtttcaccatttacagtaattgatgcaagattctgatcacttatcgtaaatttctttgtcacatagtatgtttttccattctccacaccagtaatctcaggtgctgttgtatcaaagatcgcaccatcggaaccgatataggatacattaccagcattgtcttccatacgaacatagatgataaactgttccatatcctttgcttccatcttcagttcactgtattccgtccagtcagcaattgcctgaacttcttcctctgtaagctgatgatctgctttgtaatacataacagattttataccggaagcatcatcgctggcactcaattctactgttacatcttcattaaagaataaaccaaaggtaattttgcttaagatcgtctggaacgcatttcgtccattcaattttgcctcacctaccggaatggttttatcaattttataattttctgttacagctgtagagatcacacctgtcactgtattttttacatagaaagtaatggttccatttttggtctcttcctgttcgcttaactgatcggtccattcgccatctgccagatctgtacggctcagtgcataaccttcttttgctgtcacaacaaactctgtattgatccagtcattggaatttacactgtattcactgccatcactcacatactccagaatggatgctgtcataccggacggctgcgtcagtctgtaattagcgactacctcatcatctccaaatagaacaaagtctgtaaaatgaattgcgatatctttgcccgctttctcactgtcaaaagttgggataccatttacaagctgtacattgtcaccagttacaacacctgccaatgccggcattctatcgatttcagcattctttttgccatcgtactgtttatcctttactttcagtccagtgatcgtcagctcttttgcggtaatatctgccgtggtactctccggctgaccattcaatacatagtttgctgccgcggaaccatccagtgcaaatccggtaaacgttacctgcttatccggaccaacgtttttgttctcataagaagcctttcctgccacaatcacaagatttttaccatcataattgtctgataacgtacctgtttctacaagacgcgcttccgttgttccatcataaacttttgttgtctcaacagtggttccgttaatcgttacctgtttcggtttgatcgtaaaggcaccgctcacctgttttgcattataatctgcatcctcaggtgtggaaatgcgcaccgtataggaacctgcattcatcggtacatctttcgtataagtatcgtctgctgcacctttcaccttgtattcgatcacagttgcctgcggtctgttctcataagtcagacctgcatacgtttttccgttataagttgtatcaacagctttataatcaatcgtccgttctgcctttgcaactactaattttgcagatgtcattgccggctcatcacccgctgtataagtttctcccaacggatcataagtcacacgaacggtgtattcacctgctgccagtccggacaaatagctgtttttcagtgtaatctcaccatcttttgatacagaataatactgactgtcgatcaactgatctccaagatacagattttttacctcattgccattcaactgaaccgcaaactgtacatcatcctgactcagtcttgtaaaattcatcgcctctgtgattgcttctgcatccgtatatacaaccacaccgtcagaattaatgatctgtacattgccactctcgtcactcacccgaacataaacaaatgctttcttatttgcatcgatgttaaaacttgtatttccgttctgaacattcagttttgaccaatcaccactgactgcatttttctcctcaaatgcctggtcagctaaaaggtattccacagacttcagaccgctgcccagatcacttgccgtcacatgaacagtctgtgtctttttaaagaacaaaccaaacgttacacgattcataaaagcgttatatttgctggttccaattgtaagttctgcttccggcggggtaatatctgccacgccttctaccacgatactcatggcaccttttacattctgaatctggaacttatcacaatcatctttactggatgctgctgtcacttcactgccattgacaagcaccctgtaattctgtgttctggaatatccttttgcaatctgaacttcaaactcataattgctgctatattctgctgatgtagcacctgttgcagtataaccctcaccggaagataatgtcacatcgtatacctgaatcgtccaatgtgcataaagtgtatgttcttctgttgtagcaactacggttgtatcttcgactttttcgccatcctctttctgtgtaaaccaaccttcgaaatcatagccttcccgtgtcggaaccggtaattcaccgtaggtacctgtataaatcacagttttatcattcggttcaactgcaccaccatttgcatccaaggaaacagtgactcttggaagatcttcccactgtgcatacagtaccatctgtttatcgctgccatttacatcatctgatgcggtagaaatcatacggaatacggcctggtctgtataagtaattccactaccgtccgcctctgtattccatccgacaaatttctttccttccggcgcagtaaactgatttgcatgcagacgtccatctccattggttgcagtattaaaatgaacataccattcaccgtcaatcagctgactgtcttccagctgatccagattcatggaaccactgccaccatttgcatcgtaacgaagcagacacagatcacgatctgtcgccggtgttccgatatttaacggtgcaattgcaagctgctgtgtctccttatcatacacaacaatgctgctgtctacatcactctggaaatatttactgtaatcctttgcaggatattttccggaaaatgtatatactgctaagctatctgtagcataactatcaaaatcaccatcttttgtaatgacacgaaccggaatctctgctgcctccgataatccgtcctcatcaacatagattgcctgtacatttttctctgacttaccttcgctgttcaatttagaataaacagctacgtttgcctgtttatttccagaaatcaccggagaacctgaaacaagtaatgactgttcggcaccgtatttgttaggatccagatagataccaacaccacagccggtaatcgttccaccgctcatgacagctcctcttgcatacaaaccatattcggtacagttacgaatgatactgcccggaagaagctcaacataacgttcgccaccaattctacagttttctaccacaccggtctcctgcaaagtaccactggtaaaaccaatatcacaatttcggatcgtacctcccagttttgcactcctgtttgatcctcccaaatctgtaccatatgtacaatctataatcaaactatctggatacaattctgtttgtgcataacctaagataccgattctacatcttttaatcgtaccaccatacatgtacatatttccaaaattgtacacacccaaatcagcgtcactgattgttccaccgtacatacgaaatacagcatcctgctcagggtttactacccagtttgcgttacttaaagttccaccatacaggttgcattccgcattatttccaattgcaacacagcgaacatttccaacgttctccgcaccacagatttttcctgtctggtcctgactgcagtcacagatattcaaactcatcccgcgatgtacatacatcgcatccttataaaactgtcccggctgttcttccacaaggagcatttttccattcaggcagaggtttacatcgcctctgattgcaatcgcatgatccagtataatatcatcatccagataataatttccactggtaagctctgtttcttttccggtaaattttgtccattctgtgataaccggatggctgtcctcatctgtgcacacggcaccacataccggatgtgcagaagtattatgtacattttctgccaatgtcagtgtatcatcattctgtacaacatgcgtaccatctgcaccggaaaaataacgttttgcatccagttcctcattccagtccgtgcagaaaactccggtttcactttccagtttcaccgtatagcggtttgttggtcgggcaattccctttgcactgatctgtgcgccatctttcagataaacagctgccattgttccattcaagttcataactccaggaagtgcgatcgttgtttgatcttccgccgtcacagcataaccattctcatctccgtttatgttgccaccatgcagagtcaatgtaccatccacaacatgcagtccgttttccaatgtaccgaaactgtctgcatcgtcatcatacaatgcaaaattctgtaccttcatcgttccttttacatcaaatccattcaggcacagatgaccgatataaactttgtccggatctacagtcacatctgcgatcaggaagccataactgtcctctgtcatagctgccagttcttcttccgaagaaatcatggtaaacttatgtccatcatgactatgtgcttttgccacactgatttcttttgtcacacaatcagaagcatagtttgtcttgtttgcaccattccactgttctgcctggagtgtcaatgtatattttccttctctcaagccatccggaaaaggaagtgtgctggtcgtagcagaagtatctgccgtatccaatgctccataagccacaatttcaccattgctgtttgtcagcatcgctgtcactttattataagcagtactgaaactgttcaatgccggatgtgtaactgtaataccatcctctgaaagattggtattgctcagttctgcatcaaacgcatcatttgttttcaatgtcagtttccagtcactgccactgtaatctgcaatcgggctgaatcctgtttccagactgccatctgcaacagaggtaaacaggatattgtctttgctgatattcattgccggccgcgcatcaaaatcattggtatacattgtataatattccacaacaacatgattttcctgacctaagcggtcaaggactgctgaatagatacgaccgtcagaaatgtatccatcctggaaaataacagccagtgacgaatcgttcaatccatggaatcccaaattggaatttcccatatcactgctataaacaagatcctgtgtagcaggggaacgtgtcatccatctctttttcgcatctttccggtttgcatcctgatcaaaaccatactttgcatctgtagcttccgatgcagacaggaaaaatactttttcaccacttagattaatgctacggaaaaaccatgactgtccagcgggcaggtaattcttatctgacttcgttgttgacagaatcgttgctttttcccggtcagaaaacgtattatagttcgcatcgtaggctgccttatttctgttataagaatttgccgtaatcgtatgaagatcggatgggaaccccagtgtcgtaccggatgtgatctgttcagtaaaagaacggcaccatacccgtgcactactgttcatccactcattgtggcgttttgtattcgcatagacccagcagttattttttctgttattcaacgatcctaccgtacaatagttgataaacggaattactgctatactgttttctgccagtaagaaaaatccatctttttcatccagcgtttcatcatccagaacgcgccatttcacccctttgccgtcccggactccataatatacatggtcatagctattgtttgtactgtcatagccatgaataacatctgatccaaggttgattgcctttctgtcagctgtcgttgtgctgactgctgctgtactttgtgctgacgtatcattactggttgatgtattatctgctgccacagctgtcgcagataacggcatcagcatcgtcacacacatcgtcaacgcaagaatcagactcaacacttttttgtttgctgtcataatctttttcatatgctctttctcctcctgttgtattcatgttgccaaaccattacgaaaagcattacattctgacctcattttacaacaaaaaaattcaaaaaacacagctttgacatgaaatgacattatttcgacatgaacgacatagtgtccccgtatttttcaaaaaaggacgcaaaaaaaggacttctctttttctaagaagtccttaatacaatgggcggagaaggattcgaaccgttttggtttctcaccgaagatttctctgctttatatctttgcacgaaaaaaggactccattaagaagtccttaggtaatgggcggagaaggattcgaaccttcgaaggcatcgccagcagatttacagtctgtcccctttggccactcgggaatccacccatttagcgaaacgaacaatcagtgctcattccgctgtttactatatcacgttctttgcgctcatgcaagtactttttttaatgcttcctcatctgccaccagtgtgaagttcggatgtaactgcaggatcgatgcaggtacttccggtgttaccggtccgaagaaagctttctgaaccgcatccgctttgtcctctccggatgccaccagcacaacttttttcgcctgaatgatgtcacagattcccatggtcagtgcctggcgcggtacatcgtcaatactgtcaaagaaacgcttatttgcttcgatggttgactctgccagactgacacagtgtgttccttttgtaaatacacgatccggctcattaaatccgatatgaccgttgcgtccgatgccaagaagctgcagatcaataccacctaaagatgcgatctgtttgtcataacgctcgcattctgccgcaatgtctgtattttttccattcgggataaacgtatgatccgcgcggatattgatggaatcaaagaaattgtggtgcataaagtacacataactctgatcgctggtaatatccagtcccacatattcatccagattaacagaataacattccgaaaaatctacatctcctttgttgtaccaatcaatgagctggcgataaataccaagtggactgcttccggttgccagtccaagtacacaatccggtttcataattacctgtgctgaaataatatttgctgcctttctgctcatctgatcatagtcttttgctctgattattttcattgtaataccctcctctttttgttaggtcatttgacactatctttttgttttagctgttactgccagatctgtccgccaatgattacgttttccagattcagctctttatccagaatcagcagatccgctctggctccccgtcggatacatccgatctcctgtgccagtccgatggattctgccggtgtcagtgtcgctgcccgaatcgcctgctccagcggaactccaaaacgaaccacatttctcaccgcatccatcagatgaatggaagaacctgccagcgttccatctgccaatgtcgcttttccagctttcatccacactggctgtccacctaaagaatattcaccctccggcattcctgcgcagcgcatggaatcagaaatcagattcagcttatcgccaaataatgctgctgtcatgcgaatcaccgacggatcaatgtgaaaaccgtcacagatcagctccaccgttgcacctgcatcaaaagcggctccgataatgcccggcttgcggtgatgcagaccattcatgccattaaacatatgggttacatgtgtcgctcccgcctcaaatgccacctttgcctgttcataatctgccacagaatgtcccagagacaccgtgcagatctgacttgcttcccggataaatgcattgttttcatcttcctccggtgcaatcgtgatcatccgcacctgtccgccactggcatcatttaattttttcagttcttctatgttcggtttctgcaaataagctgcattctgtgcacctcttttttcataagaaacaaaaggtccttccaagtgcacacccacacagtttgccccatctgatgtaaaatcccggatggcatgcattgcggtcaacagctgctcctccgacagtgtcatcgttgtcgggcaccagcttgtcacacctttctgcgcatagtaacgggacattttccgtaatccttctgcgtctccgtcactggcatcggcatttactgcaccatgggaatgaatatccaccagtcccggaatcacatattttccagaaacatccaaaactgatccacagtctgtatctgcaccattttcctgttggatatcagttcttatatcacaacctgctctctctgtcacatccagaatcttttctgaacagaccacatctgcattggaaaatttgccatccggcagaaatacacttccatttataagtttcataaacaatcatctcctgtgccatcattctctatctcaatttattccaatttcatccactatttcttcatcatcggctgatttctatttcatcccgacatgaatattttccctctttttgcagccaaatacaagcctttttttcttctgatttaaccacatttcactttcatttcttccgtatttaccgttgcttttctcatcctgaaaccgtataataaataagatgtaaactatatttatattttttgtttttatataaggaggagattaagatgaaaaagcctgtattagttgtaatggcagccggaatgggaagccgctatggtggattaaaacagatggatcctgtcggaagccatggtgaagtcattatggactattctctctacgatgcacgtcgtgccggttttgaaaaagttattttcatcatcaagcattctatagaagacccatttaaagagactattggaaatcatgtttccaaatatatggaagttgcttatgcataccaggatctggatgatctgccggagggctatactgttccggaaggacgtgaaaaaccgtggggaacctgccatgcaattcttgcagcccgtgatctgatcgatgctccatttgcagttatcaacgcagacgattactatggaacaacctgtttccagatcatctatgattacttatccacacatgctgatgatgacaaatatcgttactgcatggtaggctaccagttaaaaaataccgttaccgaaaatggttctgttgcccgcggtgtctgcactacagatgctgattccaatctggtcagtgttgtagagcacacacagatcgaacagtacgaaaatggcattcgtttcacagaggacaaaggggaaacctggcatgatatcgacggcgataccaccgtttccatgaacttatggggattcagtgagagctttatcaaagaggcaaaactgcgcttccctgcatttttagatgacgcaatggtttccaatccattaaaaggtgagtacttccttccatctgttgtcagtcagcttctggatgaaggcaaagcaactgtcaaagttctgaaaagcccggacaaatggtatggtgtaacttatcgtgaagacaaacctggaattgtaaaagctctggctcagaaagcagaggaaggcttatatccatcaccattatggaactaagcacttttctttcatctgcatatttaatctaaaagattgctgtcggataaaatactgtttgttctggctgcatcttatccgttaaattcatataaaggagaaacaattatggcaactatttcacctgaaatttttcaggaagtcctttctgcctacgcttggggggaaggtactttatcctataattcatatggcgaaggtcatatcaataatacatatttagttactgtcaatggaaaaaccgtgaccagatatatcctgcaacggatcaacacggacatttttacagatccgaaatcactgatggaaaacatctgtggcgttacttcttatctgagagatctgatcagcaaacgcggcggtgatgtctcccgtgagacaatgtccatcgttccgaccaaaaccggcagttcttattatactgattccaccggtggtgcatggcgtgtatacaattttgtagaaaatacaatctgtctgcaacagtgtagaaataccgaagatttctatacttctgcccgtgcatttggtcagttccagaaaaatctggcagactacgatgcctccagcctgcatgagacaattccgaattttcataatacaccggatcgtctgcgcaaattcaaggaagcattgaaagcagatgtgctgcaccgtgcagctgatatttctgatgatattgcatttgtactggatcacgaagcagactgctcctatatgaccgatctgcttgctgccggaaaactgccactgcgcgttacccacaacgataccaagctcaataacatccttctggatgcggatacgaatgatgcactttgtatcatcgatctggataccgttatgccgggacttgcagccaacgattacggcgattctattcgttttggtgcaaatcacagtgcagaagacgaaccggatcttagcaaggtaaatttctcactggaattatttgaagcatatacaaagggatttctggaagttgccggaaatgccctgactccgttggaaattgagacactgccatggggtgcaaaactcatgacactggaatgtggtatgcgctttctgaccgattatctggaaggcgatcattattttgcgattcatcgcccgggacagaatctggatcgtgcacggacacagtttaaacttgtgcgcgacatggaggcatgctggtcagaaatgaataatatcgtatccaagtattctaaataaattttaaacatataaaacgaaatcaaagactccttccgcaatcgctagtcgtgcgcaaatatgtttaatttttcattttataatacgaacccagccaattttttctttgcggctaacaatcgctcgccaagaaaaaattggctgggttctcaatttacgctgtgaaattttaaattagttttttgcttagtttttgccgtgtcctggttgaaaccaatttaaggttatgcctcaatcgtaaatggggtctgggtttattttttctcagcaagcgattgttagctgcggagacaaaataaacccagacccctttcattaccctaaatttcagccacaaaggaaactaattgttacagcttacgattccttttttaccatccaatgtcacaaacgcaccggatttcaaaatctgtgttgcattttctgccccgatcaataccggaagatcaaggctcaatccagcaatcgccccatggcaatccgcactatcattttcaatgatcagaccggatgccagacggatctgttccatcatctcattggaagtatctctggcaacaatgatgtcaccctctttaaatttctcttttaattcctccggagatgagataacacagaggtttgcagctgcacttttatctgtcagaccttttccctgcatcagaatatgacctgccacatgcactttgatcatattagttgttccggaaataccaagcggtacacctgctgtcagaacaacgatctcgccctgctcgatcagtcccatttcttctgctttatctaccgcatggtcaaataattcatcggaattatgttttaattctaccaataatggagtcacaccccaggacatattcagttttctgcatacgtcttcgtttacggagcatccaatgattgggcaagccgggcggtatttggataccatacgtgccgtacgtccggaattggatacggtaatgatcgcagatgcattcagatccatcgctgtagtgcaggttgcatgtgcgatcgcatttgtaatatccggattggtcagaatgccacgttttttcaggcgggacatatagttgatatcctgctcggtacgggatgcgatttttaccatagtctgtaatgcttctaccggataatcgccggcagcggtctcaccggaaagcatgatcgcactggttccgtcataaacagcatttgcaacgtctgtagcctctgcacgggttgggcgcggatgtttcatcatggaatccagcatctgtgttgctgtgataacctgttttcctgctttgtatactttttcgatcaggattttctgaataaccggaacatcctccatcggaatctcaacacccatgtcaccacgggctaccatgataccgtcggatacgcggatgatctcatcaatgttatccacaccctgtttgttctcaatttttgcaatgatattgatgctcttgcagtcatgctcatccagaattttacggatctggagaatatcatctgcggttcttgtaaaggaagctgcgataaaatcaaagccattttcaataccaaacacgatatcgttataatctgtctcactgataaacggcatggacagctctacattcggtacattgacaccttttttattggaaatcataccaccatttacaacttcacacacaatatcggttccatccagacgaatgactttcatctcgatcagaccgtcatcaatcagaatacgatcgccaacgtgcacatcattatgcagatcttcgtaagtaatggcaacgcggcttgcatcgcccacgaaatcaccaagtgccagggtaaaaagctgtccttctttcagttctgctttgccacctttcagctcttttaaacggatctctggtcctttggtgtctaacagtgctgctaccggaagatttaactcctttcgcaatgcaaccaatttttccaaacgacctttctgttcctcatgagaaccatgggagaaattgaaacgcgcaacgttcattccttccagcattaactggcgaagtacatcacctttatctgtagatggtccaagtgtgcagacaattttggttttacggatttctttcataaatacacgattcctttcctgtaacttctgaaaatcaaatgatttttcatgcataatacaaattgtaaaagggataatacactctttatcatgcattatcccctttttctcgtttttatttctttataattgtgcctgtctgacctgccatggctgcttcgatactccccaatttcgtaatcagcacctggcgtgtcgcataatcgccaatataaaagagtgccgtctcaatcttcggctgcatggttccctcaccaaattctctctctgccatatatttctgtgcctgtgcacaggtcatttcacggattggctcctgcttgtccgtgccatagtttttgtatacacattcttctccggtcaggatgatcagcatgtctgcctctacaccatctgccagaagacctgcgatcaaatctttctcaatgactgcgctggcaccttttaaggttgtgccctgctccagtaccgggattccgccaccgccggcagcaatgactacctgatcagcatccatcaaagcattgacagcatcaagctctacaatctgcattggattcggtgcagcaacgattctgcggtaaccgtcctcagttttaacgacatggttacctttcttctcttcttcctctgcttcttcctctgtcatgacacgaccgatgatcttgctcggtttgtaaaaagcttcatcgtaaggatctaccactacctgtgtcagaagtgtggaaacggtacgatatacgccgcggttcattaattctgtgcggattgcattctgcagatcgtatccgatatatccctgactcatggctgagcatacagacattggtgtcgcggtatagtctgtatacagtctgtggaactcagacatcgcggtatggatcattccaacctgtggtccgttactgtgtgtaattactacctgacaatcgtcctgtatcagatcggcaatcgcctttgctgcgcggcgggttgcttctttctgctctggaagcgttgttcccagtgcgtcatgtccaagtgcaattgcaattctttttttcttcatctcaactgcctccaatactttgtaaaagtctgttttgttcattttatcacaagataaagacagcgtaaagcaaaaatgaaaaaacgcattgggggattctacacccacaatgcgttctgttctacagaatttcccaatcattcagaactgtgtctgaatcatcgtctttctcttacaattttatctcatgctgttaaagaagtcctcgatactgctgtttccgttgctgctgccgtcactgccataacccggaacggtctgtgtaccggactgggactgactgctgtcgctctggcttgttgtattggactgttcagaagcgttatccagtgtaacttttacggtctgctcctgatatcccttgttgtcggtatttctctgaagtgtaatctcaacggtttctccggctttataatactgtaattcttcttttaactgtgaaatagaagtaatggttgtgttacccagttttgtgatgatatcgcctttctggataccggcattggctgctgcaccaccgtctgtggttccgctgacataaacaccctctggaatgccatacatctcagcaacatcggaagatacatcctgtccggtaatatttaagaaaccataatcactggtcagtttatctctggtctcctgattcatcaggttttcaatgataccctgtgcttttgccatcggaattgcaaatcccatgccctctacttgatcgctggcatattttgcactgttgataccgatgacctcacctttcatgttaaacagagctccgccactgttacctgggttgatggctgcatctgtctgcatcagtgttgcagttgtatcatcaatcgtaacctcacggtctaatgcgctgataacaccggaagtaacggactgaccaaaaccaagtgcgttaccgatagcaacgacctgatcaccgacctccatctgggtggaatcaccaagtgttgcgacggaaatgctgtttaatacatcctcactgatatcagagagcttgattgcaatgactgccagatcattatctgcgtctgttcctttaatttttgcatcaaatacagcgtctttatcatcgttaaagcatacggtcagagactccgcaccggatactacatgattgtttgtcgcgatcagaagttctgtatcattctttccgataataacaccggaaccacttcctgtactctgctgctgcatcgttccaaacatagtctgtacttcctgtacactctggttggtaattgctacaacagaagatttacactgttctgcaatctgagctacagtataagtatctccagaagaactggatgaaccgttcttgctgccggagcttgtgctcagttttgcagcgttcgtttctaatgtggtagaagaagcagttgtctttactgcattttttccgatcatgaaagatcccagtaccataccaccggaaattgcaccgaacagaattgcacagcagattacttttgcatacaggttcatgctgcgtttgtgttttcttttctgctttgatgtctcctgatgatcgttatgctgatcaccattcacctgatcctgttttttatgattctggatgtaggaataacggtactgggaagcaccttctgttcctttgatatgactgtcaaaagtgctctctgttgctcctgtttcctgagcagcggaggaactgttctctgcctttgctgtctctgctgtaacagtctcctgtgctgaagatgctgaccgctccggttcgctctcctgtggcggtgtcacgaaatcggattcctcaaacatctcctctgttgtttttttactttctgtattttctatattactatcattttttacttctgattcattattttctgtgttcattttattttcttcattctcaagcatttctttctgcctcctcatctttgatgagtatatcatatctgataattgtagtaaaattttgttgatattgtgaaagaattgtgaaatccacgttctttcgtgccaatactcctgtttacctaaacatgctcgtatatagaatagaaaaattctacacagattaactgtgggctaaatgcagtagtcactccaactgctgtcgttcacccggatacagctgtttcgaatcagaagctgtccttccagttccattttcaccgcggaacgatgccctccccgcaaatgatctaacaacaggtacatggcaaattttcccatctcatctcttggcagacgcacggttgtcagcatcggctttgtatcctgcgccgcctcaatatcgtcatttccgataatggatggcgtatatccgcactttttattatttgccatgcattttagcatacccaccgcggaaatatcattggcacagtaaatagcagttggacgttcctctgactccagcagacgctccatcattttgaagccttccacttctgtctgtcttgtcttcatgataaattccggttctacttcaatgtcatgctcccgcaatgtctgtaaatacccctgataacgtgcattggttccacaggcgcccacatacccgattttctgatgtcccagactgatcagatactccaccgcggtctgcgcaatcttgtgcccgtcacagaccacctcatccgtaatcccgcttgtagcattgcgattcacgcacacaacactgtgatagtgctgcttcatctccagcagagcttctttattgcattttccaatcacaatcagaccgtctgctttttgtaccgcctcttgctgcatctgttccacaattattttgatgctctcccgtgcacaacgcttgtcatcagagaaaatggaacgataccagatatttgacaaaatgcagttacttctgtggatttctgtctcaatcacacgcagcagtgcatcaaaaaacggatccacgtttgcaccatcggtacgtgtaatcagtacattaatgtaatatgttttctctgtcttttcattttttccctgtttcaaacggcgggctgcctcattcggcacataattcagctccatggcagcttttcgtatgcgctcacgcacttccggggaagaacaattataatccggattgttcaagacacgggataccgtcgccggagaaacatttgcccgttttgcaatttctttgattgacatatcatttattcctcattattcgttccaatatacatgatatgattccttctgtatctttggattttactacaacaacttatttttaccaagtatattcaagaatgctccggcattcttgttgcgaggtgcgcgtcatgcaattgcatgacatacttcaactgcgcacctctgtactcctgccggaggctatatcagatgggggattggctcccaccactgatactagcttgtttctcaccacctataggacgctactgaaaaactgtttttacatacaatatacagtagcgtaaaacacataagtatactttatcttg

SEQ ID NO: 13142 - DNA, 20498 bp, Unknown
  gut microbiota DNA sequence
ctatagaggtgggagtcatctcccatctggtatacaaacagggtgtaaaactacctgttattgtaattttacaccctgatttataaactgttacagttcacacgcgccattcgcaaaacgccctttcgggctcccccgcagcttcgctactacttttgctcataaaaaggcgctcccttcatcactatgtatccagctaattcctcatgcaagcatgatcattacctgaatacatgtgatgagtgaactgtaactataaaattatgcttcgtatacgatctcgtcctttgtcggtgtgccgtccacaattgtaaacgcatgtaacaccggatgctcagcatccatcagagacaagatcaggtaagacgctgtactgtcataagccagacggatatcttcctgagacggacgcgccggtgtctccggatgagaatgccagttcccaagcggtgtcagtccgttgacacgcatgtccttgatggctttcaactgttccttcggatccatggaaaaatgctcgttggtgtgatcaatatttgtcagatagtacactttttttacggtacggacatcaccgtcttttgtaccgcccagcagtccacagctctcctccggcagatgttcttttgcccagtccaccatcgtatcaaaatcactctgtgctaatttgatctgcatttaaattccctcacattctgcctgttcgtaatcaattaattttgtgatggtcggatgatcaccgcaaaccggacagttgcatgtatttttcggtaattttatcttgcggaattccatatccaacgcatcgtaagtcagaagacttccggtcaggagtttgccctgtcccagaatgtacttgatggcttccatagcctgcaggcttccgatgacaccgcccatggctccgatgacacctgcctgtttacaggtcggaacagcatcctttggcggtggatttttgaatacacaacggtaacacggaccttctcccggtacataggtcataagctgacctttgaaacggatgattcctgcatggcaaaatggttttttcgccataacacaggcatcattgatcaggaattttgccgggaagttatctgttccgtcaatgataaaatcataatccttgatcagatccataatgttctcagaagtaacaaaagtacgataagtaatcacatttacatccgggttcagatgattcatagtctcttttgcagactgtacttttgcttttcccagatcatcggtactgtggatgatctgtctctgcaggttggagagatctacctcatccgcatctgcgataccaatggttcccacaccggctgctgccagatacatggcacatggtgcaccaagtccgccggctccgatgatcagaacctttgcgttcaacagttttttctgtcctttggcgcctacttccttcaaaatgatatgacgggagtaacgctcaagctgctcgttactgaatgccattattttccacctcccatgaagtagatgaactcaacaacatcgccatcttttaatgtagtagactcaaaagcgccctgatctacaaattcatcgttcagagaaactgttacatactctggtgtctctacgttttccagtgcgatcagttctttgacagtcagtccctctttgtattctttgttttctcctgctacgtttaatttcatgtttttgtcctcacttttcacaactttatttttatagctcaactgttgttatttttatagcttttatctttacagttcaactgctgctttttggatagtttttatctcagtcgagaagactcccacttctgcaagtggtgagtaataacaagtctttctcagtgggagtacaatctccgactgagataaacgctccgcgggggcgcacattgtctgggagacaatggttttgcgcagaccggaacggagtgtagagtgcagtgattctgataagaatatgtcagctttcgctgaccagaatcacgcaccaagtctcacgtgcgttcgacttgaattttaccgcttatgtgcttctatttttcagcagcttctgcaactgcttcttccagctctgcttttttcactacaccgtgtagccgtttcacttctgctccatttttgaaaaagataagcgtcggtgtagatgccacctggtatttttctgccagatctctgtcataagcaatgtttacttttcccacatacacattgtcgtgtgcttcttccagatctgcaagcaatggtgaaatccgtttgcacggaacacagctgtcggaataaaaatctgcgacggccacaccttctgcctgcaaaatctttgtatcaaaattatcctgactgattcgttctgccattttcttactcctccacttttttcaccaaaagtgtataagtgccatcttcgttatccagcaatttcaggatctgatgtccttcctctttgatgctgcgtggcacattctgcaccggctcgccgtcattcatgcggactgcaagaatttctccgtcgtccagttcctctaatgctacttttgcttttacaaatgttaccgggcataccacatctgtgatatctacctgatcatcaaactgtatctcactcattttcatatgcctccctgattgcctgttcaaatttgtctgcgccgacgcggtcaatggtgaatttaaaacgctcccctgcatttgcatggtctgcgaagaaatcgatggctgcgtcacagactttcattaatttgtcatgatcttcgataaacggaatgatcacatttcctttatggacgtgatttccgaaggttccaccgaaagatacgatatatccgtgtgtctcctcgtatgcactggtcggacatgattttgtacatcgtccacaataattacatttggattcatctaccgtaatcttgccgtcctctaacgtaattgcctcagtacgacaggctttcacacagacgccacactgaatacatgcatccggaatccagtttacgcgaatcgcacctttgattcccacatcgttttcttctgcttttaagcagttgttctgacatccggtgacaccgaatttgaatttatgcggcagatcgtgaccaaaatatctcgcatccagctcctgtgccagcgcgtaggtatcgatgcatccgctcggacagaccgcagcgccctgacaggctgttacggtacggacacgcggtccgcagacacccggaacaacgccaccttttgccagtgcgtcttttacttcgtcaatctgctctaatttgataaatggaatctccacaccctgacgggaggtgagatgtacatatccttttccgtaagtctctgcaacttctgaaaccactgccagctgttttgccgtcagggttccgccaacgacacggattctcagggaaaaattatttttctgtttctggcgcataaaaccgcctttttttaaggttgcgtaatcaactgccatgacatttctcctttttattcaagtcgaaccgtttttcttttgtcattttctatactatctgttcagagttctctgcacaatcgttttttgtaaaattatccgtttcttatatcgattgttactctgcttcttcatccgcatgtgcgattgcttcggtaaaatctgcgatcagatcttccgcgtcttcaattccgacactgacacggatcagatcatcgtatacacctgcggcatgcatcatttcttcggtactgtgaatgtagatcgtagaagccggatgaataaccagcgtccgcagatctccgatatttgtcgcaatatgtgcaaatttcaaatgattcatcagacgatatgcccgttccttgctgccaacccgaagacttaagatcgcaccgccataaccgccaagctgctctgttgccagcttctgataaggagaagtctcaagcagtggataattaacagttacatctggcagctgttctaacgcttttaccagcgcgtatgcgttttcacattccttctgtacccgaagtcccatagtctccagacctacggtattcagataagcattcatcggagccatacaggaaccaaaatttcgtaacgtatcatttttcaaccgtgcggtatacgctgccggaccgaactttttgtactctgccagcaccggataacgctgaggattccatcggaattttccaccatccacgatcacaccaccgatggaattgccgcttccgttgatgtattttgaactggaatgaaccacaacatccgctcccagttttaatggccggatcagcaacggtgtcgctgtcgtgctgtctaaaatcaaaggaacctgatgcgtatgtacaaaagcggctaccgctgacacatctattacatccagtcccggattgctgataacttcaccaaacacggctctcgtcttgtcattcaataacggagtaatattttcttctgacagataagggatgtaatgcacctgaataccaaaattctgcagatcccggaatacgtcgatcgttccgccaaacactccgctgctggcaatgatctcatctccactctgtaaaatatttaataaagaaaataccactgcacttaaacccgatgcacaagctgttgctgaaaagccgccttccatctcacagatgcgccgttcaaacgctgccaccgtcggatttccgattctggtataggcaaaacctgctgccctgttctgacagaccttttccaattgttctgatgtctcgtaggtataagcactcacctgactgatggatggtaaggttgctccaaaggaatacgctcccaccgattttccgtgtaatagttgtgtattaaaattcatgttcctgtcctttctttcctacagttatacagaaatttcttccagttttcaaaccaagattgtgaaaacgttttcactcctatcggaatagtatgatttaatgatggataatctttttccaacaacgaacaaatattaattatttttatacatttttttagatcggatttttattgtctgtcaaaaaatatgttctacttctacgattcgatttccccactttttcttccagatcatcagatatacgttatattccacggaatcctgcgctgttgtgaaaggttcttccctcaccagtgtgacctgctttccctgagcttccagctccattttacgctgtgctgcctgcatcagaattttctcatataactgctgtgatattcctccgactgcagataccgttctctgctctgatgcttttgtatcatatacttctctttttccaatttcttccttcttgaatttggagtcttctgatttaagcttttctgttttataggtacgcaccgggtaaccttcgcttgccagcatcagtttttccatcagcagatccaccacgactccatgactaaccttgtggagcatccatgcaagtaatctgctcattgtttttccatgatgcttccgataaaatgccagccaccgaagcaggctgtaatctccggcttccgatgacagttcttccatgattgaaatggcctgttccgtcggctcccacacatccgccattggcacgatatatttcgctgggactgccggataacaggcataattcaacggtggaaaatgtaccaattctgacagcttccgctcttcctcactggctgcatccgctcccagatactcacattttgtatgcagaatcgcaattcggtactccaactgccgcagatattcatagcccttcacccaaaaatgtgcaagatctccgtaacggtacaggtgtatctccacttttaaattttcaaaaaaaattgtcacgacactgtcaccctgatgaactacaagtacataaatacagctgtcctccgtatcttccctgcttaattctgcttccagttcgccctcataatccggctgatagtgcccggtcattctggcattaacaaagaccaaaaaactttccactgcgtcgttcatcagatagacaagacggagttctgattttgcgccgttcttatctgtatatgtatctttctgtattatgctttcatttttattttccgctctgtctgcttctcctttttcctgtgcaccacaattttcattatctgatttttctggaaaaatcaattcaaactgatcctgccagagcagttcttccagcatttcaaaaggattcaattctgtcctgaaatcattcttttccaacgtatatgtcctcgtcttcttgtatttcttctagtattatactattatttcggacaaaaaaacaggataccatcacttcgtttctacaaagtaacagcatcctgttctatttctcttttgtaatttctatctcttactgttcaacaataagactctgctatctcatctgatagcttgtatgcagcaattcatgcgctttttcagatcccggttcacccaagaatgattcataaacttctttcactaccggattctcatgtgattttctgatggcactacctgcatcattctggtataacgcagcgccacgcattttcggcacatcattcagtactctggttgctgcgttctgatgtggctgtccaccaccgtttacacagccacccgggcaggccatcacttccacaaactgataatctgcggtaccgtttttaattgctgtcagcagctggtttgcatttgccaggccggatacaacagctacttttacagttgttccatttacgtccacggatgcctctttgattccattcatgccacgcacatctgtgtactctaaaacagtatcttttcctgtcagtttctccactgcagttctcagtgcagcttccataacaccaccggtcacaccaaagataacagccgctccggtaccaaatccaagcggaagatcaaatttagaattcggattcatagcctccaactggatttctgcatctttgagcatctgagccagttcatttgttgtgatgacaatatctacatccggaacaccagctccgcactcatcctcacgggtaatctcaaatttctttgcggtacacggcattacagataccataacgatattttctttcgcaatgtgttcctggtttgcaaggtatgtttttacaattgctccctgcatctgatgcggggatttacaggaagaaatattctccagcatatccggataaaaatgctctgcatatttgatccagcccggacagcaggaagtaatcaacggaagttctccatcgttgttcagacgctcgatcagctcattggactcctccatgatggtcagatccgcaccaaattttgtatcaaatactttgtcaaatccaagacgtcgaagtgcctcagccattctgccttctacgtctacaccgatcgggaattcgaaagcttcgccaagtgccgctctgacagccggcgccacctgaacaaccacgtatttttccggatcattcagtgcttcttttacctcatccatctgtgtcttctctgtcagtgctccaaccgggcagactgccacacactgtccacagttcacacagcttgcagctgccagtccggccggagaagccggttcaatttttgcgtccagaccgtcaccggtacatgcaatggcagatacagcctgcatttttgcacacacgttgatgcatcgtttgcatttgatacatttattattatcacgaattaatactttcgaactcagatccagctgttccagattggtctttggcagatccggctcatcggtaaatccatattctttcaataagtcctgcagttcacagcttgtggaacggaaacaatacagacaggatttgttgtgctgctccagaattgctgccagtgctttctttctggcttccataacagtcggggttcttgtctggatctccatgccctctttgattctggtggtagatgcatttacaatctccccatccacctctgcaatacagacaccggactgatccacatcctgcacgcctttcagatagtaaagtgtcggaattgactgctgcataaactcacgctgcatttttaatgtttcaaaggaagcatcgagaatggtgattccttttttcatggtataatcatacccgttgatcttgatattcactgtactcactcttcgaacctcctcttaacaatttgcataaaattctgcttcatcatattcatccgtatgtccttccggaatgatatagccctgcggacgcaccggatatctccacatcggaatatcttcggtaaataattccatctcaccatctgctccctgacggatattgatccatttcagccagttctgattatctgtctgaggatagtccgcgcggtaatgcggatacatgataccacgtgtttcttttctcatttccgcagaacggaagatcatttccagacaaaggatcgtatctgctgcttccagacattttgacagagaatgcggatcatcagcagtcagatgcggtacgattgctttcatcttctcgatatcagcatacactttctgaatctcagcctcatctttcagaatacatttatgtacatcgaaaatatacgtctcgatcatatcgtaaatctctttgaaatgatgggtatcttctctgtgtaatggagcataaattttttcttttaaagctgccacctgctccagatccagttcatcccactctgcttttgccgcatatggtgcaatgctgtcgccagccatcataccagtagtggaagcatttccaagtccgtcaccgcgggtccagccaaaatatgcatttccctgtgtggttacttttccaggtgcccaaagtccttctacatctgtttttatttctttatctactttgatcggttccacctgaataactgtcttgattgtagtatctactacttcgcccataacacccagattttcctgtgttttactgaataccagatgttcccatgccattttgtcacggaacattcgctgggtagactcatccatatctgttccgccgatcatcatgcggacttcatccggatgcgccagatctactgtcagcggaccatttccagccgctacttcttttaccatggcgtcaaccagtgcaggtgttacttcccactctttatgaccgatatatttatctgtcaggttctcaccatttttattgcagatcatgttaaatccaccataaatcggtgtatttgttttcttaaatacaacgtctacctgtgtagaaaattctacgtttcgcattaatgcgccaacacggtacatagcaccgacaccggttccatatcccataaattccagaccgattttcttaaagtgacatccctgtgttgccatcgccactgcttttgcatggaagatcttgcattccatatgatccatatcaaaaccgatggctccgataacttttccttttttattggtcagaagttcaaaaatattcactctgcttaataaacgaatgcctaatttcaatgccatctgacgcaactgtgcacatacattgatggaaacaccgcccatatccagtgcatccgggataaacggaagcggagtagcttcgccctcttcattacaagatgtgataacaccacagtgtttcatataatcaatgttatctctgtgatatacgagataatctctcaggaactcctggtcatttaagaacggggtatgcgcatgcaccagatattccagtgcattttttacaccattcggatgtttggatgtggaacggattccgtttcctgcttttgtagcctgtccattccatccgataatacctttatcaattacaaggatatcaagtgtcggatcattttcctttgcacggatggccgttacaaggcctgccataccgccgccaacaacgagtatatccgaagtatataattcaccataatctttgatatctgccatagcttatccctcctgtccgttctgtttattcatcagttccgcactgtattccaacggatccacctgaagagcggaaataacctgaatatcaatgacattgttcagacaatccatctcacactgataacacaatacacattcatccggatatttcggataagcatattttttttcttcatcccactgccatacattttccatacaacggcggatacattttttacatccacagcaacggtctgtatctattacatagcggatactctgctgctgtcccctgttttcaacaatcattcgtttttcctccattcttctgtttcctatcgttttccgataaatttatcactggaaagtgccataaagatcaatccgatcaccagtactacaatatcaaagatatacatacccataatattgccggcaaagaaacctgtcatcataacgccgataccagctccgatttcaaaaattgttccaattacctggtaacctgccgtataatcccagcgtccatatttgctggctacataagatggcagcaaattacataacgcaccctgtgcagcaaaaataacaacaccggaaatccagcagaatgtcaaaccttttggcataccgagtaatgccacaaatccgataataataaatacgaaatatgctacgaatgctttttttgttccgattttctgatctataataccaaagataaaacttccgacaattcccatgattccaccaacggcgaaaattgcagctgcctgtgtatatgcgtatccaatggccagcattgccggaattgcggatgcaatataactcataacagccaaaaatgcgagtgctgagccaagaccgataaaccatgtatttttatcttttaatacttttccaattgtaaacggactcttgtattctttcatcatctgtgcgatctcagctccgtttactgcataggtaggatctccatccggatattctccggcttcctccgggttattttttacacatattgcggtaataattgccacaataatcagaatcactgcgataactgtcattcctccgccaagaccaagcttaccaagcagtttcggcatcatcggtacatacaagaagttcattgccacaatacccatcgttgtaaatccaagtacgatacctttctttgtcggccaccagcttgctgtcagtgtcatgccaccgttcttctcataaccgccgcccaagaatccgataatcaaaatgacaatcaggaataacggtaagctctttgtcgttccaaatacgatcagtaacaaagcagaaagaatcaatgtcactgtcgtaagattcttagcccctgtctttcttacaactcttgccagaaccaatacaccgattgcctttgcgatacaggctaagccggatactacgttgattacattgacatcccatcctctgatttctgaaaacattgggaataccgtattgttatttcctccgataatacttgttccgatcaggaacaggattgctgtgtagatcatcataccaatctgttttggaccgtgccaactgtgtttttttgcctccataccaaatctcctttttctttttttgatacctttagtataaagtgttttaactgccagtatctcatagtattctgttgaaaaaaattgtcatttttctacactagtatagaaagatttttctatactctcttttgaattaaaacggacattcgcaatccgctttcgctgcttgctcatgaacgcagtcgctttgcaacctgcgttcaaaatgcagaaaaaccgccacattcgcgacggtttttctctgactttaggtatattaaaaattaagtgttttgcaatattgttctattatgtatctttatgctttcttatatggaatcaacatgatcagtcctgctccgataatgtcaattacaataaatacaacatatggcagtgtaaaacttcctccggaaactttcagcagcatagccatcaggataaatgccagtgtacgcacaacgtttgccagcgggtaaatgatactgttggccgacataaacccatctcttccgaatacggaaatgatcatagaagccagaaggttcagaagtcctccgattccaagtccggcaaaaatacatccaagccatacacatacaatgttaaaggatgtgatcagcaataccagtgcagccacataggaaaatgcaaatacaatggaaatgctctttgttccgaatttggaatccagccatccccagagataacttcccgggattgcaataatagaagtaattgacataaaggtcagtgcctctgcatttgtatatcctacggacatcatacgtggtacaaactgtgaaatgattccaaccagaaccatccataaaaatccataaccaaatacgatcaaccaggtgtttttgtttttcaaaatatttttaatagaatatttctcgttatccagtaccagctcctgcgtggaaactgtctcatccagttccatattgtccggaagacagttcacatctgccggttcatttttcgcccagaaaaatgtgataattcctacgataactgccaatactccaaagataacaaatgctgtacggattccttttgttgcaagcaatacagcaaatccggcaacaaacgcactggaactgatcggtgcacccatggtagcccatccaagtgcaattccttttttacgcggaaaccagtttgcgataaaagccgggcatgccgcggtaccgaatccggacgcaaagaaacagatcagcatcagatcaatggtatataacgcaaccgatggaaccattccaagcagtgcatacagcactcctgtaatgatcaatgtcactgctgacatatttttcggtttcgtcttaataaccagacggccaaaaacaaatcctccaaccagtccgacaagacctgctggtgtagcaacagaaagcaacgtatttgcatcccatccgtgagcctcagcaaaggcagacggaatcagattcattccatctgttgtaatcgctgcgtaaaagaagtaaaggatcatcgtgtagaagatcatactccagccccagccgccaaaacggttatccgttaagctttttgatagtttttttgtttccataattcaccctttctttcttttctctgtctttcaaaatatgtttttcgtttttcaaatacaaatcttttctctgttttgtatctttatacactttaaaacatcattttcaccaaaaaggaattttccccgttatgtacacctctcaggtacataacatcttcttcccagacatactgaagttttgcgttttccccttcccgcaattcctttgcatactgtacccaaatatttttcggtttgtgctctgcatagaagtcttcatccatcagtgcttctgtccagtccagatatctggaattgttcagatggccattatagtcaatttcctctgttgataccgttcgcaacagctggtttctgtattcctttggaaacttctgctgcagcttcggcagattcggttccccggcaataatgaccggattcatgatcttcatttcttccggctgtgctgccaccgttctggtattctgatccatcagcaggaacagcgaagatgtcgccattaatggttctcctgcttctgtgtacatcgcataaatcctggaatacagattcactttattttttcccggccagatacgtaagattaccttttcacccttagtcggtaaacgttccagttcaatgtttgtccaggaaatcacccagctcatccctttggcaagtaactcctccccggtaagacctgcctcctgatcaaaatggatttccgtaatacgctgcatctgacgtgccagtgagccaatgctcatacggccgtctgaatttgtcatttcatctgaaatttcaaacattatttggcagacacctttcgtatgttctgccgtaaacaccggtactcccatatttctcacctccgcctgtatcattgtatttttattctttatcccatgggaaaccattccatactggttttcctgtgtaggtttttgcttcctcgtctcccttcaggacacggattgcgccaaatccaagtgcttctgtctcgaagcttcctgcatagttgtaaattggtgcgatccaggaaatatactcagccagtttatcgcaaagttccgtatctcttgccatgccgcctgtcagaagaatagcatctacttttccttttaatgcaccagccatcatagctgtccattttcccatggaataaatcatggtattgtatacaagctccgcttttttgtcaccatttgcgatcattgcttttacttcgcgcaggtcatcggtgccacaccatgcaagtaatccgcctttgctggaagcataatcttttgcttcatccggtgaaataccttttttgatgcatttgatgacatcatccacacataaatcgccggaacggtttggtgaaattggtccctgaccgtcgcctgcacggtttccgtcaatcatttttcctttttcgtgtgcagtaatgctgataccaccacccagatgcaggatgatataattgcaatcttcatattttttgcccatcagttcactgtgatggattgccacctgtttctgattcagcggatgggattttgccggacggtaaatccccggtataccagtcacacgagccatgtcacagagttcatctgtcggcattggatttacaaaaaatgccggaatatttaactcctgaccaagtttataactcataatgattccaaggctggccggatggcggatacctcctacatcattttttgcatgttcataggcaagttcatcgattttatatgttcctccggcacatggatataagccaacaccacgacctgctacagcatccagatcagaaagagcaatcccttcctcctccagcgctttacggatcattgccatacggattggttcctgatctgcaaaagttttacactctgcaaaatcttctttgtgatgatctacctcacggtttacaatcactttatcgccttttaccacacccattttcgtactggatgagcctggattgatcgttaatacagtaaattctttcatgaatgatattctccttttttattttcctgccataactgccagcaatgcaatattgttataaagttcgacatctgtatcacttctggaacagtcaagaatcggcaggcggaatccctgataaattggtccatacacctgcacattatttgccagacgctgcaccagttttgatccgatattgcatcctgctgcatccgggaaaatcagtacatttgcatgtcctgctactgcactttctctttttacttttttctctccgactctcgcatccactgctgcatctgcctggaattctccgtcaattttcagatccggtctcagctgctgtgccagtgctacagcttcacgcactttttttaccggttcgctcagtccgcctgatccatctgtggagaatgacagaaaggcacattttgcttctgttccagtcaatgtctcgaatgtctcgcaggaagaaattgcgattccggcatgctgttccactgtcggctgaatgcagacagctccgtcagacataccgatcaggttaccctgatctccggcaaatccttcaatctcttcaatgagaagtccggaagctgttggacagtttggctgcattccgataatactttttgcagccagtacaaactcatatgttgttgtatctactccggccagtgttccgtctgcttctcccacagcctgaagcagagttgccagatacagtgggtggtcgattcttttctttacaaaactcgttggcatagctttatccggagaattattatatctatccagtaattcttctttataagctgtatcattcacatctaccacacggattcctgacacatccacaccggcttttccggccgttgctgttacatcttccggatttccaaccagaatgatatttgcgattccgtctgctgttgcttttgctgctgctttgatcatatattcatttgttacttccggaattgcaatggtttttacatttttctttgctttatcataaatagaattcatgaactgaaatgccatttttttacgctcctttttttgaaatttggagaaagccaccgtatttgcagcgactttctccgacatttggttttgatgtacagtgaaatcttttgcaatgaaaatattctgaccagatttccagcgtacacccaggtattcaggttaggtattatataaggttattgaaaattacttgtttataatctttcccgtacaacggcaacaaaatctccaattgtattcaggttacttgcttcctgaatttcaattgttacattcaactgatcctcaatagtggaaatcatgacgatcatcttcatggattcattggataaatcctctcgaatgtcggttgccagtgtaatgccggatgcatctacaccgtaggcatctgctgctgcttcgataacagcttttgccacatcatccagttcttcggatgactgtgctgctgtcgctgtatcagaattatttgctaccggtgcattcgaagcaattgtctcttcacccagacgttcttttactacatttacaaaatcagcaattgtattcaggttacttgcttcctgaatttcaattgttacattcagctgatcctcaatggttgagatcatgacgatcatcttcatggattcattggataaatcctcgcggatatctgttgcaagtgtaatagatgctgcatctactccatacgcatctgctgccgcctcaataacggtctgtgtggttgcatcattactcagatctaccgttgcagttgctgttgcagtttttgtctcttctttctttggttccggtgctttaatttccggaatctttttaaatccgttatcttccaccagttcccaggctacaactttcatatcttcatcctggaacagtaacggttttacttctacttcatgctcctgaatatactgatcaaattcttcgtatttgtcataatctacatgcagcaaacttgcattaaacggatccataccaggtacttcaatctctactgcaaagtaatctccctgtgtgttacggaattccggatcaccaaatgcaccttttgtcggaagtgcctgctttacaataccacgcatatttgtcagatccacccactcggtatccagacctccgcactcgttacagcacagataaggaggaaactcgatatgtccgcatctggtacattttcttcccagaatggttccttcttccaaagcatcataataagtttttacaattggttttaaatcatattttgtcattttaaccatcgtcctcctctcctactttctctccatcatgatattcaatacgttctggcttccgccaaatccacggagcattgcgtgttttacatcatgatgaacctgtgttgcacctgcatctcctcgcatctggtgaactgcctcatacacatcatgtaatccggaagcacctgctgcatgaccatactggcaacggccaccatttgtattgatcggacggtctccatcataagcaatacggccttcttttgtatactgccagccttcacccttcggcagatattcacacatctcagcagacaggaattcagactgattgtagaaatcatttgcaaggaagatatccatatccgcacctgtcagtccggtcagttcttttacctgacgatatgcattctgtgttgcatacatctcatttctcgggtttccagcctccacattagaatgaccgataccaagaatctcaatcggatgatcggtatatttataagccagttctgtcgggcatacaataattgctgctgcaccgtcacaacgctgttcaaagtgagaacctctcatatattttccaattaatggattgaatttggaatgcagatactcataagcggaatccataccgtttgttgctgcaagttcctcatatgtattattggtaatggtactcaacggatttaatgctgctgcacgacggcagttgacagataaagcagtcatcattgcatccacatcctcttcgctgattccattctcttttacataataatccagccaggattcagagttaaatggcagagaaccacgggtaaataaggtataatctctgcactgagtagaagccagtacatcatggaagatcgcatctgtaccgaaacgacgttttgttaccactctggtcgggtatgcgatggaatatggtgtctcgatacaaccactcagaaccatgtcatattcaccggaagcaactaatgcaacggctgtctccacgcccacataaccggttgcacatgcttcactgtgatgataggagccttttcctttcattccgatccagtttgccacatgcatgtttggagttgccaggttactggtccatcccggtccggcctgtccatggatataaaattccacatcactgccatcgactccggcatctttcatggcatcccgcgctgcatatgcaaaaagttcctgctcattcataccatctacggacggatcatccaaaatacggacaaacggagttgcacctacaccaatgatggaaacgcttcttttaaacggttttaatttcggaagattatcattaaagctcatttttcattctcctttttatcaatttttacagttcacaataactatctctgctgattacattgtataaaaaatatgactcactttttttgtatgatatctgcgaaatatacaagtgtttttctacactaatgtagaataagtgtttttacattgcttattatttcgtgtataataaaggacagacagaggaggacttgaaatgtacatagggttaaaacaaattcaatatcagttgggagactattccacactgctgacttcatccgatggtatacatgccctgactggatggaataaactatatgatgcgccgcagccactgaccatccatttactgtatacatgcacctatacaccggaactgctctctttcccatttattcaggatatacatcttttatgtattgttcctgaggatatcaatatggatatactgaacagtcagttcccggattttgtaagtgtcttatttgtgcaatgtaataatcccgaaaaaatctatggtcttttgcaaagctattacactattcagtgcggtgttggattttacggttctacactcctcgattttctggcttttgataacggattacagccagccatcgactattcttaccgggtatttggaaatccggtatttgtttttgatgcaaattataatctgatcgcagctccctttgaaaaactaaaagatcagaattttacggatcgtacactggagaaaaaaggatttaccgatcaggattttaaaatggtcagccgacagaataatatccatgaacgggtaaaaagaagtgaactcccaatccatgctttcaatgaagaactcggttatgaacagctttactgttccattaacacaagcaaagatctcggtcatattgtcgtttcagccatcaataaaccactggaaccgattgatactgaatttctgctgattttaaaaaaatatatcaatgagcagatcataaaagatgcattcattcagaatgcgcgtggatttaactatgaatattttatccgtgatctgttggatcgcaaaattgccgcagaccgttcttctattacacatatgaattatgtaaaagatgatttcaacggcaacaattactgtatcgtcatcgaaattgcaagaagtcaggaaaccgtcaatgcacgtcatgtccgaaacatgctggagagccggattccatatctgaaaacagttatttacaatggtcagctcattgccatcattacgattccgaccaatcagttgcttccaccagagtatatagataccctgaaaaagctctgtcaggaaaatgggctttttgccggtatgagcaactgtttccaggatattttgaatattgaagaatactacaatcaggcattacgctccattgaacttggtacatgcaaggaacattcacccaacctgttttcctaccaaaattattatctggaacatatgctgaattcttttacattaaatgaatccagctggacgttctgtcatccgaaaatgcagtttttgctagattatgataaagaacaccattctgagcttgcctatacattatacatgtatctgactcatgaacgaaatctcgctgcaacggcagaagccatggatatgcaccgtacctctctggtctatcgattcaaaaaaataaacactctgatcggagaagattttgacaattacagggaacggatgtatctaattctttcatatgaaatgaaccgtccaaccgcataaatactggggtgcaaccaaaagttgcgcaatcgctcacatcgattggtagacattttccaatgattttttatactgaagtcaaatgagatacattacacactttcagaaatactctcgtatttttactactgactaactatacaggat

SEQ ID NO: 13143 - DNA, 3863 bp, Unknown
  gut microbiota DNA sequence
ttatatacattacgaacgaaacagaatatgacacaggaacagcttgcagaaaaattgcaggtttcccgccagtctatttccaaatgggaatccgatgccacacgcccggatcttgaaaaattaaaatttctggcagagttttatcaagtatcattggatcaattattagatgaaaatatggatatttttgcggaagaatcttctgatttgactcagaatgatgattgcccgccaaataaccagaatggtacaaatacatcaaccgatttcgctttcacaaatggtagtcatgatgctactgatcatgatcattctactgcatccggcgtttccccggaaaccattgaaaagattacttctgaaatactgaagaaaaaccataaaacctggaagcggactactattggatttggtactgcgtgtctggcactgacggttgccttgatcgtagtcacagtaactttttccacgaaattaaatgcgctttccactcagattgcacagagctccgctccggtttatataaataatgattccgattacaccacggaacgggatacttattttcaaagttataacgcgactgcggattccgttacggaagatgggaaaaatctgcatgtcaaatttactgctgttttgaaaaactatcaggataacacgactctgaccatgcagcttcagaataactcggatcaaaataatattccggttacatttacctgtgaggacggcacctatactggtttcgctgacctgccgatcagtgctgacacttatacaacaactgcatgtatcgatacaaacggctcaaaacagaccgtagatatgaatgatgagtatagttctttttctgtcctgtcattagcagactggcagccaagtcttcaagctgacggaaattcctatgataaactgaatcgtcgtaacgatggtcactttggcctgagcagtaacaatgtcaattgtcgtttctttatctcgggcgtcacacttgaggttctggcaaatgacacaaaagtatactcttataccctggatgaagatgatatgagtctcttatctgaggatggaactacgctttatattccatacagcttcacggttccaaaagataatacagcagaagattacaccgttagactgcactggtataattccacgctgaaacaatatattacctatgaagtaagtggagtcggagtaaactattttaatgtttcaaatgctgatattattactttcattctatttaacgctgatctggattctaatgacgctgctcctgtaaaggttacattttcatcaaccgaaccttaactacatgtttatgcgaaaggcagagagactaaaactatacacggatttgttattacacatccattaacgaaaacaaaaatcttttgcaaactacgtaaaaggcgaacaggtcattcctgctcgccttcgtttgcttcttccatatcaatacatgcatcttcgactgcatccacaaagctgacacgtatgacagcctgcgcccagttcatactgatccttgctgctttctgtttctcatcccctgcttttttgatctgctctaacagttcctgaaaaacctcttttgtcagataacctccgcgccaatgaaaggtcagtaatctgcccttttttgctgcctgcaaagaccgtttatacacatcttccatttttgtaaaagaaagctttttctcccgatagtaaaagtgatctccatccgtgcaggaaggagccggtgcgatcagcggttcgtgatcccggaaaatctttttatcttccagattgaaataatcatagcgcagttcctgtcctgcaagactgtgcttcccaagggtattgtcaaatgtaacatccagatgataaaactgtccgccgatttttacgatattccatgtatgccgatacttgatgcctttctctggattgtttccgcaaatggcaatcatgcaccagatcccaagggcatcacacagcactttcacagattttgcaatcccctcacagactcccacaccatgtcctaacggtccaatgatttcatgggaatatgcttttttcagtttatcgtaagtgacattttcacagataaaatcgtggatgtatttttccttctcccactctgacagattttttgccgcccgcgccagtttttccacacgggctttcatggctttctgatgctcccgaatcttatttttatcaaacaaatattccggaagcaggatcagattggaagaattgtcataatagcggtactgatatcccgtcgcccagaacacttccggatgatccagacgcatttgaaaaaagatatcatacaactcccgcccgtcaattcgcggaatctgaatctctgactccaatgcattgatgccctgcagcattccgtgatacacagcctgctgcagtttattcatcttgttatagtaaaacggttccataatgatacgttgtccttactcctgtacacgtcccattttctgagcaaagctgtgcagcgcatccgggatctgaatggtctgcggacagactttctcacagctgtggcatccgatacaacactccggctgtttctctgcatctacagaagacagtgccattggtgcgataaatgtgccggagcctgctaccattgcctcattgtataatttcaacaggaacggaatatccagtcccttcgggcaatgagatacacaataatgacatccggtgcaaggtacagttgtcttgcggatcatgtcatcagccacaccaaggattaactccatctcagcctcgtttaacggcttgttttcctcataagttgcaatgttgtctcttaactgctgcatgttagacataccagataatgtcatagttacttccggaattgcctgcaggaaacggaacgcccacgccggtactttttcatccggtcttgccgctgtcagttttgcagttgcttcctcagaaagagttgcaagctgaccaccgcgaaccggctccattacccagatcggaagattccattttttcagtaattcaacttttccttttgcatcctggaatttgtaatcaaaataattcagctcgatctgacagaattccatgtcttttccgtatgcttctaaaaattttgtcatgcactcgatatcaccgtgtgcggaaaagcccagatgtttgatacgaccgttgcgtttctgctccatcagataatcataaatgccgtatttcgggtccagatatgcatccacgttcatttcacagacattgtggaacatgtaaaaatccaaatactccacctgacactttttcagctgatcctcaaaaatctcttttaccttcggcatattggtcaggtcatatcccggaaacttggaagccagataaaaactgctgcggtcatattttttcagcagttcacctactacaagctcggattttccaccgtgataaccgtatgcggtatcataatagttaatgccggattccatgcagtatgcaaacatttcctccgcagcttttacatcaatctgattgtcgtcaccgtcgataaccggcagtctcatatttcccattccaagagcggataattttaatccctgaaattcattgtaaatcataaaggtatcagtctcctttctcttacccagttttccattttcttattacatcatcgtttttattatacaggttgaagtgcactccaagtcaagccttttacaaaaaatgtaaaagtaacttccagatggcaaattttttattaccatccacacttctcctgcatctctgcaatgcttatgcccacacaaactctcacataaatcaaatcatattcaatgcctctgcatccaaggttgtaaagc

SEQ ID NO: 13144 - DNA, 9583 bp, Unknown
  gut microbiota DNA sequence
accaagtctcacgtgcgttcgacttgaactctgtttaagctgttatgtctgcttctacaggtagcgaaatgcagcagattttcttatttgagttgaaattgctttagcgagatgaacacaggtaaaaaagtgaaggagatagatagatggacgtagaccttgggcagttaagagagccgtgcgcctgcggaaaagcacataatattgacgttgggaagatcagcatcgaatccggagcagtcagagaactgacagacattctggaagcatttcagaatccggtatttatatgtgacagcaatacgagggcggcggcggaaccgtttttagaggaagaatttaaagattatccggtcattgagctgaatccgaaaggacttcaggcagataaccgtggtgtggacaaagtgatgaagcagctggattattgtgacagaggcttaagcagtgtgtcagtagatgtgctggtggcaatcggagcaggaaccattcatgatctgacccgctatgcggcaaccgagtatgatattccgtttgtatcggtgccgacagcagcaagtgtggatggatttgcggcaaatgtggcagcattgacactggacggattaaagaaaaccgttgcaggtgtttcaccacgctggattcttgcggatactgatatttttgcagcagcaccgtccagactgacggcatccggagtatcagattttcttggaaaatatatttcgattctggactggaagatcgcgcatctgatcacagacgaatatatctgtgaggaagtatgtgatctgctggaaaaagcactgcgggatgtaagccgcgtactggatgatatccgtttcggagacagagaggcgatcgaaaaactgatgtatgcactgatcctgtccggactgtgtatgcagatggtagacagcccacgcccggtatctggagcagaacatatggtatcccatatgtgggatctgaatgtattaaatgaaaatacaaaggcgttgcatggtgagcaggttggaattggtctgctgatcatcacagactattacaaacgtctggcacatgcgatccgccataaaagagtaacggtcaaatcagaaaccgccaaaggacttgaaatgagtctgttggaacatacatttggaaaaaaaggactgttagaaggaattctggcagaaaatacaccgaatccgttagaggatattgatttagagcagttagaagaacagcttccacagattgaagatctgatcgatgaccttccggatgcggatgatatgtatgcaaaactgcatgatgcaggatgcatgcatgaggtttcagcacttggtattgataaagataccgtagagctgactttgcagagcagtccatatgtcagaaaccgtctgacattgctgcgtctggcaaaattattagagtggtaaaaaaactgaaataaaaaatccacagatattatctaagaggggcgtcttagcccgcgtgatcatatctgtggattttttcataacttaaatcatagccacataagaatttttccataacctaaatttctgacacaaaagacttcatcacctacacaaataatcccagatcttgaaggacaactcatacaaaaacagaagatgactgtctgtgagtgaaatctccagcagctcttctattttttttacccgataaaagaacgtactgcggtgaatatgcagaaattccgccgttttcgctgcattccgatcgtgatccagatatgcccgcagcgtctcaataaaatccgtatgatacgttttatcataatcctgaagctgaaaaatgtgatagtggatccccacttcaagtccctgataatcacagttggaaaacagatattccggcagcgcatccgtgctgtaatacagatactgatccggtgtctgcaaatctgacaattccagtgtatgaagtgcctgattgtaaaaaatccggattttcagtacatcagcaaaaggctggctcagactgactttcagttgattgcgctgtgcaaaccgctccaatggatccgttagtttttcatttaactgcaccggcgtatcctgattgatcagcaggataatgttatttttataaactacggacatggcatttggatagacctgccgcagtgctgccatctgccgtttgttaaacagatcactgttatgcggatgagggcagtacaggatcgccagacagaaaaattttccaaagtggcggtttaagagtttcagtctggcttcaatgacattgacatcgttaaaacgtccttctaaaagttctgtcagaaacgtttcatattgcaaaccggtattctgcacaaaaaactcatgtttctgcatttcaatggcacagatatcagaaaaagcggtgatcaggcgcagttcgtgttcgctggcatccgcctgatccggcagacaaagtgccacataaccggtcataacatgctggatgcggatggcacagaaaatccagtttgtatccggatgatcctctgtctgaataaaaaatgcctgattgttctggtagatctggtgctcaatctgcagacggcgcagactttctacttcctgagaacttaaaaacgttccttctttacttttttccataccaaagggcagttgatgcatcagcggagagatcgcgatcagactgtagctggcatccagaacggacatggggcggtgcagaaaggattctgcacggataatcagatcttccagtccgcgaccgctgtaaagcaggtggtaaaggtcgttgatctcctgctgcaagcggaattcaaagttcagccggtgattcaaaaaggaaaacaattctgaaatatccggcatatgcgtcacaaaaaggatagagctttccataaaagcggtatctatatgctttgatgaaactgtatcttctgatgaaacgctgcagatagattcatgatctgaacaaccgctgtcaggcatttccatcataataaccggagacagcatcggatctttttccatctgtgcaaactgtgtctgtaaagcagcatatctgcacagcatttcgggattagaagccacttctggcggacacagatacagcgtattttcatcaagaatcgtatcaatctgaagcacatctacacgactgataaaacgattggtatcatagccattttttatgctgcaggaatatgtttcctgtagtttctcaagtaaagtctgtaaggtgatcataagcatctccctgtgtatggataccgatttttccattcgacatttgttgaaaataaagaaaacaggatagcagattttcaacagttgtcggaagctttccggtggtctgcatgttataattttatcagtgattataacgacagtgtaccataacagtaccgtgcacgtcaaaaatatatcagatgggagatgactcccacctctataggtggtgagaaacaagctagtatcagtggtgggagccaatcccccatctgatatagcctccggcaggagtacagaggtgcgcagttgaagtatgtcatgcaattgcatgacgcgcacctcgcaacaagaatgccggagcattcttgaacaaaacatcaggaatgtgtgacgttcctgaaaaatgagaacaaaacagaaagaaaatcagaacgacaactgttgaatgaagaagaacagaagggagaaaaacatggcagtcattacgattgacggcacacgtttggaagtgccggagaataaaaatgtattggaatgtgcgctggaagccggaatttatattccgcatctctgccatcatccggatctgccggaaaatggttcctgccgcatgtgtattgtagaagtagaaggtcaggaaggcgtaaccacatcctgtaccctgcgtgctcaggatggcatggtcgtacataccacaagtgagcggatcaacaaactccgtacattagcactggagctgctgcttgcaggacatccggaagattgctccacatgtccgaaatacggaaactgtgagcttcagacattgatccagtacatcggtgcaaacaacgcgcgtatgcgtacccgtatcaaaggtatcaagatggaagagggcaacccgcttctcatccacgacatgaaccgttgtgtactgtgtggccgctgtgtacgtgcctgcaacaatctgagaggtgtaggtgtattacagtataacaaaaaagaccttgagacatatgtaggaaccttacatggcaaattactgaaagacgaagactgtcgtttctgtactgcctgtgcagaagtctgtccgaccggttccatccgtgataaattacagcttctgacaaccaacctgaaaaaagaagaggcactggttccgtgccgtaccgcctgtccggcgcatacggatatcccgcgttacatccgttttgtaaaagagggcgattatgatgcagccgtagcggtcatccgtgaaaaagtaccgttcccgaacgcactgggacatgtctgcagccatgcatgtgagctggagtgcaaacgaaaagaagtcagcgaggcaatgtccatccgcgacatcaaacgttatgcggcagagcatgacactggccgttactggaaaggcaaaggaaaacagcttccggataccggcaagaaagtatgtgttgtcggtggaggccctgcaggtctgaccgcagcatattacctgagaaaacagggacacgccgttaccgtaaaagaggcacttccgaccgttggcggtatgatgtcctacggaatcccgtcctaccgactcacgcgtgagatcgttgcacaggaagcaaaagtgatcgaggatcagggcgtagtcatcgagacaaatacaaaagtggaaaaaccggttgaattactgaaagagtacgatgcagtcttaatgaccatcggtgcacacaaaggtgtccgtcttccgatggaaggcagcgaacttccgggtgttctgttaaatattgatttcctgcgcaatgcaagtcttggtcaggagaccggaatgggcaaacgcatcatcgttctcggtggtggtaacgtagctttcgactgtgcgagaactgcaaaacgtctgggcgcagaagaaattcatctggcctgtctggaagcaagagaagttatgactgcagacgatgaagaaatcgagcaggcaaaagaagaaggcatcttcgtacatccggcacagacttttgagcgtatcacaggaactaacgctgttacaggtgttgactttatgaacgtaaaatccttcaccttcgatgagaaccgcagagccatcatcgagaaagaggaaggcagcgagcatcacattgatgcagacactgttatttttgcaacaggtcagcgtccggatctgacagaagaagcaggtctgaccttaggcagagcaaacagcattgtagtaaaagaaaattcccttgcaaccgagaccgaaggcgtatttgcagcaggcgacgttgtatacggaacaaaatccgtcatccttgccattgcatcaggccgtgatgcagcggttgaaatagataaatatctgggcggcgacggagacatcagcgagacacttgctcccgagcagcatgcagatccgaaaattggtaaagtagaaggatttggttaccttggacgtaccaagactcaggtgactccggcagcagagagacaggacaacttcaatgaagtagaccacggtatctgcgacgcggatatctgcggcgaggcaagccgctgcctgcagtgtgacttaagacttcagatccatccgtccagactgtggaccgagtattctaatcagaaggaggcgtaagacagatgagtgctttagaaaatgcaaaaaacatgagtgttgaagatattctggcaaaaactgctgcttccggattgatcgaattcggtgtagagcgcagagcagtggcagaaaaatggaatcaggtaaatgcagaacgtgaatttcagacaaatccgattcgcgtggttgcaggtttaaataatgcggatatcgcaggggctcagctggaagtactgaaagctgacccgaaaaaagtaatggaaggtatggcgattgcagcgctggcagtcaatgcagaggaaatgtatctgtacattccggcaaaagaagctgagtatacaaaaaagctggaagcacaggctgctgagtacggcatccagatccagaccggaatcatcaaccgcagagcaagccgcggcggtgcattccaccatattttgaccatggctgcactggcagatatttttacagacagctatgagccgtgcacttacatggcagtctgcaaagacggaaaaatgggtgagcttcagaaagtatcttttggtacaaaagtagcagatctggtaggagacgcagatgtgaaagccatcgccatcggtacaaaactgtacgacgcatccgctatggatctggtgatcgaagcagatacccagatcggaaacggtgtgatcactgtttacggttccaaatgctgtatgatccatgagacagaggaagtattgctggcagagcgcaagcagagctgtggaaaatgtacgttctgccgtgaaggtctgatccagcttcataccatggtaaaagaaattaccgaaggacagggcaaaaaagagtttaccgatatgatgacagagatcggagaggcaatgacattctccactccgtgtaccatgggacagaccgcatccgatttcgcgatgggttccctgaactattttgcaaatgagtacgaagatcatatcaagaagaaaaaatgtgcaaacaacgtatgttccgcatttatgagcatttacatcgatccggacctctgcgagggctgcgaggaatgtgcggatgtctgtccggctgacgccattgagggcaagagcggatacattcacatgatcgatgaattcgaatgtaccaagtgtggaaaatgtatttctgcatgtgagaatgatgccatcattcagacaaccggtcgtctgccgaagctgccgacccgtctgacaaaatgcggtaaattcaaaaaacgtcactaaaattaatttttataaaaacaggaggtatttcattatgaaaacaatggaagcagatgtaattgtagtagcagcaggtcctgcaggtcttgcagcagcaatcacagcaggtgagaacgacctgaaagcaatcgtatttgagaaatccaacacaacaggtggagcagcaaacatgggtatgggaccgcttggaatcggtacaaaataccagaaaaaagcattctgtgacatcacagtagacgaagctctgaacaaacatatggagtatacacattaccgtgtagacagcgacctggttcagacatacttcaacaaatccgctgataccatcgagtggctggaagacatgggtgttgagtttgcaggtgcattccgttacttcagagagtctgaggcaacatggcatatcgtaaaaccggagaacggtgtcatcggaccacgtgcagcaggaccgatggttcgtgccatgacagagaaagcaaaagagcttggcgcagaaatctaccttgagacaccggcaaccggactgatcatggaagacggaaaatgcgttggtgtaaaagcggttgacaaagacggcgaagagatcgaagcacgcggtaaagcagttgtagttgcaaccggtggattcggtacaaacaaagagatgatcaaagataactttggttacaacctctgggaggactacttcccattcaacgttccgggtacaaccggtgacggtctgaacatgatgtgggatgcaggcgcacagaaattcggtgcaaacatcgagatgatctatcagttaaaagacaacatgaactggttcctgttagacgcagttcttcgtcagccaaaccttctgatcaaccagaatggtgaccgtttcatgaacgagggtatgatgggtaacacaacttacacaggaaacgcacttgcacttcagccgggacattacggatactgcatcatggatggcaaaatcctgaaaaactacaagaaaaacggtccggatatcttcgatatcgttcatccggaagatgcattcctggcagttgacgctgagttcgaccgtgcagaggaagaaggatatgacggattcatccgcgcagattccatcgaagaactggctgagaaacttggcattgatgcagacaaactggaggagactctggatgactacaatgatatgtgtgatgagggatacgattctcagttccacaaaaagcatgagtatttgcatccaatcacaggtaagggtggctacctggtaggtaaatactacattgctgcttatggaacagtcggcggtgtcagaatcaacaaatacggcgaagttatggatgcaaatctgaaaccaattccgggactttacagtgctggatctgatgcaaacacaatctatggtgacagctataactttacactgtgcggaaacaccatgggatttgctattaactccggacgtatggctggtgaggcaatcgcagattacattgacgacaacttttaagagtttctgaggacgtacgtttcgagcagatgttgaaatcatgtacgcagacacggactattttctaggtatcctgcatcgcttatttccgtccccttccgcgaattcgcttgcaatgaaatatagtgttaattaaataacaataaaagcagaagaaaaactggataaaattgatatagggataggaaaatataggaaaagcaacctgaatttactttttgaagtaaacttcaggttgtttttttcttgaaacaaaccataaaagtgataaaaatttaacaaaaaggtattgtgttttgtatacaaacctgttattctatggtcgtaaaaaatgattaacaatagctaaccagaaagtgaggacgatcatgaaggaatttgagcagtgggatggttttgaaggacgtttgtggaaagaagaagtaaatgtccgcgattttatccagaataactatactcagtatgagggagacgaggagttcctggcaggaccgacagaggcaaccaaccgtctgtggggcaaacttcaggagttacagaaagcagagcgtgcaaaaaacggcgttctggacatggagacagaagttgttacttctctgacagcttatggtccgggttacatcgatgaggaattaaaagatctggagcaggttgttggtctccagacagataaaccgctgaaacgtgcatttatgccgtacggtggaattaagatggccgaggaatcctgcagaatgtacggatatgagccaagcgaaaaaattcatgagatttttacaaaataccacaaaactcacaatcaggcagtatttgatatttatacaccggagatgaaagtcgcaagacataacaaaattttaacaggtcttccggatacttatggacgtggacgtatcgttggtgattaccgtcgagtagctctgtacggtatcgacaaactgatcgagttcaaacagaaagattttgaagcaaccaaccgtcagggtatgcgtcgtggtgacttccagttaagagaagagatcgcagatcagatccgtgcattaaaaggcatgaaagagatggctgcaatcta

SEQ ID NO: 13145 - DNA, 202 bp, Unknown
  gut microbiota DNA sequence
ctacagtttttgaaaatgaaaaatattgaagtgttgaagttttatccggaacgatttttaaaaaaaggtttttcggaacacaatgaaagaagtgttccagaaaaaacaattgctcatctaattaaggagctgccggcattcccagagcatttacagttgatgtatttgattttgttttgcacaggaattaggaaaagcgagg

SEQ ID NO: 13146 - DNA, 10484 bp, Unknown
  gut microbiota DNA sequence
acttgcagaagtgggagtctcaactcagactgagatgaaagctgtcacaaatatgataatcgttaaaccgtggtagttaagtcgaatggcaaaattacgataaggaaaatggagcgggatatggaagaaaaacaggcgggaatccgcattaataaatatctcagcgaagccggggtttgctcccggcgcgctgcggatcgtgaaattgaaaagggaaacgtatggattgatggtcgaaaggcagtgaccggtgaccggatcctgccgggaatgaaagtgacgttttgcggaaaagaagtttctcctgaggatgaggagattctgatcgcgtttcacaagccggtgggaatcgtgtgtacggcagagaaacgggaaaaaaataatatcattgattatatcggttatccgaagcggatttatccggtgggacgactggataaggattctgagggtctgatcctgctgaccaatcagggcgaactggtgaataagatgatgcgggcaggcaattatcacgaaaaagaatatgtggtgacggtcaacaaagatattaccggtgatttcttaaatcagatgcgaaatggtttgtacctggaggaactggatgtacatacgagaccgtgcaaagtgaaaaaagtcagtgcgcgaacctttcagatcattctgacacagggatacaaccgccagatccgaagaatgtgtgaagcctgtggctaccgtgtgcgaaagctggtgcgtacaaggatcatgaatattttgcttggagatctggaagtcggaacgtatcgggatctgaccagagaggaattgcaggagttgaagaaactgacggcacattcttacagtgcaccaaaatctggtaaaaaggggacagccagaaagtaagttaagactactgaaaaatcgagcagatcaaatcaaatagaatgcatgtggaacttggcatgtgacaaaatgacctattctttacagaatatagattgacgtaagtataaagacggagaaatgaaaatggaacaggaaaattataaagtaagggcagaagaactgcgaaaacaaatagaatatcacagcaatcgttactataatatggatgatccggagattaccgattatgagtatgatatgatgatgcaggagttaaaaaagctggagaaagagcatccggagcttgtgataccggattctccgacacagaaagtcggcggaactgcaaaacgtaccgcgggcgtgttagtgcgtcataatgtgccgatgctgagcctgcaggatgtattttctaaggaagaagtctatgagtttgtgcatgagatgcaggaacagttagaaaatccggagtttgtcgtagaatacaagattgacggactttccatggcgcttcgttatgaagaaggcgaattgaagctggcagtcacccgtggagacggtatcattcagggtgaggatgtgacggcaaatgccagagtgatttccgatgtgaagaaaaaactgaaacagccgctgccatatatcgaaatccgcggcgaagtttatatgaaaaatgcagattttgaaaaggtaaatgagacacaggaaatgcttggcaaaaagatctttgcaaatccacgaaactgtgcggcaggcacgctgcgtcagttagacagccggatcacaaaagaacgaaaactttctatgtttgtatttaatgtgcaggaagtgcgtggacatgaatttaaaacgcatgtggaaggatatgaatatctgaaaaaacagggcgtcccggtgatcgaagattaccgtgtctgtcatactgcggatgaggtgtgggatgccatttgcaagattggcgagaacagaggaaatctgtcttatgatattgacggcgccgttgtaaaattaaattctatcgctgaccgtcaaaaacttggagcaacctctaaagtaccgcgttgggcaatcgcatataaatatccgccagaggagaaggagacaaagctgctggatatcgagttgtccgtaggcagaacaggacgtatcacgccgactgccatttttgaaccgatccgtctgtgcggaaccagtgtttcccgtgcaactttgcataaccaggattttatcaatactctggatgtgggaatcggggataccattgtggtatacaaatccggtgagatcattccaaagatcaaagaagtgcgcaaggaaaaacgtccggcagactggcagcgattccagattccggatacctgcccggtctgtggagcaaaaacggtccgggaaaaagatacggcagatattcgatgcgtttctccggattgcccggcacagttagagcggcatatcattaattttgtcggacgtgatgccatggatatcaagggctttggtgccgtttatgtgacagaactggtacgccttggctacattcatgatattgcggatatttacgttctgaaaaatcaccgtgaggaactgatcgaacagggcattatcggaaaagagaaaaatacagacaagctgctggatgccattgaacagtccaaacaaaatgagccgttccgtctgctgacaggatttggaatccagaatgtgggaaaagcagcggcaaaggcaattatgcgccagttcaagagcattgacgccctggcaaaggcagacagagagcagcttctggaagtgaacgatatcggagaagtcagcgcagagtgtattcttgattatttcgcaagtgaaaagaatcagaagattttggaacgcctgcgggaatatggacttaccatggaactggcggaagatgatacggtcggtgatctgctggcaggtctgaccattgttgtgacaggtacgctgccaaaccttggcagaaaagaggcacaggagctgattgaaaagaacggtggaaaagctgccggcagtgtttcgaaaaagaccagttatgtgctggcaggtgaaaatgccggaagcaagctgacgaaagcggagcagcttggaatcccggtaattacagaagaagaatttctgcatatgatccagaaggatgcataggcagaaaatggattgaaaatagatagggctgtatgggttatttgtgtataagcaggcagcatgagcggattgatccgatttgccagcaggttgttagattgacggaaatttgggatagtgacagatgagtaaaaaggacaacagacacgaaaaaaaacggaatatgaaagagttacttgctacgatgttcaaaattggctgcatcggatttggcggcggaacggcactggtgccggtcatcgaatccgaagttgtatacgaaaaaaagctgatcgataaggaagaatatacaaaggacgtgatcgtggcaaatatcaccccgggtgcccttccggtggaggtggcagcaggagttggcaggaaggtctgcggaatgccggggatgctgctctccgcacttctgatgggaatgccgggaacgttcctgacggtattactgctgattctgatcaacagttcgggaatacgggtgttgcagcagattttgtttgcttccgcaggtgtcaccgcctatatcatttatatgctgatcatgtatgcaaaagggacctggcgggaatgtcgggagagtggaacggcaaaaagcggtatgttttttatgtttctggtgtttttcctgacttccggaaaggaactgtttcagttatttggcatcaatcggacaccgatttttgatatttcaaccattgacgtgttgtgcgcggcattttttatcattttttataccggtggtgtttttcgatggggcagagtgatcgtatccattatcattacggtgctgtattgcctctgcgtaggaaaaatgcatctgatcagcagtacagtggtgcttggaatcatccggcttaccatggtgatgctgtcaatttatggactgcgtactggtatcgaaggaaagattccgttttcatggaaatcgttaaagcggttgattcgggaggaagtctgttgggcggcaatgttttttctgctgtctttgccggcgttgctctgttttggaaagacactggcatttgcgggcagaggattgatctcagcagttatttcatttggcggcggagatgcttatctggcggtggcaaacggtatgtttgtcaatacgggaatgatcggatatgatgatttctattttaagattgcttctgtagcgaatggtctgccgggttcgatcctgtgcaagatcctggcaggagtgggatacatattggggtgtcagtccggcggtgtctggtgcggcatttttgtggcattatgtgggtttgcctgcagtattgcagcatccggcggtacattttccgcagtagtctatatttatgaacgatttgaaaatctgcagatttttcaggtgctgcagacgtatatgcgccccatcgtggcaggattgcttttgacagtgtgcacttccatgatctatcagaacataagtattgcctgctggtatttctggccgctggtatctatggtactgctgacctttggcatttttctgttaaatgtattctggcggcggcgcggtgtggtgcgcccattacagatggtactgttttcggcggcggcatccctgatcgtgtgcaacgtatttgcatcgatcccataaaaaaacgttttcaaacatcaaataatttgatatactaataaataatattgaaaatctgattatgataaggaggtttttttccatggctgaagatagacgaggattaaagatcaaagaggatggacttggagaagttcagatcgcagaggaagtaattacaattattgcaggactggcagctacagaagttgagggtgtctgctccatgggcggcaacattacaaaagagttggtaagccgtcttggtatgaaaaatctttccaaaggtgtacgcatcgaagtggatgaggaggataaagttcaggtatatgtaaccatcaatattgcttatggttatgcaatcccggaagtatcccgtaacgtacaggagaagatcaaatccgccatcgagaatatgacaggactggaagtatctggtgtcaatgtaaggattgcagatgttgatatgaaaggcgcagctgagtaggaaaatctgcgcgtgggcgtatggtgagcgccacgaaatacaaatagaaaaacggtggaggaaaatatgagccgaagagaacagagagaacagatttttaaaattctgtttggagttgagtttcacagtgcagatgaactggaggaacagattggattatatatggaggatttgggagacatccgcaaaaaagatgccgactatatgaccggaaaggtacgcagtattgtggagcatatggatgagatcgacggaatgatcaaccaggcatccaaaaactggaagacgacacgtatggcgaaagcagagctttccattctgcgtcttgctgcatatgagatcaagtatgaggatgatattccggtatctgtatccattaatgaggcagttgaactggcaaaattatacggatcagatcatggaccggcattcgtaaacggaatcttatcaggaatggtatgaaacaacgaaatgtctattccgtcggacagataaacacgtatatccgcaatatgtttgctcaggattttatgatgaatcatgttgcggtacgtggggaagtgtctgactgcaaatatcattcttccgggcacatttatttcactttgaaagatgagaccggtgtgctcaaagcgatcatgtttcggacacaggcagcacggggactgccttttcgtatgaaagagggcgaccgtgttgtggtgatcggagcgatccggatttacgagagagacggaaaatatcagctttatgcggaagaaatttcccgggagggcgcaggacttctttatcagaaatttatggagacaaagaaggaactggaagaaatgggcatgtttgcggaagagtacaagcagccgattccacgttttgtatcccgggtaggtgttgtgacagcaccaaccggagctgctgtccgcgatattcagaatatttcacaccggagaaacccttacgtacagatgattttgtatccggcactggtgcagggcgagtacgctgcggcatctatcgtgcagggcattcacgcgctggaagcaaaaaatgtggatgtgatcattgttggcaggggcggtggttcaatggaagacctgtgggcatttaacgaagaaattgtcgcacgggctatttttgaatgcccgattccaatcatttccgcggtgggacatgagacggattttaccattgccgattatgtggcagatctgcgggcaccgacaccttctgcagcagcagagctggcagtgtttgaggttgaccgggtactggatatgcttcaaaacggacgagaactgctcatgcggcgtctgcagcagcagattgagaaaaagagaagttttctgcgggaatatcagttgcgcttgcagaatctgcatccgaaaaatcagttactgcaaaaaagacagtatcttacggatcaggaggaagcattagaacgtaaaatgcaggagattctgcggcagaaacggcacagactggaaatgtatgcggcgagactggaaggtgtttctccattaaaaaaattgcagggaccgtatgcgtttctggcagattcggatggaaagccgttgcagcaggcagctaagctgcatccgggagaccattttacagcgcatatgctggatggcacgattgaagccgaagtgcgccagattaagaagaaagaataatatctgcggacattttttgcgaagaaagttctcagaaaatggagagcagtcagtataaaggaaatgcacaatatggaagtaaatcaggcatcagaaaaagatacagaagccggacaggagcgtcagccatctctggaggagctgtttgcacgtctggacgggattcttaacaatatggaagatccggatatttcactggaggatgcgttctctctgtatgagcaggggatgaaggacattcgaagctgtaatgaaaagctggatctggtagagaaaaagatgatggtgatcgcagaggatggaacggaagttccttttgcataggagaggtacggaatatggaaatcaaagaaaaaataatggagcataccaaagaggtggaagatattattgtaaaatttcttccggcagaggaggggtatcagaagacggtcatggaggcaatgaattacagttttctggcaggcggaaaacgtctgcgcccaatgctgatgctggaaacgtatcgtctgtttggtggcagctccaaagcgattgagccatttatggcagcaattgagatgatccatacgtattccctgatccatgatgatcttccggcaatggataatgatgattatcgccgtggaagaaaaacgacacatgtcgtatatggagaagcaatgggaatccttgccggtgatgcattgctgaattttgcatttgagacagcgtgcaaagggttgatgttggagccgggcaatccgaatgtggcaaaagcgatgcagctgttagcacaaaaagccggtatttatggcatgcttggcggacaggtcgctgatgtggaatctgagggattaccgttagagcgggaaaaactggattttatctatgatctgaagaccggggcactgatcgaggcttctatgctgatcggagcggtgcttgccggtgctgatgaggaagcacagaatgtgatcctacaggttgccggagatatcggtctggcatttcagattcaggatgacattttagatgtcaccagtgatatggagacactgggaaaaccgatcggaagcgatgagaaaaaccacaagacaacttatgtgacaatccgtggactggaacaggcacagaaggacgtggaagaaatatcacagagagcattggacggccttgcctctctgaaagaaaaaaatggttatctggatgaattggtagcatacctgattcacagaaaaaaatagaggataaaaatgtcggtattagatcgaattaatcaaccaaatgatataaaatatttaagtgagacgcagttggaagaattgcccggagagatccggcagtttctgatcgagcatctttccaaaaccggagggcatctggcatccaatctgggtgctgtggagcttacgatggcgttgcatctggtgttgaactttccggaggataaactgatctgggatgtgggacatcagtcttatacacacaagatcctgaccggacggaagaatgagtttgaccatctgcggcagttagatggcatgagtggttttccaaaacggtcggaaagtgactgtgactgctttgatacaggacacagctctacatccatttccgcaggacttggatttgcaagagccagagatttgcttggggaagactacaatgtggtttctgtgatcggagacggtgcattgaccggtggtatggcatttgaggcattgaacaatgcagcagagctgaataccaatctgatcattgtattaaacgataataagatgtctatttctgaaaatgtgggaggactttcccaacatcttgcttctctgcgaaccgcagaggcatatcaggaatttaagtccggggtacacagttctctggagcgtctgccgtatggtgaacgtgtggtgcgcagaatccgcaagacaaaaagcagtttaaaacagcttctgattccgggtatgatctttgaaaatatgggagtgacgtatctgggaccggtggacggacacaatctgaacgatatggttcggattttgcaggaagcaaagaaggtcaacggaccagtagttgtacatgtacagacagagaaaggacttggctatctgccggcagaagaacatccggcgcatttccatggcacaggaccgtttgatattgcgactggaaaagctttggcaaaaaaggaaaaagcaacctataccgatgtgttttctacggtaatctgtaagattgctgcaaaaaatgatgaagttgtggcaattacggctgctatggcagacggtaccggtttaaaacggttccgttcggaatatcctgccagattttttgatgtgggaattgcggaaggacatgcagtcacttttgcagcaggacttgcggcagcgggactgcatccggtatttgcggtgtattcttcctttttgcagaggggatttgaccaggttgtacatgatgtctgtatgcagaatctcccagttgtatttgccattgaccgtgcaggtctggttggtgcagacggtgagacgcatcagggcgtgtttgatctgtcctatatgggaatgatcccgaatatgacggtgcttgcaccgaaaaataaatgggagcttgcagatatgcttcggtttgcattccggcagaatggaccggtggcagtgcggtatccgcgtggaactgcctatgacggtctgaaagagcaccgtgcaccgatctgttatggaaagagtgaatggctctgtgaagaaatgcagattgcgatctttgccgttggaaacatggtagaagaagctgtgaaggtacatgagatccttcgtgagagaggctatgactgttcgctgattaatgtccgttttgtaaaaccgctggatcaggaaacacttctgaaagcagcaaaggagcatttgttgatcgtcaccatggaggaaaacgttttgcgtggtggtttcggttatgcagcagcagctttcttaagtgcgtcaaatgtgaatacaaaagtacttcatttcggcattgacgatcagttcgtacagcatggaacggtttcccagttacatgagcggatcggtctggatgcacagagcatggcagagaaaattattgagacatacaaaaccatttaggataaaaaattaggattaaaggatataaaaaacgaagatgaaagaaagactggatatattactggtaaaaagaaatctggctccttccagagaaaaggcaaaagcaatgattatggaaggaaatgtatttgtcaacaatcagcgggaagataaagcaggttcctcttttgatgaaaatgtcccgattgagattcatggaaacacgttaaaatacgtcagtcgtggcggtctgaaactggagaaagccatgaatgagtttgatctgacgttagagggtgacatttgtatggatatcggtgcttccaccggtggttttacggactgcatgttacagaacggtgccacaaaggtatattctgtggatgtcggatatggacaatttgcctggaagctgcgtcaggatccgcgtgtggtctgcatggagaaaaccaatatccgttacgtgacaccggaggatatcgatgatgtgctagattttgcatcggtggacgtttcctttatctcactgacgaaaattttagagcctgcaagaaatctcttaagagacggcggacagatggtttgtcttatcaaaccacagtttgaggcaggacgtgaaaaagtcggcaaaaaaggcgtggtcagag

SEQ ID NO: 13147 - DNA, 16733 bp, Unknown
  gut microbiota DNA sequence
tgcgcagttgaagtatgtcatgcaattgcatgacgcgcacctcgcaacaagaatgccggagcattcttgaaagattatgcgcaagagaaaagtgggtataatagatgaaaaatagaaataaaaaagcgggtgtggcgatcgctgctgcttctgtgatcacggcaggtgcggtaacggtggcagttgcctaccagagcggggtgaattttcaaccaaaagattccaaccgtaagcttcagaataatcaggtcgttttttccgataacaaggatcaggtagagcataccgcggatgataacggcgataacagtgaactctgggaaaaaaatcagaatgatcagcaggacaacaatcaggaaaatgcaaaccagtcggactatctcttccagaaagatctgcagaatggtcgtgcgacagctgtaaccgttggcgtgaacagtggcgatgccagtggaaataacgatcagttcaccggtacacagaatggaactggcagtcagaatggcggggtctataatctgacggatgatacttccaatgcagatatcattatcaacggcaacggaaccgggcagatcacggatccgaatggaaatggtgccagtaatggcagtggaaatagccagaacagcacgaatggaaatgggagcagcaataattccggctctgatacaaataaaacaccgtccacagatgacaaaaataatgggaataacaattctgacaacaataacggtggttctgataacaaaagaccgtctgcaaccgcgaaagatcccgaagtaaagaaagaatggaacaaccgggtagatggtgttactgatcatccatatccggatgatggcatctcagatgttaccgaagatgaagatggtgactatgcaggtgtagtaatctgtcagcgttgggatgcggatgccgtttatatgtataaaggacagacgattgatcagacgctgatatataattcgctggatacgttcgtatattccaatgaccgggaaaatcgctatgtctggggagaaagtgctctgaatcagtttatccggattgatgcggtatcttttgatggcggtacaacctggaaagatcaatttccactgacgattccgaccacggtgacggatgataccatgattatcaaggtgtcttatcgactgaccaaaaataaaccatgggtagagcgccaggtgccgtatggtttaaaagcaaatcgtatctttgtactttccaaagaaattcaggaagaaaattctgtgatcgatacagatacgattctgaattatgatcaaaatccggaggtaggctccattgtgaatctgtatcggtttcagagggactatctgggaaccgaaccgttaacaacattgttccctggatggatggaagatggaaaactggtttcgtggttatatacttccacagagggacgacatatccttgaaccggcagagaacgtaccactcagcagtgaatatacagttcagcttaatgtgttctggatgacagatgacgggaaaattgatccatctggaaacagtctgacttatttgcagacactgacaggtatttcaaataaagctgttaaacgaatgaaagatggtacgattcttgaccgaatgcaatatgatgaattgactgtgccggaatatattcaggcagtgtcgattgacgaatccacagatctggatgttgactatttgaaaatcccggatacggtaatatatcttgctgacagcagtaaaggattacatgtcaaccgtggctatctggtagatgaggataatccggtttatcagtccacagacgagggtgtgttgctgaacaaagaagctacggaaatccttggaattccttacaaattaaagaaactgacaattcctgcggcgattaccaatataaacctgaatgcagataatcagatatccgagattcatattgaggcagagatgctggatggtgtaccgtcactcagttatgaaaatattaatcactgtaaactggtagtaccggagtcttatatggaggagtttctggaggagaataatgcaaatatccgctatggaaccggaaacagtgtggcatctgcggatgatccgtccgttacatacacgatgaaaagtggtgttgttataagcagtaaaggtgaaatacgcagaatcgtttcaaaaaataatacatccgttacattgccaaatactgcaaaacagattgaaaaagatgctttttccaaaggaacaggtattgagacactgattttgcctaaaaatggaacaacacttcatctggaagacggatgcttaaatgacagtgatgtaactgctatctggtgttattccaagaagcagtatgatacagtaaaagaagaactggctgattccggaacggataaggatgtttccgtagaactgctacagaaatcagcagagggttactattacagaatatcagatgcgggcattatgctgatgagtgtgccggagaatcttacctcttttgatggtacaatgacagcagaggatggaacttcgcttgaaatcaatgccattgcagagcaggccttttctgactgtcaggatctggaatgggtaacacttccggaaagtatcaagaagattggttacaaagcttttgaagactgtatcgggctgcagggaattttgatcaattctaccgatacgatcacaattggaaatgaggcgttttgcggatgtgacagtctgcgatttgtggcatccaatgcgatggaaggcatcatggaagatgattacgcgccgctgatttctgacagttattcgattaataccggactgtattatttttatacgccgacggattctaccggttactttgacgggcatctttcttttacggcagcatcaggggtagcctcttatggtctggtggatattggtggagatgccagaatgttatatggtttggatagtaatggatctccatggattggcctgcggtcaggcggagaagtgtcagatcaggtgacattgccggagagcaccacggagctgtttcactatgcgctggcggatacgaaaagtccatccggaagttattctgtaaactgggatgatatgttgggactgcactggctggatccgggtgcattccgcaattcagatctgggtggaagtatcactttgtcaggaacctttttctatctggataacgatgcatttaccagttgtaattccattacagatttcacggtagatgccagtgtttatctgggagagggtgtatttcaagattgtaaaaatatgacaaacgtgtcgcttggtgagttccttgacaattccgcagtttatttcggattatttaccggatgtgacagtctgcgggatatatactttaacagcgaatcagccccgaagctgatgctttatggaacgagggaatatcagtttaattatggctggacagaggaagaagaactggaaaaattacggattcatgtgccggagagttcaaaggaaatgtatatacgtgactggcgctatgcttttgccggttatattgattatccgaataagtctgcatacgatcgaatgtgggaagatattcgatggcagcatataaactgggatacctgggagttcccgtcagatgaagaagtagatgcttatgtggcagaagcattgctgaaagcagagaaccgtgcacgaaaagcattaggaatggaggaggtatccagattatcagaatggtatgagtatacggttgacagctatggatttgtcacattgaccggagtgccgccatattgtatggaagcaacgctagatgcagaaacaatcggactggcatccggaggatatctggataatattggaacgggtgctttttccaaggcgaaaaatctgcagaaagtagtaattccaaatggtctgtctgctatttacagcaatgcctttgccggtgtggagagcgacagcgttacgctggtatttgaaggctgggcgccgaatttgttccgaagcgatgatgatatccttaatggagtgccgttctcctttggaatcgatgacagccgcattcatattcaggtaccggaaggctgggaagacttttatattagtatgtgggagtacatttttgccggctatgatactgcggaagatatgtgggcaggagttgaggcagatctggcagaacagaatggtacagaaccgacgaatgaggagattttgacagaagtgaacaagcgtctggtagtatcccataaccgtatccgtgccatgatgggactggacccggagcaggtagaagacaatacttcggatggctccggagagacaacggatactgatccagatggtacgacggaaggaaccacagaggaaaataccaatacggatgtttcaggcaatacagtttatgaaaattccaatatatggatggtaaatacaggaatcggaaatctggataccgccgcttctgaaaatacaggtgcggaccgtacagattccgaccatgaagatgcagacagtgcagagtcagaagatacatctgcagacaaggataagaaaaagagtgaggatgcagatgtagcgacaaaagatacagatgcggcgatcccggaacaggaggatacacaggaatgatcgtggaacagtcaaaacagatcgtagaagagatcagtaaggcttttatcggtaaaacagagatcattgaaaaagtacttatgacaatctatgcaggaggacatgtactgctggaggatgctccgggtgtcggaaagacaacactggcactggcattttccaaagtgcttggactcagcaataaacgtattcagtttacaacagatacactgccgtcagatattaccggttttacgatgtttaaccgtcagacgaatgaatttgaataccgggaaggagctgcaaactgtcagcttcttctggcagatgagatcaaccgtacttcaccgaagacgcagtcagcgcttctggaggttatggaagaaaataccatcagtatcgatggtgagacacatgtgctgccactgccgtttatctgtatcgcaacacagaacccgttgggattctccggaacacagccgttgccggagtcacagttagaccgttttatggtatgtctgtccatcggttatccgacgcttgagagccagatgcagatcattaccgcgcagcgttatcacaatccgctgctggatatcaaaccggtgacaaatgcacagaacgtactggaagtgcagaactatctgtcttctgtagagataaaagacagcgtactgcgttatgcgatccgtctgtgtgaggagaccagacgtcatccgctgatcgaacttggtatctctccgcgtggtgtttctgcacttgttaaaatggcgcgggcaaatgcgctgatccgggagcgtaattatgtgattccggaagatgtacagagtgtattctgtgatgtatgtgcacaccgtctggtgttgcgtccacaggcgcaggtagaaggcgttcaggcaaaagatattctgggagaaattctgctgaaactcagacctggaacagaggagtaaaggatatgaacaaaaacaggatcggctatcttgtcctgatggcgtgtctggcagtgcttgttttcttatttagtaatcggttcctgttatttctgctgatcatgatggtggtgcttgccgtgctgatggctgtattgagccgtgtagatgccagaaatatgatggtggatatggaaattgtttccggaacacaggaaggaaaagacctgaaagtaaaggtaaagatgtattccagattccctctgtatgcagcacgtagtattctgatgggcgtggatattgaaaataccatgttttgcagtacagaacgcaaatattatttcatgtatttgtccggtaaatccagggaagtggagctgaccattccggcgcggcgctgtggggaagtgaagatacagtgtgcagagattttactgcaggatctgttaaaattatttcgaaggaaaattcgtccctttgagacggtacagaccatcgtatatccgcgttccgtgaacgtgcatgtggaaatgtcccgggcaaccattggagcaccccgtgaagaagggcgcatgcagaaccggaaaggaaatgatccaagtgagatgtttgatatccgggaatatgtgccgggagacgatatccgtttggtacactggaagctttccagcaagacagagaatctcattttgcgggaagccagcgatccgtctcattacaatatggtacttttaccggatctgggacgtaaagttatgaatatagaagcagcagacgaacatggagaaccgcaggaaaatcctgtagaagaaatcaatacagctgtagcatttggtactgcgatcggagaacagttattgcggcttggatgtgcattctgtatggcggttccgggtaaaaatggtctgcagctttgtgaagtgcgggatcgacgggatctgcagcggatgctgatgttgtggatgagcagtccgattccagagtacagtggacaggcgctgcaatattttatcacagagcatctggaagaatattttacacggttactgatcctgtctgcaggcgtatatcagcaaaatctgcatacgttaagtggtcagattggaaccaccgtggtcagtgccagagcagatctggatacagtgatcagcagcgtgagtggaagctgtgaaatgatcgatataccggtagataagacagaagaaatgtaccggattatttgttaaggataatagattactatgaaacgtacgaaaaaacagtttaccgttgatcggattgtaccggatagtgagggaaaattacatattaaagtaggaatccaccttcttttgagcctctgtctgtgccttggcagtctgagtgtactgcatgcagaggggaatgagtatccgtcgatatcggcaatggtatatttgctgatgatcgccacactggtctgctgtgtgttgtcacagagaaagagagaaaaacagtggatgaaggtattctactatggaggaccatggcttctggtactgatcctgaccggttttcacggatattggaccggtgccaaaagttggatcaacatgatccttatgtactggaatgaagtacacgatggtggtgtggcattgctttccgtttcgcaggaaaatgcggcaatgcagtcatttacactgttgatggtcattttctgtgcacagttttgctggtggatggtaaaagaccgtaaagtgatctgtggcattggatacagtatggcatggacgatgcttgcattgatgacaggtatgtttcaaccatatatgggcatgctgtttttgatcggattagccggattatttctggcaattcagggcggttacgttactgccagaaatctgttctgttttgtaatggtgtcggtgattgtcgtgatcggtggtctgacgcttccacaggaaaatctggattctgtgacacaggcaagacaacagtggaaggaacagatccgaacctggcgttacggtgaggattctctgccggagggagatctcagacaggcagcttccttgcagaaaaattcgaatgagatgctccaggttcagacagggcagcagaaaatgctctatctgcgaggctttgtaggcgaagtatatcagaatggagtatggcatgaactgccttcttatacgtatggcaatgaaaatgccggaatcatgaaatggtttttacagcagggatttcacccacagatgcaggtggcagaatattatgcactctgctccgaggacaaccagccggaagaaaatgagctgagtatttcggtgacagacgcttcccgatattatttctatctgccagtcagcatggaggaagtaaacggttccaattataaagagaaacgttcttcccgactgtttagtaccggttggcgtggagctggttcttattccggaacagaactgtccggttccagaccggcagagctgacagtggcagaggactgggtaagcgatccgaccacagaggcgcagaaacagtattgccaaacggaatcagtgtatcgtgattttgtatatgagaattatacacagacagatgcagatacggtgaaattgatgaatgaaattttctgggatgattatgatccggaaagcgatggtatctacagtgccttaagtcaggtacgaacggtgttaaataataacgtgaaatatgtggaaaaaccgatggcagcaccggaaagttatgatccgatccgctatttcctgacaaaatccagacagggaaattcgatgttgtatgcatccgcagcagtagagtcactgcgggtacatggaattccggcgcgttatgtagaagggtattttgtatcagaggaacagtccgcagcaaacggcggaaaggtatttctgaccggcaaagatgcacatgcatgggtagaagtttattttgacggaatcggctggcttccggtagatgtgacaccgggatattatttcgattctgtatcattacagcagatggtaagtctgccggataccgttcagaaaaatgcggcgttaagcaacaatagctatgatacaaacattgtgaaaaattccggtaatcagggttcaaaagcaccggaaatcctgaaaaaagtatttaatgtggcagccatctgtcttgggattgttggtttgctggtgatcctgcttactgctatctttgttgtattagagattttaagaatactggcagaatacatctggaaacagcatgaaagctatttttcagacagcgagcggattggatacaagacgaagaaaatttatcatttgcttgcgatccgtggaattgatgcaagtcttggatggaatatggaagataccgataccgcgattgcagatactttttctgagaccagtccgggagagtacaaacgtgtctgtgttcttttggaaaaggcagcatacggaggcatgatcctcaagcagtttgaggagcgtacggtagacgcatttttgacaaaaatttcagaagtagacaaaaaaagtaactggcggatccgtctgcgtctgcgctatgatgcggtctactgtctgcgtcattataaataaacagaccgaaaaataaggagagtacagcgatggatttatttgatatcgtaggtccgatcatggtcggaccatccagctcccacactgcgggagccgtgcgaatgggttatgtggcaggaaaactgttgggagaaccgatctgcaaagcagagatccttttgtatggatcctttctggcaaccggggaaggacatggtacgaagaaagcgctggttgcaggtctgctggggatgcagccggatgattaccagatcgcagacagtttcgagattgcggcacagcgtgggataacggtggcgtttggtgaggcgcatctggaggaagctcatccgaatacggcagtgatccgattaaccggtgtcggagaaaaatatacggaagtacaggtgtcttccatcggtggttcacggatcagtattgataagatcgatggcatcaacactggattttcaggggaatgtccgacactgatcgtacacaatatggatcagccgggatgtatcgtggcagttacttccatgctggcaaagaaaaatgtcaacattgcgaccatgcaggtgtatcgttctgccaagggtgagcaggcagttatggtggtggaatgtgatcagccaatttccgaggatggcattcagtggttagaacaggtggaaggcgtgctgaaagtgacgtattttgccggaatcggggcgtaatgttactaaggtaaaagaagttctcttattttttatagaaacattcttgaattataagatttactgagcgccgatcgaattccacaaataggatgtagatgggaatagaataacaggtagaaaaggaaaccataattatggcagtagaatatcacagtctgagagagctggtagaactggcagaagcacaggagaaatttgtatgggagattgtacagcaggcggatatgattgagagcgagcggactgctgaacagtcctttgccaaaatgcatgagatgtatcgggcaatgtggcaggcagatcaggattatgacggagcgcgccgttctgcaagcaggcgcgcgggcggagacggagaaaagctggaacaatataatgcgtccggaaacaatatctgcggaccgtttatcggaaaagtcatggaaaaagcaataaaaatgggagaatccaacgcttgtatgcggcgtatcgttgcagcaccgacggcaggttcctgtggcgtacttccggcggtattactcagttttgcagaagattttccggcaacggaagaaatgcttgtgcaggcgctttatgtggcagccggaatcggaaaagtcatcgcagagaatgcttctctggcaggagcgtccggcggatgtcaggcagagatcggctctgccagtgccatggcagcgggagcgctggtctgtcttcagggcggagatgccgaagccattatgcatggggcagctctggcattgaaaaatatgcttggtctggtttgtgatccggtggcaggtctggtggaagttccgtgtatcaagcggaattcttatggagcagtcaatgcggtgacatcggcacagcttgcagtggcaggaatccgcagtgccattgatccggatgaagtcattgacagtatgcggcggattggaaatcagttaccggcttgcttaaaagagaccagcgagggcggtctggcaacgacggagtctgcaaggcattaccagtcgtaaggggatttcagagaatagcaaactttatctcagtctgagttgagactcccacttctgcaagtggtgagtagtaacaagtatttttcagtgggagttcaatctccgactgagataaatgctccgcgaggatgtgcagtgattctgaaaagaatatgtcagctttcgctgaccagaatcacgcaccaagtctcacgtgcgttcgacttgaagggtggagaagaacaaaattttatacaaaaggagaggtataaagtgatgaaagaagaaaaagcatgcaatagaagtggtgcatacattgcgccaaatgcaacggtagtcggtgctgtcagtatggggaaagacagtagtctctggtatcaggcagtagccagaggagaccatgacagtatcactatcggggaaggcagcaacattcaggatggctgcattcttcatgcagacgcaggttttccggttgtgatcggggatcatgtcacggttggtcatgcagcgatcattcacggatgtgagatcggagatggtgcactgatcggcatgggttccattgttttgaatggagcaaagatcggaaaaaatgcgatcatcggtgcaggcgcgttggtgacacagggaacagtgattccggatggtatgctggcagttggttctccggcaaaagtcagacgtgaagtgactgccgaggaaataaagcagaaccatgaagatgctttagattatattgaaactgcaagagaacagtttggagactgatgttcgatttgaaaaaattccggagcattcttgaaatagacaaaataatgcaataaagcataattaacagataatttaaaataatataaaaaatatacagaaaaagtgttgacaaatcacttaaagtgcaatacaataaagacaacaaaagaagagagaaaacaaaataaaaaatcttctttcgttaaataactacaggaggtcagtccaatggagtaagcaagaaaataatctcttttgacagagtttatcattataaaacaatcagttaaaggaggacaagtccattgagaggtagagatccatagttgagacaaaagaaatagaagaaagggaggttatatagtgaagcttagatttaacaggtgacagagctatctgatgacgagaaagtcggatagctcttttttatgcttttatttctgtgaaaaataaagattctccctgaaaatatcttcgaaagtaaagttttttacaaaagctttactttttttttgcgcaatcctgatagtatgaaaagccaaatccgattaaagtatacgtcgtaaggcaaacaaaacaacttgccagcatgacccgaataagccaaaggcaatgcaggtctgtacataaaaaataaacaagaaaaagatgtaaatcgaaaaggagagaatcgaaatgaaactgaaaaaaatgatggcacttgtactttgcgcagcaacagtagcaggatttggacttacaggatgtggaaacagcgataacggagcagcagacaacgcaggaagcgcagcaacagagagcggtagcacagacagcgcagatgaatcttctgatttttccggaaacatcagcgtattatcccgtgaggacggttccggtacaagaggcgctttcatcgagctgttcggcattgaagtaaaaaatgatgcaggcgagaaagaagatatgacaacggtagatgcaaccatcacaaacaacacagaggttatgatgtctacagtagctggtaacgaatatgcaatcggatactgctcccttggttctttaaatgacaccgtaaaagcagtaaaaatcgatggtgctgaggcaactacagagaacgtatccaacggaacttacaaagtatccagaccgttcaacatcatcacaaaagataccgtaagtgatgtggctcaggatttcatcaactacatcatgagtgctgacggacagcaggtaatcgcagatgacggatatatctctgtagcacagggtgacacattcacatctacaggagcaagcggaaagatcacaatcgatggttcttccagcgtatcaccggttatggagaaactggtagaggcttacaaagcggtgaacccgaacgctgagatcgagcagcagacaacagattccacaacaggtatcacatccgctatcgatggaaaatgtgacatcggaatggcttcccgtgatctgaaagacgaggagacaggcgttacagctacaaagatcgctcttgacggtatcgcagttatcgtaaataatgcaaacccgatcgatgagatcagctctgatatggtaaaacagatcttcacaggtgaagttacacagtgggatgctgtaaaataatcagttccattaaataacacaaattatatatgcgtcactacagattccgatttgaacgcaggtcgtaaagcgattgtgttcatgaacaagtagcgaaagtggattgtgaatgtccgctttatgtagaaaagaatctgtgtggcgcattcccatagggagaaacaaaacatatgaaacgaaaagaaaaagtgtttgaaattattttcctgcttgttgcctgtatttccatcgtggcagtagccatgatctgcattttcttatttgcaaacggaatcccggcaatgggaaaaataggacttggaaaattcctgggcggacaggtttggaagcccggaaacgataaatacggcatcttcccgatgatcatcggaagtctgtacattacaggcggtgccattgcagtaggtgtgccgatcggtatttttactgcagtctttcttgcaaaatattgtccgaagggactttacaaaatcatcaaaccggcaacagagcttctggcaggaatcccgtcagttgtatacggcttcttcggtttgatggtcatcgtaccggcggttcgtatgatcttcggaacaaaccggacagacggaatgagcattctgactgcatctttcctgcttggaatcatgatcctgccgaccatcattggtgtgacagagacttccatccgtgccgtaaacaacgcctactttgaaggtgcactggcactgggagcaacaaaggaggcaagcattttccgatgcgtgatcccggcagcaaaatccggaatcttagccggtgtagtacttggtatcggccgtgccattggtgagaccatggcggttgtaatgatcgccggaaaccagccgcgtatgccaaaaggaattttacagggcgtgcgtacactgaccacaaacgttgtacttgagatgggatatgcaaccggacttcacagagaagcactgatcgcaaccggtgtggtactgtttgtattcatcctgatcattaacctggcgttcagtattatcaaaggaaaaggagagaaggaataatgaaaaagacaaagaaaaagatttatgtcggctctctgattttaaaaatactgatcattctggcagcaatttttaccattgtgatgcttggctacctgatcgtgtatattctgggcaaaggtatcccgcatctgacaccgtcactgttttccttacattatgacagtgataacgtatcaatgcttccgtctattatcaatacattgatcatgatcggtgtggcattgctgatcgcagttccgatcggtgtattctctgcagtatacctgacagagtatgcaaaaaaaggcaataaactggtaaaaatcatcagaactacagcagaaacattaacaggtattccgtccatcgtttacggtttgttcggtatgttgttctttgtaaccgcatgccatatgtcctactccttaatggcaggtattttaactgtagcgatcatggttttgccaaccgttttaagaaccacagaggaagcacttttggcagtgccggacagcttccgtgaaggaagtttcggactgggcgcaggcaaactccgtacagtatttagaatcgtacttccaagtgccattccaggtatcctctccggtgtcattctttccaccggacgaatcgccggtgagacagcagcgctgatctacaccgcaggaaccatggcaaccttaccgaagaacctgctttcatccggacgtacactggcagtacacatgtatgtactttcccaggaaggtctgcatacggatcaggcatttgccaccgcagttattttgctggtaatggtacttctgatcaacattttatcttccgttatcgcaaagaaaatgcagcgggactaaagtattggaatcttgattacgaaacaaaagtgacaggaaacgtatttgcaaacagcaatatgtgagagaggataacgaaacgaacatgttaaaaaataaaatgacaatcgagcatatgaatcttcattacggagatttccatgcattaaaagatattaatcttgagattaaagaacatcagatcaccgcgtttatcggaccttccggatgtggtaaatccacccttttaaaatccttaaaccgtatgaatgatctggtagaaggatgtaagatcgacggtctgatcgcattggacggcgaagatatttacggaaataacatggatgtaaacctgctgagaaaaagggttggtatggtatttcagaaggcaaatccatttccgatgagcatttacgataacgtagcatttggaccgagaacacacggtatccacaacaaagcacagttagacgacatcgtagaaaaatcacttcgtgacgcagcaatctgggacgaagtcaaagaccgtctgaaaaaaagtgcccttggcgtatccggtggacagcagcagagaatctgtattgcccgtgcgctggcagttcatccggaagtattactgatggatgagtccacttccgcactggatccgatttccacatcgaagatcgaagatctggttatggagctgaaatcccagtacaccatcgttatggtaacacataacatgcagcaggcagttcgtgtgtctgaccagaccgcatttttccttttgggcgaccttgtagagtatggtgataccgatcagttattctccacaccgaaggagaaaaagacagaagattatattaccggtagatttggttaaacagatgtgcagaagtttctgaaatttatccggagttttagcagtgtattttgaacaacggatgagcagattttggaacaatgtgtaagtgcaagggagaacataaaaaatgagaaatcaatttgacagacagttaaataccttaaacggtgagctgatccagatgggacacatggtagagcaggcaatcgagcatgccattgaagccatggtacatcaggatgcagaaaaagcaagaaaaaacatggaatttgactcagaagtagaccaacaggagaaagacattgaaaccctctgtatgaaacttctgatgaaacagcagccggtagcaagagacctccgactgatctcagcagcattgaaaatgatcacagacatggagcgaatcggtgatcaggcagcggatatttccgaattatccttatctctggtaaatgagaaaaacctgccgatgatggaccgcatgaaacagatgtcccaggaatgtatgctgatggtaatgaaaggtctggaagcctttgtggcaaaagatattgagatggcaaagaaagtcattgcaagagatgacgtgatcgatgccatgtttgatgatataaaaaaagaagtgatcgagctgatccagaacaacggcgcaggcgcagaagtagcaacagacctgctgatggttgcaaaatattttgaacgaatcggcgatcatgcaacaaatattgcagaatgggttattttctccatcaatggaacccatccgaccattaatccggaaccagttctgtaagaaagtaagacagttcactcacgccttccacaggcattgagtggactacaaataagtaatagcggactttgatccgatattatatatatgggtgtgaaaactattt

SEQ ID NO: 13148 - DNA, 12165 bp, Unknown
  gut microbiota DNA sequence
aaaaatgcacactttttgtaaaatatgttcaattttgggcataataactagcaagattgtctaattttaaacaattggaaataatgcttgcatgtcgaacaagagtatattataatgttttctaaattgtattttatttagtacaacgcataaaagaagaagggaagtgaacatatggaattacagattcaagacttagtttcctccatccgcaaagacggaattgatgcagcaaatgccgaggcagaggcaattattacagcagctaagaaaaaagcagaagccatcgtggcagatgcgaaatctgaagcaaaaagtatacaggaagcttcagaaaaagaaatcagtattctaaaagagagtgctgcactcagtgctgagcaggcaaaaagagatgcgatgcttgcatttaaagctgaggtgaaagccgaatttgaaaagattctttccgcaaaggttaaagatagtctttctgatgccgcacttggtaaattgatcaaagcagccattgcagacgaaggggtagaaaattataccgcagaagttgcacaggtaagtgacgcactgaaagcagaacttgcagaagaaatcaaaaacggacttgagatcaaaccagcaaaaaatgtccgcgcaggattccgcctggcagcaaaagacggttccggatattttgactgttccgatgatgagatcatgcagatgctgatgccatacttcagaaatcttgatttctagcaggaggtgcttatggcttcatattattatttgatatccagcctgccggacctgagaaccgacggtgatatgccattttcttataaagaatttcttggcatgtgccagtcaaatgtaagcgaatcaaaatacgaatttttaagtaatctcaccctctcctctgatgagggaccactcttaaaagactgggctgttttttataacaacctgatgagtgaactgaatgcgcagagaagcgcgaaccttggacgggcatatttaaaatcctatgataaagattccgtactctctcaggtagtaggaaccgtgcttgcagccaaaaacccgctggaagcagaaaagatcctgctggattacgaatttgaaaatcttgattccctggtaggtttgcatacctttgacgatgtatatctctttggctatgcagtgaaattgaaactgctggagcgccagaactgttttgtacaggaaaaaggcaaaaaagaattcaaacgtctttttgatcaggtgcagcagcgcgtttatcagttatagaagaaacacacatctttgctgataaaacggaaaactattgataacaggagaaaattgaatggaaacagtaacaggatatgtaactggtattaacggcaacctggcaaatgtcagctttgaaggtgccgttcataaaaatgaagttggttatatccttgttgacggaaaacgcttaaaaggcgaggttatccgaatcaacaacggcgtagccagcatgcagatctacgagatgtcaaacggcattaaagtcggagactcagtagaatttaccggtgaactgatgagcgtagaacttggaccgggtctgctcacacaggtatttgacggtctgcagaatccgttgccggatctggccgagcagtgcggatttttccttgagcgaggtgtataccttgacccgattccggacagagaatgggaatttaccccatccgtaaaagtcggtgatgccgtagaggcaggtgactccatcggaagcgttccggaaggattattcacacatgagatcatggttccttttaccttaaaaggtcatgactggaaagtaaaatcaatcaaagaaaaaggttcttaccatgtaagagcaaccatctgtgtcattgaaaatggcaacggtgaggagaaaaacttaagcatggtcatctcccagccgatcaaacaggcagtaaaatgttacgatgaaagacttcgtccggacgaacctctggtaacacagattcgctgtatcgactctttccttccggtagcaaaaggcggaaccttctgtgttcctggaccattcggagccggaaaaacagttcttcagcatatggaggcgaaaaacggtgaggccgatatcgttatcgtcgctgcatgtggtgagcgtgccggcgaggttgtagagatcttaaaagagttcccggaactggaagatccgaaaacaggcagatccctgatggaacgtaccatcattatctgtaacacatcttccatgccggtagccgcacgagaagcttcctgctacacagccgtaactctggctgagtattacagacagatgggactggatgttcttctgctggcagattccaccagccgttgggcacaggccatgcgtgaaatgtccggacgtctggaagagattcctggtgaagaggcattcccggcttaccttgagtctaccatcgcttctttctatgaacgtgcaggtaaagtaagactgaaaaacggcaagatcgcatctgttaccatcggtggtaccgtatcaccggcaggtggtaatttcgaggaaccggttacacaggcaaccctgaaggtagttggtgctttccacggactttccagagagcgttccgatgcccgtaaatacccggcgatccatccgatggattcctggtccaaatatgacggcgtagtcgatatggcccgggtggaagaagcccgttctattctgcacagaggaaatgagattaaccagatgatgaaagtagttggtgaggaaggaacttccgcagaagactacattatttatcagaagggcgaacttctcgattccgtatatctgcagcagaactccttcgatccgatcgatgcagcatgctctccggacagacagcgtgaagaattcggcatcctttacgatgctttgatggcatcctatgatctggatgacaaaaacgagatccgaggtttctttaaccagttgagacaggaattccttgactggcacggtacagaattcgaatcaccggaattctacgaacaggaaaagaaaatctcagaattctacaaatcaaaagctgttgagtaggaggattttagagtgcagaaagtatatacaaaaattgaatcaattgtcggtaacgtagttactgtcagagcaaaagatgtccgtctgggcgaccttgctctcgtaggtgacagttacgcgactgttataaaacttgataaagacctggtatcccttcaggtatttgcaggtgcacagggcgtcggaaccagcgatccggtccgcttccttggtcgaccaatgatggtttccttctccgaacacctgcttggacgagtatttgacggtgcaggtgttccgcgtgatcatggtccggcactgactgagaatatgatcccgatcggtggaccgtcctttaacccggcaaaacgtattttaccgaaaaacatgatccgtaccggtatcccgatgatcgacgtgttcaacacactggtagagagtcagaaacttccgatcttctctatctccggagagccatacaacgcactgctctcccgtatcgcacttcaggcagaagtagatgtcatcgttttgggtggtatgggattaaaatatgatgattaccttgcattccgtgataccctggaaaaaggtggcgccatgagccataccgttatgtttatccacacagcttccgatccgaccgttgagtgtacactggttccggatatggcacttgctgttgcagagcagtttgccttgaacggaaagaaagttctggtactgcttaccgatatgacaaactacgccgatgcacagaaagagatggcgatcaccatggagcaggtaccttccaaccgaggttatccgggcgatctgtacagctgcctggcttcccgttatgagaaagccgttgatatcgaaggtgcaggttctattacaatccttggtgttaccacaatgcctggtgatgacgtaactcacccagtaccggataacaccggttatatcacagaaggtcagtactatctgaaaaatggacacattgagccattcggttctctctcccgtctgaaacagaacgtaaacggcaagacccgtgatgaccaccgtgcactgatggatggtatgatccgtctgtactcccagtataaggaagctcttgagaagaaatccatgggattcctgatgagtgactgggatgaaaagcttctgaaatacggtgagcttttcgagacaaaacttatggacctcagtgtaaacattccacttgaggatgcacttgatcttggctgggaaatccttgcagagtgcttcgagccaaacgaaaccggtttgaagacaagtcttctgcaggagagatggccaaacaaagaagcattaaactaaaaggagcagctgatggctatcaaacttacaaaaaatgagcagaaggtgcagaaagaccgcctgaaacagtatcagcgttatcttcctaccctgcagttgaaaaaacagcagctgcaggctgtcatcacgaaaacaaaagctgatctggaccagaaggaagtcgaacgtgctcagatgatcggtgacctggatgactgggttgcagtatttgctgaaaatgaaatcttcgatgaaagcaaaaaattagatcacctagtacagccggataccgtcatctgtaagaatgagaacatcgccggtgtcacagttcctgcctttcaggagctgaccttcaaagacatcgattacgatgtggacgactatcctctgtgggtggacactgctattataaaactccgcgagatcgcacgtctggatgctctggtatcaacactgcgcaaacaggaagcgcttctggaaaaagagttacgctctacttcccagcgtgtcaacctgtttgaaaaagtcaagattccggaagccaaggaaaatatccgcatgatcggcgttttccttggagatcagcagacagcggccgttgtccgcggaaagatttcaaagaaaaaattagtggaggcggcacaatgatagagaaaatgaaaatggtctgcgtcgtgtcatctgtctcccgaaaagacgagatgctcgacggacttcgatccttagggctcttacatctggcagaaaagaaaagtccggaccgtgcagttgcagaacgttttacaacgctttccaagacagctgccactctgacggactatgcgccggataaaaagaacaaaaagaaagaacctgtaccggttctctccgattccgaatttgaggaaatgtatcagaatgtgttagccacattagataaaaaagcctcactggagcaggaaatcagtgctgccaacgctgagattgaacgaatcaaggcttggggcaatttttcaccggaagatgtgaaacgcgtaaaagaagatggatatgatcttcacttctaccgccttggtaaaaatgaataccagatggcactgcaggatccagaaatcaaaatgatcgcactgacaccgatagataaaatgcacacagttgcagtactgggagcacttccggtcacaattccggcaacagaatttacccttccggaaaaaggcatcgatgagctgacagcacagattgaaagctgtcagacagaaatcggtacatgtgaggaaacactcaaaaaatccagcatctatgatacaagttttcaagttcagatgctgaaagcgcaaaatgcagaaaactattcttctgcaagtgaaacagcagaaaatgatgaagattttgtatggatttccggataccttccggaagcagatcttccgaaattcaaagctgcggcaacagagcataaatgggcatgggccatggatgacgtgtcagaggatgacacagagatccctaccaaagtaaaatatggaaaagtttccggactgatccagccggtatttgatatccttggaatccttccgggatatcgggagtcagatatctccctctggtttttcctgtttttcaccctgttctttgcaatgatcatcggtgatgccggttacggctgcctgatcctgattacaacgatcgctctggtagcaaaaacaaagaaatttaatactacaacttacctgttactggttctctccattgcaaccatcgtatggggtgccgtcacgggtacgtggttcggtatggaaaaagcaatgcatgtgcctttcttaaaggctctggttattcctcagtttgcaaactacccggattacttcggtgtatctgccacaacacagcagaacgccatcatgaagttctctttcaccatcggagcgatccagatggcattgggaagtctgatctccatcaaaaagaaactgagcgaaaagaacttaagttgggtggcagaccttggctggctggtagcagtcatcggcatgtatctgttatccctgtatctggttattggccagaagcttaatatcgtaccagtcttcgccatggtaggcgttgcatttatcctggtcgtactcttcggtggcatgtccccggacaaaacatttggtcagggtctgaaaagtggtgtcgcagatgcatttaccgtattcttaaatacgatcagctgctttggtaacgtcatgagttacatccgtctgtttgcggtaggtatggcaggatttgccatttcccagagtttcaacggcattgcagcaggtttccacggaccgctcatcattctcggcgttgtggtcgtactaatcggacacggactgaacattatcatgtgtttcctttccgtcgttgtacacggtgttcgactgaacgtattagagttttccggtcaggccggtctggagtggacaggaattgcatacgaaccatttaaagtaaacgaaaagattaaaaaatagtgtatttgcaaagatgcacaacagaatgatatcatggattgcatgatgtgcatctcgcaacaggaatgaaaaacattcttgaataaaacagtattaaaaaaggagaattattatgaatatcgcatttataggtatggcagccgcacttggtttatcagcagcaggatctgcatttggtgcaggatttgccggaatggcatcagtaggagcttggaaaaagtgttacgcaagcggtaaagcagcaccgttcattatgatcgcattctccggtgcaccgctgacacagacaatttatggattccttcttatgaactttatcaaatccgcagtagcaggtggcgcagacgctggtctggcacttggcgttggactttttggcggacttgcaatcggactttccggattattccagggtaaatgcgcagcagctgctgcagacgctcttggcgcaaccggtaaaggtaccgcgaactacttcatcgtagttggtattgttgagacagtagcgctgttcacactggtattcagcttactgctgttaggttaaaaaatatcataactaataaaatgctcagtccttcggggctgggcattttttataggaaaagagaaggtacaatgcctctcagaagcactgtaccttctctatattcgtttttaaagcaatctttaagaattactcaccgtatttctcaaaacgctcttttcttgcctcagcgacttcatcctgacgctctttccataatctgtcagcaactggtttccagttctctgcgtatggaattgtttttgcaatcaggctgtcaaccggctcttctgcctgcatatctgtagaatgagctccggaagcctctaccatcttcttgatcatctccggattctcaagcatcgggcaaggacgaagctggttgtcattgaacggcatattgtcatgatactgcatgaacagcggctgctgtaagcactcaagcagggaatgctctttgatgttgatgttggagtagtgaatgaatacacatggctctacatcaccgttcgggttgatatgtaagtagttcttaccaccagcgatacatccgcctacgaactcagcgtcgttctggaaatccagtgtgaagagtttgatcgggcattttctgctacgtacgaaacgaacacggttaaccatgtactcacgctgttccggtgtcagaagcagatctgtacttgcgtcttttccaactggcatgtaatggaagaaccaggaaaggattgctcctttgtctaccaacatctgaaggaattcatcagatgtaactactttatagtttttgcttgtgtaacagatagatgtaccgaataacagaccatgctctttcatcagatccatagcgtgcataactttctcgaatacaccctgtccacgacggtcatcgtttgtctctgcatatccctctacagacagagcgaaggataagttaccaagtctctgaacttctttacaaagctcctcatcgatcagtgttccgtttgtgaagatatggaatgcacagtcgttatgtttctcagcaagcatcaggatatctttcttacgaaccatcggctcaccacctgttaatacgaagaagtggataccaagctcttttgcttctgtgataattctgtcaagctcttcattgcttaactgaagctgatgaccatactcagcagcccagcatcctgtacatttcaggttacatgcactggtcgggtccatcaggataacccacggcacgttacatccgtatttttcacggttctcttttacttttttgaaacctgtcagaccagcttcaaatcccatgtttaatacgtgctgttttacgatgtttggatgaagtctctctaaagcatcgtagatcatctgtgtccatttctgctccggatcagacagaacttcgtttgcattatcccagaaatactgtgggaagttcttacctgcgatcttgtttgccaggttcatcagttttactaaattttcttctttatttttgttgatgtatttataaactcctgagaaagccagttcaaatgactttcttgctgcagcgtgttttacgtccatctttcaattcctcctgttgtctgtccttagtttgcatcagttccttcgatctcactcttgtagttcttgtagcctttctttacgaatggatgctctgcccagatcttgtcagcatgctctttccactcagctgcgtacggctcacatttctcgcaaaggtgctctgcgctctccggagactgtaaatcagtagattttgcaccagtctcacgaaccatctcctgcagtttctccgggttttcaagcatcggacacggacgaagcatgttgtcgttgaacggctggttgtctctgtatgccatgaataacggctgtttcagacactcaagtaatgtgttctcacggatgtttgctcctgagtagtgaatgaaaacacatggctcagcatctccgtttgcgttgatatggaagtagttacgtccaccggcgatacatccgcctacaaactcaccatcgttctggaagtccatgagcataatcggttttccaccttcgaatgcacgaacctcacggatacgtttgtagatgtactctcgctgctccatagtcggcatcagttctacatcagcttcgtttccgactggcatatagtggaagtaccaggagtaacggcatccgtgctcgatcagcagatcgaagaactcatcagatgtaacggcatccatgttctttcttgtataacatacagatgttccgaagaacagaccatactgtttcatcagatccatagcgcccagaactttctggaaaataccctgaccacgacggccatcgtttgcttcctcaaatccttccagactcagagagaaggaaaggtttcctaatttctgaacttctttacagaactcttcgtcgatcagtgttccgtttgtgaagctgtggaatgctacatcatgatgttttttacaaagtttcaggatatctgctttacgaaccagcggttctccacctgtgaacatgtagaagtagataccaagctctttaccctgtgttacaatgtcgtctaactcatcgtatgtaaggttcagcttgtaaccgtactctgctgcccagcatcctgtacatcttaagttacatgcacttgtcgggtccatcaggatcagccacggaatattgcagtggtgaacctcacgcattttacggattgtttttgtaccatagaaagcagcctcaaaaccaaggtttaatgctgtcatttttgctacgttcggatctaactcgtcaagcattgtgtttacgaatttcatccatttgtgatccggattctgaacgattttttttgcaccttcatatgcttccggtttgaagttgtcgcccatgaatctctgagccagatcgatgatctgaagtaatcctttttctctgtctttgttcagtctttttaaagcaacgtcaattgctgcactgaacgcttttctctgcatagtatgtgataaacttgccacgatatgctctcctttcctattcccttagccatccgtcaggcagatattcacaatccgccatcgctacttgttcacaaccaaataactatcatataacttcatttggttaaatagtttgtttcttatataaacaatttttccaaacaggcacctactactttctacaattgtaaaaatgtgtctgttttataacatatgtttcttacactacatccgtgtctttgacaacacatgttgcatttttaactcttgtatattataatcaacttaagttaaatatcaaccgtcaatttgattttttctgtcaattatcccacattttacctgtactttgttggataattaacagtttccaaggggattgactgccggattttgcctgtttttggtataatttaatttggtgtgataaagtgaaaaagcagtatttaccagacatgtctgagcagtaagtttctactaatataatgagtgcaaacgagtcaacatgctggtatgattgacgagtggcgaaattatcgagtgataaaatcacgatataatataaagaaagaatcaatgcaaacggacaaaggagaggattggaaatggcaactgaccgccgcacaaagtatacgaaatcggtaattcgacaggcactttttgacctgttaaaggaaaagcctttaaataagatcacagtaacggatatctgtaaaatggcagacatcaaccgcagtaccttctattcttattatgaagatgtgtatgcactgctgacgcagattcataatgagctttttgaaaatattgtggtgacacttggaaatgataactggtttgatgatctcttgaaactgatcgaccagaaccgtgatctctgtcaggtgctgatcggaccacacggagattcttcttttatcagacagctgatgtatctgggatatgataacagtatgcgtgtctggcagaagatttatccaaatgcggatgcgacgatgctggattattcctatgcgtatctggcaaatggagtgatcgggattctggagaactgggtgtgcagtaattataaactctcgattgagcaggttggaaagctactgatggggatttcgatgaatgggttgagttttctagaacagggggcgtcggcttatgctgtcgaaaattaaatttttgtttagggtggcttaaaaatttactacgatagtactctgaatgtccactttttagtaccaatgtctacatttatgttttgaatgtccacttttatgttctaaatctctacttttttagtggcaacatatgtgaattttcaggacacacaacgtatataagcggaatttgagaaattttttctttgaaggcgatttgttagctgaaaagaccaaattttcaaattccgctttcataacctttcgttttgccaatcacaatattacgtttttccaatattccagcagccgctccacactgtaagccgcattcgccggactggtagacggcagctgcaccgcctcaatcccaagctgttttgacagatatttatcatacaactgctttgacttcgccccgttcgcataaatttttgtaatccgacttctacttataatatatcccagatcatttggcacaacattccggatactgctatcactggatcccgcgatatcgcagcttgcgatcacgtcccacaacgcaatatgatgccgcagcaacatctcttttttctccagaattgtctgtggaacgttttcatgtaaaacctgcgccatcactttccagaaacgattctggggatgtccgtaaaaaaactgcatttct

SEQ ID NO: 13149 - DNA, 16285 bp, Unknown
  gut microbiota DNA sequence
ataaatcgcttccgaaaggggattgctccacctaacccttaggaggcgcttgttatatccatttaactacgagaacataaaaatatgattgctaacttctctatcatagcagagaaccatgttttctgcaagcattcatcctaaaaatgcgatcgtaataaaaaggcggttcctatattatgtaaaattgttacttctattgttatgttattataaaaaagtattttcctgcactttatcataataaaaataataaagcatttcctgtgtttgtttttgtgtggtctgtgtatacaggaaatgctctatatttaatataatgtatcactgtatgaaattaatacccgtaattgacatgtccctgtagccagattctgcctttaaaacggcgtcctacttccggttcgcctagcagatctttctggttgatacaaatgtcaaaaatcaggttgttacagttgagggtcagaatccagagcttttcattgctcagattgttttctgcttcataaaaattcagaatttctccgatcacaacatactgatcactttcgattccgtatggaatgaaactgctctctacaatagaaagaacatcttccttcataacacgtctggaaagggaggaatacagatccatgtcgttcatggtcaggttttccatggcacctttatttccgtcccgtgcctgtttcatcaggtttaaccgctgttcagaagatttttctttgtttgccagcatcttacttgttttcataactggcaacagaatttttccgccggtagagagacctgccaatacagcgttttccggtccacgtgtgccatgcagtgcatattttttctcacgcagcacatcagcaatattttcaatataaaaaatcagtgtgacgcctaattttaattcgtcacagattccggcaaatgcctctcttcctgcgtggcgttcaatttcgatcatctcatttgtggtgatctgagagccgtgcagataaggataataatattccatacgaaattctttgtcgttgatgaaatttccacaaaccataatgccaatgtcggttccaaaatttttggagaaacatgcaaattcgtttcctgtttcatcggttacaatggtctgttcatccggacgattcaaaatagattccagtacggggtacagttctgcatttttggtaagatcgcgaaatccaatagatcttaaaaatgtatgtatcatagattattttccctgttcataggtgttttctaatgccatatcaagagcttctctttcttcatctgcaagcatgatcacagagttgccgttgataatctctttgatataagtgtagcagccttctctgctgtgcattgcgttgataataaatccgtcattttttcggtttaacagtgcaagggagaaggaaagtttgccgcccatctcattgaaggcatcgtattttacaagtccgactttctggtaagtattgtcaaggtggtcaagaaccatctgaactttgcgttttgtatcctcatcggaagcaatcagatcatctacctgattcagacgttttaccagggtatcctctaaggaagcggcatttttgccggacataaatgcttcgtaacgttttttcaatttgcgcatcttgactccgtttatgatcatgatgatgatcagaatcagaacaagggcggcgagaccggcggtgatcacatcaagactgatgccggtcagatcttcaatatgcaattttaaataatccaatgtttagtcctctcttcgtttttgaaattttgaggacaatcagatgatatctgtgattccagcacattctatttttagtgtattcagtttctggcagattcaggttctgatgtcctgcaaaagttgttgggttactgaatactctgaataagttcaaccagacggtttaattcgtcctgtgagtaatattcaatttcaatttttcctttttggtcgtttttctgatgaatttctactttggttccaaagatacgtttcatctgatcggccagatctgcataaatggcagataatacaggatctttttcctttttctttgatgtatcgtcgtcctgaagtaattttctgaccagtttttctgtttcacgtacactgagtttttcatcaaaaatacgaagtgccagctgatgctgtaattcctgatcttcaatggaaatcaggcaacgggcatgaccggtagaaatcatttcatcgatcaccatctgctgaacctgtttggaaagtttgagcagacgcatggagttggttactgctgttctgcttttggaaacacgttcggcgatttcatcctgttttaaatgaaattcttccattaatctgcgatatgcctgtgcttcctcaattgggttcagatcttcacgctggatattctcaatcagtgaaatttctacgatctgctgatcggtaagtttgcggataatgacaggcacttcctttaaacctgccagttttgctgctctccagcgacgctctcctgcaatgatttcataatatccgttcttttcctgaactaacagtggctgtaaaatgccatactgtttgatggattctgccagttctagcaatccgtcctcatcaaaatgctttcttggctgctcccgatttggttctaccagggagatttttaccatactgtcaggtgtttcttttttggtactcttcttctttgtagttgttgtggtggaagctgtagcaggtttctctgcagcttctgttttatttactttgttcacgagtagggaatccagtcctttcccgagcccacctttttttgctgccatattgattaatcgtcctctctgtctattacttcctgcgcaagtaaacggtagctttcggcaccggttgaccgtggatcatatacgttgatcggttttccgtgacttggtgcttctgccagtcgtacatttcgcggaataatggttttgtaaatggttgtgtccagattctctttgacattttccacaacttgcagagaaagatttgtacgtgcatcatacatggtaaatacgacaccttccatttttaataatggattcagtcgctcctgtaccagattgatggtgtacattaactgtgtcagaccttccagcgcataatattcacactgaatcgggaccaaaacggttgtggcagttgtcatagcattgacagtaagcatatttaaggaaggagggcaatcgatgataatgaaatcataatcatcttttactttttcaatttcattgtgaagtacatattcacggttctcaatgtttaataattcaatctctgctcccgccagattgacattggatgggatcagatcaagaccttcgaactctgtatgtacaagagattcctgaaaactgcattctccaagaattaattcatagactgtattttcacattcgtttttatcgacacctaatccgctggtggtatttccctgtggatccatgtcaatggtcaatacttttttgccggcttctgccagacaagcagaaaggttgatcgtggtggttgtttttccaacgccacccttctgatttgcaattgcaataattcttcccataagtttcctcattcctgttagttatactctgatttcatcagtatttatgcgaaaattcaagttatacgcatatgagactgtagattgtacgtaattttatcagtgtaagctgctatgttttaaaaaaatattgcacaactacatatcggcatttttatactgtgaaatattacttttttgagtataacactttttaaaatggatatctacaaaaaaacaaaatgtttcacgtgaaacatctaaaaaaagtgtgaaacatggataaaaatagattcgtatggaaaaactgtttcacgtgaaacgtaaatggaacttaaaaatagtaagttgtgattaaaaaatgcagatggaaaatagaaagaaaaaaattgaaaaatgagcgggcgacaataaaaaagtataagttataatgtttcacgtgaaacatttaaaaaggcattaaatttatctcagtcgagaagactcccacttctgcaagtggtgagtaataacaagtctttctcagtgggagtacaatctccgactgagataaacgctccgcgggggcgcacattgtctgggagacaatggttttgcgccgaccggaacgaagtgtagatgtgcagtgattctgagaagaatatgtcagctttcgctgaccagaatcacgcaccaagtctcacgtgcgttcgacttgaattgctacaaaagatattcccgttattcatataattaggaaattactttttctgtaagtacgcaatcttatgagataagcgaatgatatatcagatgggagatgactcccacctctataggtggtgagaaacaagctagtatcagtggtgggagccaatcccccatctgatatagcctccggcaggagtacagaggtgcgcagttgaagtatgtcatgcaattgcatgacgcgcacctcgcaacaagaatgccggagcattcttgaaaaaaaagtatttgtatctcaaggggcaatggattataatataggtattaaaatgattaaatgcgaaaggggtttattgatgaaaaagcatattaagaatagcgcattattactatgtattgtagctggtctgattattattattaataagctgatcagtgttttctcacatatgacagaccatttaccgaccggtggtggaaaatattatcactggaagtatggaaatatctattatacaaaaagcggaaaaggaaagcctgtattactgatccatgatctggatccgacctcatcttcttatgagtggaaagcagtgatcaaaaaaatgtctgaggatcataccgtatatgccattgatttattaggatgtggacgctctgaaaaaccgaatatgacatacaccaattatttatatgttcagttagtaaatgattttatccatgcagtaattgaagaaaagacagatgttattgctacgggagattccctttcttttgtaattatgggatgtcagatggaatctaaatactatgataagatcatcggagtaacaccaactgacttgtacgaactggcaaaagcaccgggacgtagaaaaaatatgctgaagttcctgattgaactgccaattatcggtacgtttatttataatatggaagtaagtaagaaccggatcattgatgcatttgtaaataactactattacaaaggacacatggtttctgaaaaaacgatccagacttactatcaggcagcacatattggtgatggcggtggaaaatatctgcttgcaagtatcaaaagttactacaccaatatcaatgtggtatctgcaattaaaaagatcaacaacagcatttgtctgatcggtggaaaagagcatccgtttattgaagatgttattaatgattatcaggagttcaatccagcgattgaagatgcatatattccgaatactacttgtcttccacagatggaagcaccggataaatttgtacatctggtaaatattattcttcactcataatgataaaaagacacagcaaatatgtttcacgtgaaacatttctgttgtgtcttttttgactgataaattcagaaaaatagaactgctatttttcaacaacagttctatttctattacaattttattattttgtgattttgtcattcgtcaagtgtaatcaatatattttctctcttatattttttataccatatatttgttatttaagtggtaactttgcaggtgtacctgcttttcttggatatttctttggtgtatcttttactttcttaatacaaaccagtgcacgtctcagatcggaatccggtaactggaatttgtctacggaagtaagttttccaccaagaatagaaatcgccttctttccttcctgaatttctgcatcagaatctgcggatttgtaggaaacaaataatccacctttttttacaaatggcaaacagtattctgtaagtactgccagattggagactgcacgtgaaacacagagatcatactgctgtctgtgcgtagcattggaagccatctcttctgctcttccgtgaacggcagatactttttttaggccaagtgcatcgatcacttcctgaaggaacaggattcttttgttcagagaatccatcagggtaatctctaattccggaaatgcaatttttaacggaatacccgggaaaccggcaccggttccaagatcgatgacggtcagtttctgactggcaatatccggaatcacgcggatcagagaaagactgtccagaaaatgtttctgaatgacttcttcgtattctgtaatgccagtaaggttcattactttatttttttctacaagcatttcataatactgcagaaactgttctatctgttcgtctgtcagagtgatgttcagttcttccagaccgtgtttgaatttggtcagatcataactcatacgtttatttatcctgttcttgttcttttttctgctgatagtgtaattgttccaaatatactaaaatgacagaaatgtccgccggggacacacccgaaatacgggaagcctgtccgatggagatcggctgatacaggttcagtttctgctgtgcttccatgcgtaaaccgctgatctgattgtaatcaaagtttggcggcagctttttgctttccagtttcttaaactgttttacctgtttgatctggcgtttgatatatccgtcatatttaatattgatatttacctgttcgcggacgtcctctgtcagttccggacgttccggatcaatcggtgccaaaacatcataatttaattccggacggcgaatcagttctgcaagggatgtaccggtattgagtggctggctgttgtactctgccatcaatttctgtaccggtgcggatgctcctaaatgaacattttccacacgctgtacttcttcttcgatgagctgttccttttttacaacatagtcataacgttcctgcggaattaatccgacttcgtaaccgtgtctggtcagacgcagatcagcgttatcctgacggagtaacagtctgtattctgcacgggaagtcatcatacggtatggttcatggttttcttttgtaaccagatcatcgatcaatacgccaatgtaggattcggaacgatccagaatcagcggttctctaccttttactttcatagcagcattgattccggcaatcagtccctgagctgctgcttcttcatatccggaacttccgttaaactgtccaccactgaacagaccggagatttccttaaattccagagacggatacagctgacgcggattgatacagtcatactcaattgcgtaggcattccttacaatcttgacattctctaatcccggtacagtgtggtacatcgcatactgtacatcttcaggaagggagctggacataccgccgatatacatttcattggtgtgaattccttctggttcaatgaatacctgatggcggtttttatctgcaaatttcactactttgtcttcgatagacggacagtaacgaggaccggttccttcgatcatgccggaaaaaagcggggatcggcttaaattttcgcggataatctcatgtgttttttcgttggtataggtcaaccagcagctgacctgatcgatctgtacatcatccggattggttgtaaatgagaacggtacgactctctcatcgccgagctgttcctgcattttggaaaaatcaacggaacgtctgtcgatacgtgccggtgtacctgttttgaaacggaacatttctactccatttgcaaccagggaatcggtcagatggttagctgcctgcagtccgtttggcccagtgtgattgaccacatctccgtaaagacagcgggctttcagataagtaccggtacaaagtacgaccgcttttgcataatactctgctcctgaaaacgttttcacaccacgaatttgcttatcttctaccattaattcggtaacctctgcctgacgcagtgtcagatggtcggtgttttgcaatacctgtctcattctggcactgtaatcggctttgtccgcctgtgcacgcagggaatgaacggcaggtccttttgatttatttaacattttagactggataaaggtatggtcgatattgacgcccatctcaccgcctaaggcatcgatttcgcgcaccagatgacctttggagctgcctccgatattcggattacacggcatcatggctacgctttcaatgctgatggtaaaaagaatggtttccagtcccagtcgtgcgcaggcaagggctgcttcgcagcccgcatgacctgcgccgacgatacaaacatcataattttcttttataactggcatatatttttcctcatagaaatattactttatattacaactgctatataacaaatggaaaatactatcatattttctattgattatataacatacaaacaatatacaaaataaacattactccatgtttttacaaagagaatttatccgagcagatatttgtaatctacttatagtacttgtttataatctaattattatttcacaaaacaataattgagctaaatcctgttagtttatttacccatacagaatttactgaagatctcatttaccagatcctcacccacagattcgccgataatcgtgcctaagacctcataggcattcatcatatcaatggtaaagaaatcttccggcattccgtcgtctatgctctgtaacaccattttcaggctgctctctgcctctgccagagcatttttctgacggatatttgtgatatatacttcatcattgaaggacagttttccactgaaaaacatttcctcaatgagtttttccagctcatggatcccggtgttattttttgctgaaatggaaagaatcggtttgtctaaacgttcctgtaaaatggctgcatcagtcttggcatccagatcggatttatttaacagaacgattgctttcttatcctgaatggcttcaatgatctcctggtcgttttcatccagttctgtagaggaatccacaacatagatgatcaagtctgctttttcaatatattctctggatttgttgacaccgattttttcaacaatatcttctgtgtcgcggatcccggcagtatcaatgacgtttaatccaatgccaccgatctgaatctgctcttgcagaatatcgcgtgttgtaccggcaatctctgtaacaatggcacgctcctctcccaccagaatattcagcagggaggattttccggcgtttggttttccgacgatggcggtgttgataccttcttttaacatttttccgttatcggaagaatccagcagtttttttactttggagtgggcatcgctcatgatcccacgtaactgctccggatagccatccagtgaaacgtgctccggatcatccagagcggattcgataaaggcgatctcatgcagtacaacggcacggatgtcctttattttctccaaaacggcgccctgtaactggctgacggagctctttagcgccagctcattttgggcgttaattacgtcgattacggactctgcctgggacagatcaatacgtccgtttaagaatgcccgtttggtaaactctcccggttctgccgggcgggctccatattttaaaactgtttccagtatttttttcataaccagaacaccaccgtgacagtcgatttcgatggtatcttcgcaggtataactgcgcggtgctttcatgatcagaagcataacttcatctactacttcttcaccgtctaccacatagccataatggatggtatgtgtctccatatcggaaaccttgcggcttcccttttttggacgaaaaatgcgatctgcaacttctaatgcttcgtcaccgctgatgcggacgattccgataccggaattagacatggctgttgcaatcgctgcgattgtatcagttttcatatttgtgttcttctctcagattaaatattaatatactttcggaacatttcaaaatagttattttgttataatcaaagaatccgaaagtatctaatagaaaataaattagatggtggggtcaaaagatgccatacgaattgtttcgtacttcgtactctcacaattatgcatcttgttttttattataatatttttatttcataacgtaaagaaaactttcagcaaaagacggatgccggacgataggttaattttcatcgtggctgcgagcatagcccgcttccgtgagtgtgtttgagcttgctggttttgcaagtgagttcgcggaaggaagcggatataagcggcgcagcagacacagaaaattatccgtgtccacatccgtctttgctgaaagttttttaatttaaaataaactcaaaaattactgtctttttaatgtaattacaacatgtctgtaaggctcatcaccttcgctgtgtgtagaaacgtaacggtcattctgcaatgcggaatggatcacacgtctctcaaatgggttcatcggctcaagagatactgcctttttcgtacgttttactttgtaagcaatattccttgcgagattttccagtgtctcttttcttctcttacggtaatcctctgtatcaagttttactctggtataagtctcagaatgtttgttgatcgcgaggtttgtaaggtactgtaaagagtcaagtgtctgaccacgtttgccgatcagaacgcccatctcattgcctttcagctctacatcgtatacattttcttcatcggaaggtttgatcagaatctcaacttccagtcccatagcgtcaaatacctgagaaaggaaatttctgatatgatctacaacggtatattttttacgggctttgatctttgccggtttactgttgaatccaagaaatcctgaactgcctttttctaacacttcatactcaatctgatcgcttgttacgccaaactcaaccagagcgtttgtaagtgcatcatcaacagtttttcctgtaaattcgataaaatccattacaatgccctcccctattttgtatttttgttattaaaatcttttacaagatttgctttggaagccatgcttccctctttgtattttttgtttgtatcctgtttcacatcttttgtggaaacggaagctgctttgtctgccatagatctgtactggatattacgagtgtttactttggcagcgtttgcgatctgttcgccggctacgccttttttctcaattttcttcttattctttgcagctgcttttgcctggttctctttgatcactttctcaagatccatcttatcaaaatgcttgttcagaaggaactgctggaagcttcgaattacggaacctgcgatccagtagataccaacaccgaccggaaggaagaatacgatgaatacagaatataaaggcatcatgtagttcatcatcttcatctgacctgccatagcttcctgctgtccgccgtttgaagctgcctgtggcatcagacggatattcaggaactgtgttaaagctgcaaggatcggtacaagtaaagccagaataatcagtacataatgtccttcgtgagcacttgttgtaataattgtcttcggagaatatacgatattgattccgaggaagttattaaaatgctctactgcagactgggtacttgcaataacatctgacagaccgctgaatttatcctggagtaatgtccagttatcgctggtacatttgtacaatacgtcaacgatagaatcatgagcctgctgagtcgttcctgaaaaattcagagaaataccacggaatacggagtttttcttggaaactgtctcaaggaaactgttcatggtatcctgatatccgctggtacccataataccggttacaacgccgtcaaatgtactcttaacgtttgtgatgtatgccggtacgttgtaaataacacgatagagagcaaacaggatcgggagctggatcagcataaatacacagctaccggacggggatacgccgtatttctggtaaacggcctgtgtctcttcattcattgcctgaacagatgcctgatctcttcggtttttatactttttctgaattgcctgaatctcaggattcatgatctgtgacatctttgagaacttctgctgcttgtaggtaagcggaagtaagcaaagatagataacaatcgtaaataagatgattgttaaacctacgttctggatgtgtaaaaatttatccataaaagcgtagattgcgttcataaggtaaccgagtacctttgcgattggtcctaaaatcttacctgaattctgagtaagtaaaaataaggaatccatctggttgcctcctataatcatggaaccggatcgtaaccaccctttgagaacggattacagcgtaaaatgcgccagagcgcaagtaatccacccttccatgctccatacttctctaccgcttccagtccataggtggaacaggtcgggtaatacggacatttcgtggttttcatcggagaaatatatttacgataccattttattaaaaaaatcaatatttttttcaatgtgattccatcttcttttcttcggggttcataattttctgaagatttcccaagtgcagcaatgcggattcgatttcgtgatatgatgcgttttttgcgcctgcccttgcgatgactacaatgtcccaaccactatggaacatctcttcatgcagtctgtaactttctcttactaatctggtaatatggtgccggacaacactgttaccaactttcttactaacggaaattcctaatctgtttctgtccgagtcatttttcagcgtatacatgactaaaagtctgtttgcataagatctaccttcccggtaaactgtccggaaatctctgttcttctttaatgattctgaaaaatgcatgtctcttgtcctctgatttacaacaatttgtctaaagagaagaaaagaccacaaacgttgtggcctaagctgttaatttttttcttccttttaatcttctagcggccaaaacttttcttccgcctgctgtactcattctttttctgaaaccgtgaactttcgctctctgtctctttttcggctgataagtcattttcatatgtgatacacctccattcctcgtagcatcatttcggatgataacaaaaaaagtcagacaagtcaatagaaaattgaaaagttttagaaaaacgtgtaaaacgcccgaaaatccatttttgccccgtctattatcccctgtacggttcggaagttttcattgaaaaatggcgcgatttgagttatcatagacattggatacttaccgctactaataaagaaatggagatagttatgcagttagtcgaagaaaaatggagtgagatccttctgactgtaaaacgggaacatgagctgacagatatttcttttaatacctggttgaagccgcttcagatcttttctatccagaataaccgcatttttgtactggtttccagtgagcagatgggacttacttatattaataagaagtattaccttccactcaaggttgcagtggcagagatcaccgggatggaatatgagattgaatttgttcttccggagcaggccagaaaactcaaaatgccgcatccggcgcggcaggctacgacagaggaagcggaacggtcgaacctgaatccgaactatacattcgatacatttgtagtgggaaataataaccggtttgcacagtcagcgtcgctggcagtggcagaatcacccggagaaatctacaatccgctgtttttatatggtggtgtaggtctgggaaagacacatctgatgcattccattgcacattttattcaggaaaatcatccggggatgaaggtgctgtacgtttcatcggaaacatttaccaatgaactgattgaggcgattagaaatggcaataatactgctatgagccgttttcgggagaaataccgcagtatcgacgtgcttctgatcgatgatgtgcagtttattataggaaaagaaagcacgcaggaagaatttttccatacctttaatgaacttcatgtggcgaaaaagcagatcattttgtccagtgaccgtccgccaaaggaaatggagacattagaagaacgcatccgttcccgttttgaatggggacttctggcagatatcggttcgccggattatgaaacccgtatggcaatcctgaaaaagaaagcggagcgggatggatttgagctgagtgatgagatcctgaattacatagcggtcaatattaagtcgaacatccgtgaactggaaggtgccttaaataagctgatggcgtacgtcaatctggttcagacggagatcaccatggagatcgcgcagaaggaattgcagaatatcatttcaccggacaagccacgcattgtgacaccacagctcattatggaagtggttgcggagcattttggcatcagtatcgaacagattttgtcaaaatcccggagtaatgatgtggcaaaaccaaggcagattgccatgtatctgtgtaaaaatatgacggatgcatcgctggaagccattggaaaagtgcttggcggcagagatcactccacggtggttcatgggattaagaaggtggcagaggatgtcagtgcagatgaagctgttgcaaagacggtagagacgatcaagaagaaaattaacccaaattaagtggacaatatgtggataaacagatgaaacatgctgattacatgttgatatacgtgtagataacagaggaaagcgttgtggaaatctgtggaaaaacggaaatctcaggtatcacgttgagagaaaatgtacgtgagatcctttaaggtgtgctctgatgccggagaaaaacggaatttttcacagattgtccccaaactgtaagtagcaaatccacagcaaaaaacagaaaaaaatatggtgaaaatctgcttaacgtaaggtggtggaacgttatccacttatacacatgcgctaagacgattacgacgaaaaccatttatatatagatatattatgtgaagctatgatgcctgaaaggagttattaacattatgaaaataatctgttcaaaagcaaacctggtaaaaggtgtcagcattgtatcaaaggctgttccgtccagaacaaccatgccgattctggaatgtattcttattgatgcatcggcaaatgagatcaagctgactgcgaatgatatggaacttggaatagagaccgtgattgaaggagagatcgttgagagaggaatcatcgcactggatgcaaaattcttttctgagattgttcgtaaacttccggataatgaggttgtgatcgagtcggatgattctttccagaccatcattacctgtgaaaaagcaaaatttaccatcgcaggaaaatccggtgaagatttttcttatcttccatatattgagaaaaatgagtccatcaccatttcccagtttacgttaaaggatgtggtacgccagaccattttctctatcgcagataatgatacaaacaaactgatgaccggtgagctttttgaaatcaacgagaaccgtctgagagtcgtatctttagacggacaccgtatttccatccgaaatatcgagttaaaagaaaactacagtccgttaaaggttgtcgttccgggaaagacacttcaggagatcagcaagatcctgaccggtgaagctgaggatatggtggatatttattttgcagacaaccacattttatttgagtttgatcagacaaaggttgtatccagactgatcgagggcgagtatttccacattgatcagatgctttcttctgattacgatacaaaagtaaaagtaaacaaacgtgagtttttaagctgtattgaccgtgcaaccctgctgatccgtgagggtgataagaaaccgatcatcctgaatattcaggacggaagccttcagttaaagatcaattcctttgcaggttccatgaatgaggagcttgagatcgacaaagagggaaaagatctgctgatcggatttaacccgcgtttctttatcgatgcgcttcgtgccattgatgatgaagaagttactttatacatggtaaacccgaaggcaccttgctttatcaaggacgatgcaggtacttatgtatacctgatccttccggttaactttaacgcagcaaccgtataaacgcagtggcgtcagtattacagaaaaacgaggcttatttgcagaacctc

SEQ ID NO: 13150 - DNA, 3691 bp, Unknown
  gut microbiota DNA sequence
aaatagtaatagataaaagcgaggggacaagttgaataacgatttttttggaacagagaaaatctcaaaaatattattaaaaatggcgcctccggttatgctggcacagctgattcaggcgttatataacgtggtggacagcttttttgttggacgctattcagagagtggactgacggcactctctattatttacccgattcagcttctgatgatcgcattagcggtgggaaccggtgtcggcatcaacacagaaatggcgtacaaccttggaatcggaagaaaaagaagatctgacgagacggcaggtatcggcacaccgcttgcacttttgatgtgggtgatttttgcggtagtctgcttctttctgatgccggcatatgcgcgaatgaatacctcttccgaggaagttattacaatggtagtgctttacggaagaatcgtttgtgtactcagcatcggactgtttctggaaagtgtctggacgaaagtgcatcaggcagaaggaaatatgcggatgccgatgatcgcgcagattattggtgcaattgtaaacattgcgttggatccacttttgattttcggcttatgcggtctgccgaaaatgggaatcggtggagctgctacagcgacggttgtgggacaaatcgcggcggcattgattgttatgaaaggcggttttcgtaagattccagcgcttgtggtattcccacaccagatcaagcgaatttataaacttggaattccaaatattttgatgcaggcagcgtacactttttacatatttggcttaaacctgattcttgcaacattttcagatcaggcggtaacagtacttggtttgtattataaatggcaggcatttttctttatcccattgggtgcaatgcagacttgtatcgtgccggtggtaagttataactatgcggcgggcaaatatgagcgatgcaaaaagactttgaaggtggcaatcatattcggaatcgcgttgatgatgatcggcgttgttttatttgaaactattccgggaccgatgctacatgtattttcacatgatccgaaagttatcagtattggtgaagtagctttccgttttattggaatcagttttattccactggtaagttccctgacgtttcctgtatttttccaggcgttgggacatgcggtaaaaagttcgattttgacgattatcagaacggtatttttgtttattccgttggcgtacttgttttcaagatttggattgaattatttctggctcacctttccggtgacggattctatcacaacgctggcaggttaccttttttaccgccagtttgtgaaaaagacgatgccaaagactattatggaatagaaaaatgcgatttttagaagtgtgttttttatggaatattatagaaatctatgaaaagagcatataagttgaaacggttgcgtaaatagataaatacaggcgataagatgatagaataaaaatatagaagtccttttggaaaagagatgaaaaagtatatgagtaaaaaactgggaattatatcggatacccataacaaacttcgtccggaagtattggagattttaaaaacctgtgactgtattttgcatgcaggggacgtgacaaaagaagaaattcttgatcagatccgtttccttggaaatctgtacgtcgtgcgtggcaataacgatggtgactgggcgaaaaatattgcaaaagtactgaaatttgaaatcaatggcgtgaattttgtgatggcacatgagcgtcggcatctgatcggacagacggaaggtgcagatgtggcagtatttggacatacccacaagtactttgaagaacagtcgaaaaatctgctctggctgaatccgggaagctgtggatatccgcggtttggcggtgctgtgactatggcagtgatgcagatggaagatggtaaatatcacgtagagaaaattgacttttcagaggcgaagtgataggatttatattacaaatgtgagtagaaaaatatatcagcaaagaatgaaaatcctttgactgatatatttttgactgcaagattaaactcaagattatgaagaaagagggaacatattatgataaatccggcagcagctatgaaagtaatgaaagcaaaaaatcagtttgtaagcaatcacccgaaatttgcggcatttttccgcaacgtattaaccggtggcgtgcaggaaggcacgatcattgagatcacagtgaccagaccgggtgaagaaccgatgacaacaaatatgaaagttcagcagtctgatattgatctgttccagaacctgaaagatttgaatggctgattagaattgtgtggatagtctgaaagattcaattcagaagcaaatcctgttatagcagatgagcgcatttttatatacaaatgtatgtgaaggtagagtaggaatggagacagtgcaatggaaattccggaaatgttagatgaattaaagcaaaaggctttgcacgatgagaatttacggcaggagctgcttgcgaccaaagaagatccacaaccgctgactgctttttgcagaaaatgtcaggagaatggatatccgatctatgagatggagctgattctagcaggagaagaattttatgccacgatgaagcggagcacgaatggcggtggagagaactcaccgatgttggagggggaagatgatttctatgaactgttttttgcaggattatagaaaaatcacgaaagataaaggatgaagcaaaatgtacacaatggttttactggatgatgaaaaaattgttttacagggtattcagaaagtctgcgaaaaggaagattgtggttttcttgtaaaaggtgcttttgtagatccgttaaaagcattggatgcacttccggagctgagaccgcatctgatcattaccgatgtgcggatgccgcagatggatggactggaatttgcaaaacgtgcaaaggaaattttgccggagagtgagatcgttattttatccggataccgggatttcacgtatgcacagacggcaatgaagattggggtgagtgattatctgctcaaaccgatcaaaaaggcagatttttcggacatgctgcaccgcatgtatgcacgtattgaggcaaaaagtggtcaggcagcttattatcaggtgttggatggctatgcccgtggactggttggaaaagaagaagtggaaaatgtcgtatcatcttccgcaatgaaagatgtcggtcagcggccgggcatggtgaatccggagggagaccagtcagcaaccaaaatcgtgcgggatgcgctgaattatattaagaagcattataatgaaaatatttctctgacagatgtagcagagcatgtaaatgtgaataaaagttatctgtgtgacgtttttaagaaggaacagaatgttacgatcattaactatatgaccaatctgcggattgagaaagcaaaggaattgctggttcatacggatatgaagatgtatgagatttccgtggaagtcggttacaatgattatacgtatttttcgcagatctttaagcgaaacacaggatctacgttatcagaattccgcaagaaatatgcccgaaaataataaaagaaggaagtctatcggaaccgatgttgtctggttcgatagacttccttttttgatctcagtctgagatgagactcc

SEQ ID NO: 13151 - DNA, 6332 bp, Unknown
  gut microbiota DNA sequence
aaatggtcttgcaatgactctgccgacccccagatcaccctgcagcatctgccgcgcaatctcgcagtcacggtacagttcttccaccggaaccacatcctcatgcgctgcaatctgaaacacagaatcagcggatgtataaacgatcagcgcacctgttttcctatgctcatcgccataatcctgaatgacctgtgtgccggaatacggtttgttgcacagcactttgcgtccaacagcctttgaaaattcatccagcatttcctgtggaaatccattcgggaaagtcggcatcggctttttggaaatcaatccggcaatctcccaatgtccggtagtcgtatccttacctgctgattgctctgtcatccttgcaaatacaccttccggtgctgcatacggtgttttcgccgtcacaccatcaatattgaataatcccagtttttccatattcggcatggaaaattccgggctctttgccacggttccaagggtgttgctgccttcatcgccatactttgccgcatccggcatctcaccaataccaaaactgtccagaacaattaaaaatacacgtttcatctgctgttcctccttgtctgcgttttttatcctgttacccgaaaaaatctgtttttcttcgaatatccatttgtctacagtatagcacattctcctattttctgttcatcaatcactctcattaaggcaattttttatatcactggctcaatggcgtgatcacgatattttccgctgagattccggtttttctttttacaatgtcttccacctgcgcccgtttcgcatccgtgacatctcccatattcaacaccacatccgcttcattatccgtaatgctgactactacgtccgaaaatccctttgcttccagcaaaatttctgccgcattttcccgttctgccacatccgtcatttgaatcatagaatcaatagcatcctgtttctgtgcctctgcaatggaagtattattgataatctccagtaatgtttctttatttttggaacgcacctgctcccgatccagtttcacatctgctgcaaacgccagtccctgtgcgtctgcggaagtctgtactgtttcccctgggttctgcacatcttcggtattcccctgatccgtatcgttttgcgtgctctgattcgcctgatctgatccatcttctgactgtgcatctgccgcactggcagcctgggtattatcctccgtatccgtaaaaatctctccaatctgatcaccctcagaaatatcatatgtattgtccacattgtcacctgcggtctgaatcgcttcattttccgccacgtttgtcttcgtatagctgatgtagcctgccacagcgatcatcagagccagtgcggtaataataatctgatttttccgaaatatctttttcaattggaatctcccttcgttttcattttaactatctttattttatgtgcatccagtccaaataatgcctccaccgcctcagaaatattttttctgacgcttgcatccgcacctccctctgccacgatcaaaactccatccatcttcggcaatatttctttatttacaaatggtgtttcatccccgtctgattgtgaaaaaacagtcgattcactactttcccgactaccggaattttccacccctgatgttcctgcgcttcccgttgttccaccagaagaattctgtccggaactccccgtgccagcatcctgccgcattgtcacatccttttccaccacagactctccctgatcctgaaacgtgatcatcacctgcacatttccgacaccttccatcccctctaaaatctgcgccagacgtgtttccagtgttttctcataatcggattcccccgatccggttccatttgtctgcgcaatttctgtttgtgcattttgctgctttacagttttcgaactgctctttccagtgggcatggcaacaaccaaaagcagcacccctgccagaaataagatcagccactgatcctttttcatctttttccattttttctcccgcaggaactctttcagatccattatgcctcatacacctccacctgatccgcagatatgccacacgcctgcgccgtctcctcctgcatacgctgcctgctctgttcactagtaaccgccgtccacacttttacctgaagaatcgaaccgtcatcctctgacaaatttacctcaacctgctgcaccggacagccattcgtctcccccagtttttctatcatctgcgccaccgcatccttcgtttgtacctcataataagcctgctgctgccgttccatataagagaaatcaagctgaccgctctgtaacacatcctcctgtaaaagttcccgctctaatgtctgctcccagtttttctgccccaaaatcgaaaaaagcggactcacaatagtaagtacaaacaccattcccgcaaaaaagcgcacatatttccgatacgttccgttaggaagcacctgcagcaaaattgtcaggaaaatccccagaaagatcattcgttttacccattccaataactctgtcataccgtcgccgtcaccaccaccgctatcgtaatcatgcacaataaaattcctgttcccaatgcgcgaaacagcaataatgcgccatctcccacacagtcaatacatccacagatccgtttatccgaaaacggttccgcaagtgcgcccgccatcttatagaacaccgaaaatatcagcatttttagcagtggtccaatcgccagacacaataacacaatcatcgccgctgttccgattccgtttcgtattactgccgcggagccaaaaaaaatatttccaactgcctgcgctgtatttcccagtcccggtatcatgctgatggtctgcgtcacagacatttttttcagattgtccacagacggagcgatcatccgctcgatcacattcatgccggtcactcccgccagcaacagacgcatcacccaaatcaatccccgcttcaataacgccgtcattcgtgaaatcagctttcccgccgtcatacagttcaacatctgtaacaccacatacacatgaatcgccgggatcaccacatacaacagcacacgctcgatcaaataaatcacaatcagagataactgataaaaccctaccgctgccacttgctgactgcaaaacaccatcgtcatgcaaaatgccggaagcaatgcttccataaaactgatcacctgatccagtacgccctccaaaatgccatgaatcagcagatacgaccgcagcagcaatcccattaacagcaaaaaatacagataaaatcccgtttttgaaatctgactgttctcaaatacattgataaaattctgcaaaaacgcacaggccgccgtcagaagcaaaatctgaacaaacacctgtctgccttcttccacatctccaaatgcactgcgtaaaatctgacgaaacagttcctgcttgtctgtatttgcatctgccagcatcaggcttttcacaagttcccggaaatatatattttctgtgtcggtattctcctgcaacacatcctgaatatccgataaaggtaaatcagataataaatcctgctgcatgctatcgctgtccgatgttcctacatcatcagttcctgctttataggaaaccttatcaatttgtacctttggtactgttgcaagataaatatcatttttgtgaatgatttgggcattctctatgtccacaggatttgcttccgccgcctgcaccggtttcgccccaatacttcccccaacaagcaaaacactcaacagtacaacgtgtatcaaaagcaatcgcattttctccattcgccgttctctttgatctatcgcatcgacattctttttttcaattttatatatccccacagcacacttatttttcattccatccatgcccatctatcgttctatatcttctctcaacattgcctatattatttcaaatacttttcatctcacttaatctcaatccttccaaaatctatcatacctcaataatctttcattttcttccacacttttacgctcccaacagtccctcaattgtttccaacagtgtcagtaacactggcacgcttaccgccataattgagaacttcgcaaacatttcaatctgacttccaattgcagaaaatccagcatctttgcaaataccagaagcgaactctgccacataagtaatccccatcagcttcaccagaattttcagcatcgctgcatcaatcccggtatactgttctatcttctgaatcgtttccattaccacctgcagccggttcatactgaaaatcaggatcagaataacagcggccagactcagatacagagcatattcacttttctgctgtttcaacagcaatgcaagaactaccgctccaataccaagcatcgaaatctgaatgattcccaccgtatgctcccttccttctcaatcttgttttataatgagaataaatttttaatcttatcaaacaggtcataaatatagggtacaatccaaaacaatacaatcaccaatcctgtcagactgaccagaaatgcgtgttcctctctgccgctgtgttttaaaacctgtccaatcaccgtaaccagaatccccaccgccgctattttaaacaacaaattgacatccatacatgtcctcctgtaacctcatccaccgcaaaatcccttttcccgtatgtaacctaatttttccttgtatcttctcttctgcattaacttgttataattctcaatcaacctaattttccttcacccttcatcacatagtaactattccaacatactatcttgtcagaccagaaccaatatcacaaagattccagctgccatcccaagataacggtaaatacgtttcttctcctccaactctttctgcacctgttcctgcatccgctgcaaccgctttgcacatcccttcaaatgttgttcctgctgcatctgatccaaaaatcccagatgttttccaatccgacagatctcgtccaactcctccgatttcaaaaacaaatctttctgcgcttcacgaaacgcctgctcccagattgtcacaaattctgtcccacttccctttttcatctgctctacaatatgtagcagcacaatagaaatctccggtcgcactttcttttgcacctgcaacaatgcatcctgaatgggaagccgttcatatcggatctccgctgccagtaattcagtcatttcaattaacgattccagcatttttctatgtaaatttcctgtgcgaagtatctccctgacaaatccgacgcaagccaccaacacacagacacttcccgtcaattttaaaaacatacatcctcttttcctgctgttttcacctgataccttctctttccatcttccttcgaaataaccacatattttccaaacatccgctcatccctacacttgtcccacccgggcttttgaaacagttcctccagacttcccgcatgtaccgttgccagcaaatgacatccacaccgcagggcatattgcatggcgaaaaaatcttccattccaccaatctcatccacagccaaaatttctggtgccatactacgcaccaacagcatcattccttccactttcgggcatccatccaatacatctgtccttattccaacatcattttgtggaatcccgtgtaaacatccggcaatctctgaacgctcatccaccagcccaatccgtttcccgggatgtatttcatctccatttgaaaacagtcgaatcagatcccgtaaaaacgttgtttttccagttcccggtgcagatagcacaagcgtattttccggttccccatgcttccataactgcttgtacaccgtttttccgcatccttttcgctctctggcaatacggatgttcaaatataaaattggataaatcctaccgattgtccctgctttctgcgtcacctgaccgcacacaccgattcgatgtcccccttccactgtcaaaaatccctgccgaacttcctcctcgtaagcataaagcgaatactgtgacatcagcgtactcatctgccgcagatcttctgcagttaccgataggcactgcctgtccggaaagcttaccaacgtatcattcttcaaaaaatacgctcctcttgcagtgaccagttctatcggttgattcacccgtacccgaatttcctccagttctccggcaaacatttcaaaaatattcgcctgcaaaaaacactccctgattcttatgggaaataacctcaaaatctgctccatcgcatcactccattcggcaattttttcaaaaatttattccaggttttctt

SEQ ID NO: 13152 - DNA, 5929 bp, Unknown
  gut microbiota DNA sequence
gggacttcataagaaaatcagtgattataagaaactggcagaagaacttggaaccggagaactgacactgcgtgatattgtgagcgaactggaaaaaccgggcagagatccgcgtgaggacatgccaaaaccgatccttcgtaccgatgtacttgagatgaaggacttaaaaccgggcatgatcctgaaaggtaccgttcgaaatgttattgattttggcgcttttgtggatatcggtgtgcatcaggacggtttggtacacatttcacagatctgtgatcgctttatcaaacatccattggaggcagtatctgttggagatattgtggatgtgcaggtactcagcgtggatgtggcgaaaaaacgaattgcgctgacgatgaagattcaggaccagaatcagttagcagaaaagcagaacaaaaatgttcagaagaaaaaataacttgcggattttatgaaaatgtaatctgcaggttgatcaatagtctgaagttttgttaagaagataagctgtagaagataaacaatttaaaatgctacacgcagactgacaaattaattgaggaacatgaattatgaatatgaagatagagtcgttttcagcagaagaaacctatgaattaggaaaaaaactaggaagcgaggcaaatccgggagatgtgttaacactcatcggtgaccttggagtcggaaaaactgtatttacccagggatttgcagatggacttggaattacggagccgatcagcagcccgacatttaccattgtgcaggtatatgaggaaggcagactgccattttatcattttgatgtataccgcatcggcgatatcgaagaaatggatgagatcggttacgaggactatttttacggaaatggtgtgaccatgatcgagtgggcgaatctgatcgaggagattctgccggagacatatcgggaagttcagattgaaaaagatctggaaaaaggatttgattatcgtacaataaccatcagggaggtgcatcgcgcatgaaaattttagccttagacagttcagggcttgttgccagcgtagccatcgtggaagatgacaatatgctgggagaatataccgtaaattataaaaagacacattcacagacactgcttccgatgttggatgaagtggcaaaaatgatcgaactggatctgaacagcatcgatgccattgcggttgcagcaggaccgggttcttttaccggactccgtattggttccgctaccgcaaaaggacttggactggcgctggacaaaccgctgatccatattccgaccgtagatgccttagcctgcaatctgtggggacatcagtctttgatctgtcctttaatggacgcgagacggcagcagacctataccggtatttatgaattaaaaaatggtgcactggaaattttacagcagcagtgtgcggttggaatcaatgaaataattgcgcagatcaatgaaattggcagaccggtaacattccttggagatggtgtggcagtattccatgattatatcgaggaaaattgtacggtggcacacgattatgcgccggcacatatgaacaaacaacgtgcaggtgctgtggcatggcttggtcttcagtacgcaaaagaaggaaaattagagacagcagcggagcattgcccggattatctgcgtctgtcacaggcagagcgtgagcgtcaggaaatgctggagaagcagaatgccggaaaataatatggatcatgctttgaaaaatatggtaaaaaatgctgacttacttgataaaaaggatggtatttccgggaatgcaaatggagaagaaccgaagcatgggatttccgaaagtgtagatggaaaagaacaaaggtttggtgttcctgaagtaggaagtggcagaggccagaaactcattattcgtgaaatgcagccggaagatgtccctgcggtagctgcgttagaagcagcgtgtttttcagagccatggagtgagcaggcatttctggatgcgctaaagcagccggaagcactcatgatggcagccatcggtatgggtaacaatccaatgggttactgtggaatttatctgtcggcagacgagggcgagatcacaaatgtggcagtgcgcccggatcacagaaaaaaggggattgccgatgcaattttgacagatgtgctatcagaatcgcaaaagcgtggcgctcggaccatttatctggaagtgcgggagagtaatctgcctgcgcagaagttgtatgagaaacatggctttgtatcctgcggcatcagaaagaatttttaccggaaaccgacagagcatgccattgtgatgagctgtgatctgacacggaggataagcgagtgagaaaagcaggcgtattatattgtaattgttgtggaaaaacgatttcagagagctgtggagctgatcgggaagaattttttcattttgaaaagacttggggctatttttcggaaaaagatggaaccagtcagactgcggatatctgtgaatcctgttttgaacagtggatgtcacagtttcgaattccgccacagaccgtggaaaggacggaaatatttgaatgttagatgtatgtttactaggtacgggaggcatgatgccattgccgtatcgaaaattaactgcgttgatgacacgatataacggaagtaatctgctcattgactgcggagagggcacacaggttgccatccgggaaaagggatggagcgtgcatgatctggacgtgatctgttttacgcactatcatgcagaccatatcagcggtcttccgggacttttgctgacccttgggaacgcagaccgcacaaaaccggtgcacatgatcggtccgaaaggactggagcgtgtggtaaatgccctgcgcaccattgcgccggaactgccgtttccgattgaatatcatgaaataacagaaaaagagcaggattttgagatgaatggatattgtatccatgcctttcgtgtaaatcacaatgtaacctgctacggctataccctggaaatcaaacgtcagggcagatttgacgtggagcgtgcccgtagacaggagattccacagaaattctggagccgtctgcaaaaaggagaaatcatcgaggatggagaccgtgtgctgacacctgaaatggtacttggtccgcagcgaaaagggatcaagctgacctattgcacggataccagaccagttccgatcattgcagaatgcgcgaaacatgcggatctgtttatctgtgaaggcatgtatgcggaaaaagagaaagaagcaaaagcccgtcagtacaagcatatgactttttatgaggcagcagatcttgcaaagagagcggaagtgacagaaatgtggttgacacattacagtccgtctctgaccagagccgagagctatatggatgaggtgcacaagatttttccggcagcttcccttggaaaagacggacgcagcgtagaacttgaatttgaagaagtctaataatagaacatatgaaagtagtgcagacagattgaaaatgtttgtttgatctatattaagtttggaaaatagataaatgccgtatggaatacggtagatgggagaatattatggcagagaaagatgtactgattcttgcaattgaaagctcctgtgatgagacagcagcagctgtcgtaaaaaacggcagagaggtattgtccaatgtgatttcatcacagattgcattgcatacattatatgggggcgttgttcctgagatcgcctccagaaaacatattgagaagatcaatcaggttattcaggaagcgttagacgaagcgcatgtgaccttagatgacattgatgccatcggtgtaacttacggcccgggattagtaggtgccctgctggttggcgtagcagcagccaaagccatcagctatgcgaaaaagattccgttggtaggagtgcatcatattgaaggacacatcagtgccaattatattgaaaacaaagaccttgaaccgccatttttatgccttgtggtatcaggcggtcacacacaccttgtaaaagtggcagattacggaaaatacgaaatccttggaagaaccagagatgatgcagccggggaagcttttgataaagtagcccgtgccatcggccttggttatccaggcggcccgaaaattgaaaaagcagcccgggagggagatcctatggcaattccgttcccgaaagcaaaagtcaacgataatccgtatgactttagtttcagtggcgtaaaatccgcagtattgaactatatcaacggatgcaagataaaaaatattgagatcgtgccggaagatatcgctgcatctttccagaaagcagtgacagacgtgctgatcgcacatgctatgcatgcggcagaagaatttaaaattgataaacttgcgattgcaggcggcgtggcttccaacagtgtgctgcgggaaggtatgagagcagcatgcgagaaacgcggaatctctttttatcatccgtcaccgattttctgtacagacaacgcggcaatgatcggtgcagcagcatattatgagtatctggcaggaacccgtcacggatgggatctgaatgcagttccgaatctgaaactgggagaacgctgatatgagtgaaaagaaacggcatgcagccattgtgctggcagcaggaaaaggttctcggatgaaaagcgatgttccgaagcaatacctgatattaaatggaaaaccggtgctgtattatgcactccgggcatttgaggacagttttgtggacgaaatcgtgctggtgacaggtgcaggtcaggagtcctattgccagaaagagattgtagaaaaatatggatttcagaaagtgacgcatgtcatagcaggtggaaaagagcgctatgattctgtctatcggggaatctgcgcgctggatggggcagattatgtctatatccatgacggcgcacgtccatttattgatgatgcccttttattaagagcaaaagaaaacgtggagcagtatcacgcatgtgcagccggtatgccgagcaaagataccatcaaaatcgtagataaggatggctttgtggcagacacaccacagagaaagtatacttggatgatacagacgccacaggtgtttgactatctattgattcgtgatgcttatgaacagctgtatcagcatatgcctgaagtacagatcacggatgatgctatggtagtagagacgatgcttcagactccagttaagttatatgaaggaagttataataatataaagattaccacaccggaagatctggtgattgcagagtcttttcttcatgtatagacagcttttttgtctgcttatgtaagagagaaagatacatatatagccctgctaattgaacatgtgaaaaaaatgtaaaaaaatgaaaaaaacttgttgacaaggcagggggttatatgtataataatccttgcgctggtcaaatagcgcaaaacaaaattggagagatatcgaagtggtcataacgaggcggtcttgaaaaccgtttgtccgcaagggcgcgtgggttcgaatcccactctctccgttatcgactaagtcgatgatcatatattatttttgttcggagaagtacccaagctggccgaagggacacccctggaaagggtgcaggtcgttaacagcggcgcgagggttcaaatccctccttctccgctcacagttataaaaaatgaaaaaagttgttgacaagcacttgaatacatgataatataactgagctgttgaaaaaacagcaagaaaaaaagttgttgacaaagccgatcgccggtgataagataaacaggctgtcgcttgaaacgacaataaagaaaaataaaaaagttgttgacaaagacaaatgcttttgataaaatataaaagctgtcgcaaagacaac

SEQ ID NO: 13153 - DNA, 1605 bp, Unknown
  gut microbiota DNA sequence
agatttctatcacctgcgttgccaggaagttcacgccgtccatcgcatggtcacacaccaacaagcgggcttgtgcaccctcctccagaataatcagcacacggcggttcaccataaaattgacgtcaccacgcaggatattcaccagctgaataggtttctctaccaccacgttcttaggaacataaaacagaacgccgtcttgtgcaaaagcggtgttgaacgccgtcaccccatcctctgccgtatcagccaacttgccataatatttcttcaccaaatcgggatgtttctcggccacctccttcaggctgccgaagataaccccttcaggcagatgggacttaggcaaagccctgccataaaaagcatcgttcaccacaaaataaagagcagtgctcatattgggaacatcgcacttgaacacttcataaggattcaccggaatttccaaccggttcaagttcaagccataatccggctcaaagaacttgctgatatccgtatatttgtatttctcctccttacgggtgggaaagcccaagcgctcaaagtcagcaaaagcagcggcacgcggcgcattcagcacctcggcactatgccggcatatcatcgcctccgtttgggagaaaaggtctatgtattgttgctctacactcatgttttcagattatgagtttataattcacctgcttctttccttatccaatcgaagccacgtgtttcaatctccttcgccaattccggtccaccggtctttacgatacgtccacccagcagtacatgtaccgtatcgggtttgatatagtccaacaaccgctggtagtgggtaatgaccatagcactggtttccgcagtcttgagtttgttgaaaccgtcggccacaatacgcaaagcatccacatccaatccggaatccgtctcgtccaaaatagcaaaagtcggttccaacatcgccatctggaatatctcgttacgcttcttttcaccgccgctgaaaccttcgttcacgctacggttggccagcttgttgtccaactccacaatggcacgcttctcgcgcatcagcttcaggaactcactggccgacaaagcaggcagatggcggtacttgcgttgctcattcacagccgcacgcatgaagttcaccatcgacacgcccggaatctctaccggagcctggaaagaaagaaagattccttcatgtgcacggtcctcaggactcatggcaagcaagtccttgccattaaaggtaattgagccgcgcgtcacttcgtaagcaggatggccaaccaacacattactcaacgtacttttaccagcaccgttctgtcccatcagtgcatgtacttctccatcacgtatggtcaagttgatgcctttcaatatttctttgccattgatgctggcatgcaggtcttttatctctaacatctttatatttactatttgactatttacaatttactatttataaatcaccccacgcttccttccagcgaaatggcaagcaatttctgcgcttctacggcaaactccatcggaagtttattcaaaacctctttggcataaccgttcacaatcagccccacggcatcttccgta

SEQ ID NO: 13154 - DNA, 17701 bp, Unknown
  gut microbiota DNA sequence
caccaagtctcacgtgcgttcgacttgaacgtttttaggataatctggcaaatcttaatgaatgagactcatgtatgtcaatagggattaatttttaattctatggcatacatgggtctctttttttgaatctatcagaatgtactagttatcacagttaataaaaagtttatagaaaattccttgtgcaatggcagaattacggtataataaagaaaaacttgaaaaccatacacagaaaggggttttgaaaatggatttttttgacaaattaggaaacacaatttccgcagcaggaaaaacaggtttaagcaaagcgaaggagattaaagatacagcgagaatcacattagatattcaggaacgtgaaggagcgatccgcaaactttatcaggatcttggacaggcttattatcaggctcacaaagatgatgagaatccggaatacgagcagattgctgagattagagccgcttttgaagaaatcggtgaattaaaatcagcaaaagatgatatccgtggaatcagaagatgtccggagtgtggtggagctgttgctgatagtgcaaacttctgctcgaattgtggtgcaaaatgcgaaaaaccggagccggaagtatatgaaggtgaagtagttgattctgaggaagaggcagctgaggagacaacagaaactgaagctgagacagatgcagaagatgcaccggtagctgaggaagcatttgaagatgaggataaaatcgaagaataaatcttgctccgtgtggatgaaaatttgatattgtgaagggaaaaagtctattttgtctcatcggctaacaatcgctcgctgagaaaaaatagacttttttccatttacgcattgatatgttgaaattttcatccacactacgctgcgtaacgcatttacatgcggttacacattagatgtaggtaatagacggattttatagcgaaacagattagtggctgcataaccgttgttgtgtacgtaaattaagggcctggttttattttttctcagcgagcgattgttagctgcggagacaaaataaaaccagacccttttaacaacttaaatttccgcagaaacctgcttcggaaacgcctttttcgtataaatgatcatcagtatcgcaccaatgagccaggaaatcggatataccatatacacgccatcaatggttggaatatgcggcacagccaactgaatccatacgacacgatacacacacagtgaaatcaggataataaccatcggcggcacagattttccgattccacggatcgctcctgccaggccatgcatgatagccagcataaagtaaaacgggcagaagtaccacatagcacggacaccatattcaattaccgtcggatccttggaaaatacaccaatgatcggatgtgagaacagtaacaaaatgccgccaatgcaaaggcagtaaatcactcccatggcaacagttacgttcatgccttttcgtacacgatcaatatttccggcaccataattctgaccggcaaatgtggtagccgccatactgaaactcataaccggcagaatattaaatccgtcgatcttgatataagctgcaaatcctgccatagccagtgcaccatagctgttgacactggactgaaccagtacatttgcaaaagaaataacagtattttggattgccgttggtacaccaacctgaatgatacgaacagccacttctttgtgaatccggatttttcttaatgctactttgtagctttcatctacccgcatcaaatacaacatacacagcaccgcggaaagcacctgactaatatcggtcgcaatggcagcaccggcgattcccatttttaacaccgggataaataaaagatccagtacgatatttgtaaaagaagcaatggcgaggtacaacagggaacgcttggaattaccaactgcgtttaaaataccgcttgccatattataaagaacgctgaacagcagtcctgcaaaatacagtcttaaataaataacggactgtggcataacctcatccggtgttcccatccaacgcaggatctgcggagagagtgtgataccaagcacggtcagcacgacaccaaggatcagtgcgattgccagagcagtatgtacagattcatgaatgcccttcttattttgtgctccgataaactgtgagacaatgacaccggcaccggctgcggcacccatactgaaggaaatcagcagactgatcagagaagaactggaaccaacggccgccagcgcttcacttccgagtgaatttccaacgacgatggaatccacggtgttatataactgctgaagcatatttccaagaatcagcggaatggaaaaaagtaaaatgtgtttccagatcgtaccttctgtcatcagggtagaaccggatgattttcttttatgtagagcaattcccatatcaattcctcctatagttactcaccaagcctcacatgtgttcgacttgaataaagatatattttttatctgtgaattggttaacagcgataacttatattataacgctacttatttacaggaatcaatatgaaaatagaagatgcaaattcaagtcgaacgcacgtgagactcggtgcgtgattctggtcagcgtaagctgacatcttcttttcagaatcactgcactctacactccgttccggtcggcgcaaaaatccggcattatgactgcctgcttcattgacttttcaaggtgcctgtgatacgcttaactactaggaaaaaagaactgttgagtctttatttaagtagattattatgcagacagttcatccgataaataccaaaaaaggagtgatttgattatgtgtaaaacctgcaaaggaaaatattatatgaccacagcgattgcctacacttccggcaaaccgcacattggaaacacttatgagatcgtgctggcagacagtatcgcccgttacaaacgtcaggaaggttatgacgtatacttccagaccggaacagacgagcatggtcagaaaatcgagttaaaggcagaggcagccggcattacaccgaaggagtatgttgacaaaactgccggagaagtaaaacgtatctgggatctgatgaatgcttcttatgacaacttcatccgtacaactgatgaggatcatgagaaacaggtacagaaaatcttcaaaaaactgtacgatcagggagatatttacaaaggatattacgaaggaatgtactgcacaccgtgtgagtctttcttcacagagtctcagctggtagacggcaaatgcccggactgcggccgtgaggttcagccggctcaggaggaagcatatttcttcaaaatgagcaaatacgctgaccgcctcatcgactacatcaacactcatccggagttcattcagccggtttccagaaaaaatgagatgatgaacaacttcctgcttccgggactgcaggatctgtgtgtatccagaacatccttcagctggggtattccggtagattttgatccgaagcacgttgtttatgtatggcttgatgcgctgacaaactatatcacaaaaatcggttacgatgcagatggtaattcttctgacctgttcaagaaaaactggccggcagaccttcatctgatcggtaaagatatcatccgtttccataccatttactggccgatcttcctgatggcactggatcttccattgccgaaacaggtatttggacatccgtggttacttcagggtgatggaaaaatgagtaaatccaaaggaaacgtactgtatgcagatgagctggtagatttcttcggcgtagatgcggttcgttacttcgtacttcatgagatgccgtttgaaaatgatggaaccatttcctgggagctgatggttgagcgtgtaaactccgaccttgcgaatactcttggaaaccttgtaaaccgtaccatctccatgagcaacaaatattttggcggcgtggtaaacaaaacaggcgttgaggaagacgtagatgctgacctcaaagcagttgtaacaggaacccgcgacaaagtagctgcaaaaatggatcagctgcgtgtggcagatgcaatttcagaagtatttaccttattcaaaagatgtaataaatatatcgacgagaccatgccttgggcacttgcaaaagatgagacaaaacaggatcgtcttgcagaagtactttataacctggttgagagtatcaacatcggtgcagaactgttaaagagcttcctgcctgagacatctgcaaaaatccttgctcagatcaacggcacagagcgtgattttgacgatctggcaaccttcggtctgcgtgagaatggtctgaaagtaacagataaaccggaaatcctgtttgcacgtctggatcttgcagaggttatgaaaaaagtagaagaacttcatccgcaggtaaaagaagaagcaccggctgaggaagcaaaagcagacgaggaagtcatcgacattgagccgaaggaagagatcacttttgaagactttggaaaaatgcagttccaggttggcgagatcattgcctgcgaaaaagtgaaaaaatccaaaaaactgctttgctctcaggtaaaaatcggaagtcaggtaaaacagatcgtttccggaatccagaaacattacacaccggaagagatggtcggcaaaaaagtcatggtacttgtgaacctgaaaccggcaaaactggcaggcgttctttctgaaggtatgctgttatgcgcagaggacgcagagggtaatctgtccctgatgacaccggagaaaacaatgccatccggagcggagatctgctaatgatttttgacacacatgcacattatgatgatgaacagtttgatacagacagagaggcgctgcttctcggcatggcggagcagaatgtcggcacgatcataaatgtcggcgcatctttagacggctgttggcgcagtgtggagctgacgcatcagtatccatttgtctatgcggcggttggcgttcacccggacgaggtaggagacttaaatgatcagacttttgcccgtctgcgggaaacagcccgcaccgaagaaaaagtggtagccattggcgaaataggtttggattatcactgggatgtacagccccacgaagtgcagcagcactggtttgtacagcagatggatctggcaaaagagctggatctgccgatcgcggtacacagccgcgatgcggcaaaagatacctttgatctgatcgctgcccgtggtaaaaatcagcgcggcgtgattcactgctattcctattctccggaaatggcgcaggaatatgtaaagcttggatatcatatcggacttggcggtgtggtgacttttaaaaatgcgaaaaaggcgaaagaaactgcacgacaaattcctctggagcgcattttgctggaaacagactgtccgtacatggcaccgacaccgtttcgcggaaaacgcaacaattccgcgtatatcgattatgtggcacaggaaatcgcagatctgaaaggaatttccaaagaagaagtgattgctgttaccgaagaaaatgcaagaaagctgtttttatccaaataagaaagtgagttgtgcattaattctcatttgcatttgagttgattagaaatagacaatatttgcagagtataaaacttgaatatggaaaatcattgtttttcatataatataggagaacataggaatatgagtgaaaacagaccaaaaccgtatcttggaaatccgcaggagaccattgcggtattaaaccgttataaatttgcatttcagaaaaaatttggtcagaacttcctgatcgatactcatgtgctggagcgcattatcgacgaggccggtatcacaccagacgattttgttctggagattggaccgggtatcggaaccatgacacagtatcttgcctgcgcagcccgtgaggttgttgcggtggagatcgacaaagtgctgatcccgattctggaaggtgacacactgaaagcatttgataacgtaactgtcatcaatgaagatattttaaaagtagatattaacaaactggtagaggagaaaaacggcggccgtccgatcaaggtggtagccaatctgccatattatattacgacaccgatcatcatgggtctgttcgagagccatgtgccaatcgagagcattacgatcatggtgcagaaggaagttgcagaccgtatgaaaacaggaccgggttccaaggaatacggtgcgctgtctctggcagtacagtattatgcaaatccggaaatcgtggcaaacgtgccaccgaactgcttcatgccgcgtccgaatgttggttccgcagtcattcgtctgaccagacatgagacaccagtcgttgatgtcaaagacgaaaaactgatgtttcgtattatccgcgcatccttcaatcagcgcagaaaaacactggtaaatggactgaaaaattccggtgagattaatttcaccaaggagcagattgaggcggcgatcacagcgattgataaaccgttgacaatccgtggtgaagcattgacacttgcagaatttgcagctttatcgaatgctttttctgagatgtagtaattatcggataagaattgaaattctgcagatgataggaatattaaagttcataataaattatctgtggaataaaaaataatctgagtcataaagtttagaatgaaagaaaaattcaaactttatggctcaatttttatattaattatttttgttccgtatttgctgaccgtttgggtgagaggcggttttggaggaaaacagacacatcctgtacaggagcagatcgaagaacaattgccctttgtggtggcacgggaaatttcgatagatagtgaatcggaatgcctgaaggcacagacgattattgcccgaaccaacctgtggaaaagctatcagaaagcattggcagaagcacaaacagatgaagatgcagcaggcaaaactcagacaggtgaaaatgtatcggaagaaaatctgtcagcaaaaaaagaggcaggaaaaagtacaacaagtgaaaatgactcagacaaaagtaaaaagattcaggacacaaatatagaatggactgtatctgattctgagttagaaagttacacagaacaggaattgaagaaaatttggggaacttcttacgaatccaacatggaaaaactcagacaggcagtggaggaaacttccggcgaaatcctgacctgtgaagatcagacgattcaggcagcttatcattatgccgcaaattgtaaaaccagaaacgcatccgaagttcccggtcaggaggattatatctggctacagagtgtcgacagcgaagatgatatgcttgcggacggatttttgaatgtcagttacatggaaaaacaggattttgtaaatgcattggcattgatttttcaagatgaggtgttggatgcggctcaaatgcccggcgcattggaattatccaaacgcgacagtgccggatatgtgacggaggtaacctatggaataacggtagcaaacggggaagcggtgcgtcaggcgttgcatttgaattctgcctgcttctatctgtctgaactggacgggaaaatccgtattgtcacaaaaggcatcggacatggactgggacttagccagtatggggcaaatgagcgggcaaaacaggggaaaaactgccgcgaaattttgacttactattatactggtgtcagcatcaaatcatggtaaaagttagttgagggtatatagaaatcggcatataatatgattcattttccgtattttttgcagtccgtttttactgcattgaataaatccatttttttcggaaagaataacagtaaaaccataagtaataactggaatctggaggagaaaaatggaaaagcagaaaaagacagagcatgttgaaaaaaaggaaaaacggcgacgaatcatccatacacagaaatcatatctgaccgcaggagtgatcatgctggtggcagtcattgccatggcgggggcttatcagagagaaaagaaaaatgcggaaaacgcacaaaatgaagcggtggcactggcagaaaacgactgggtggagcctgagacagataccacctctaccggggatgagacccaggaaaccatggcggcacagacaccggaatcacaggtttccgacaatctcagcgcacagactgatacaacagggatctcacagacagatccggtacagggaagcaccgatacgacagcgttaaacagtcaggtgcagaccagtgaagaaccggtgatgcatttttctgcatcggacaccatcagctggcccctggaaggcgatgtgatcttgaactacagcatggacagttcggtttattttgccacattggatcagtataagtataatccggcactgatcattgcgggagcagtcaatgaccgcgtgacagcggcagcagacgggcaggtgatcggtgtggatacgactgctgaaacaggacagactgtgaccatcgggcttggtgacagctatcaggcaatctatggtcagttaaaagaagtcgaagtatccgcgggagattacgtgaaacagggcgatactatcggttatctggcagagccgaccaaatactattccgtagaaggcgcaaacttgtatttttccatgacaaaagaaggaaaaccggtaaatccgatggactatattcgataaaagttttgttcacgcattgcagcgaatctgtgtataataacagtgtaccggttaatattcgcaatcgaaaaaatgaatacagttttaccggagaagaaaaatcctggtatccggtgtcagacgtctcacctgatatctggataaaacgctatacgttggtcggtaaaaaggaaggtacgtgaataaaatacagcaggttcgattgctttttataaggatgtttggggtgtgcagtaagatatgcgaaaaatatggactgtgcgccctgagcagagaaactgcaattggaatatacgaatccgatgaaaatggtgatcggatgattcaagtcgaacgcacgtgagacttggtgcgtgattctggtcagcgcaagctgacatcttcttttcagaatcactgcacatcctcgcggagcatttatctcagtcggagattgaacttccactgagaaatacttgttactactcaccacttgcagaagtgggagtctcaactcagactgagatgaaacaggatgagtctgttattgtacgatatagatgaaatatgctgaataagaaataatttaagaaaataagggtaatattggagagaacatgagagaaacaacgagaaattatacatatatcttaaagtgcggggatggaagtctctacactggatggacgaatgatattgcagcacgcctggaacagcatcgcagcggaaagggtgccaaatatacacggggacgcggaccattgcagctggtgtatctggaagtgtatgacacaaaatcagaagcgatgagtcgtgaggcaaggatcaaacgttttacaaaaagtgaaaagttgaaacttcttgccgcagaagaatggcgttcggaactgactgtggaggaacaggagttgcttatttacagagattaaaaaatgagctgcctaatattctaggtagctcattttgatcgacgttgataaatacgctatggatgttatcttgagataatcatcttacagatcggatttcccatggaggaaaatttctgttcatattcagtcataacatttccctgattcagtgtttcatcatgatgcagatcccaggtaaatgcatctaaatgccatcctgcaggctctacctgctctagggagaactggaacagatctttgttgtcggtcttgaattccacatgtccttccggtttcaaaattttatcatatctgccgaggaaggtctgggaagtcagacggcgttttgcgtggcggtcctttggccatggatcggagaagttcaggtaaataccatccacttcatgttttgcaaacatattacagatgttttctgcatccatacggataaagcgcagattttccggctgtgtctccatagcatctgttttttccagagcgcggacaagcacgctggagtatttctcaataccgatgtagttaatattcggattctgctgagccagagtggtgataaactgtccttttcccatgcctacttcaatgcggatcgggttgtcatttccaaatattgtatgccagtttccggcctgtgggtcttcttccagaaaacacagcggatgatcagcgatggtttcccgggagcccggtacatttcttaatctcataaaaataattcctttcatcgttaaaaatacttttgttttgtaaaatttccattataaaaacaatggaattgtgataattatagtaaaaaatcagacacaaacggtgtccactattgtatttatgtacttacgatatttggtagttttcttatagaaaacgtcttatgtttgtacttagtaattttttatagaaaattttgtgtctgcttggtattttactataagtttcatggagcgacaagagaaataccgctgttttgcagagaaatacgggtgaattttattaagatatcctgaatttttcgctgtaatgcctgtttcttaacacttgagaggtgtttctactggacggaatatgtgaattttgctatgataattgttgtgtgaatttttatttatctcagtctgagttgagactcccacttctgcaagtggtgagtagtaacaagtatttctcagtgggagttcaatctccgactgagataaatgctccgcgagggcgcacattgtctggaagacaatggttttgcgccgaccggaacggagtgtagagtgcagtgattctaaaaagaagatgtcagcttgcgctgaccagaatcacgcaccaagtctcacgtgcgttcgacttgaacttaatagagaatcctctcatatctataaatgaggaagggacagaccgttttcaataagaattccgttgctgattgagataaatactctataaagatgtgcagagttttttggggaagaatataatcaacacatttatgggaaaaatagagtaaaggtacgaaggtatgcaaacgacgttcaaggcattcttgaaatgagacctggtgtgtaattccggtcagcgtaagctgcgatgaagtttggcatatttggaggaaaaaatgaaaaaaatattaaaaagaatgacaggcattttcctgtgtgtggcaatggcggttggcatatttggcacaacgccggcttttgcagagggggaagatgtcagcgcacagaacacgcaggcgcaggcagcacagtggccgacgggaccggaagtgcaggcatcaagtgcagtagtaatggatgcgtccactggcaccgttttatttgaaaaagatgcggatacaccgcgttatccggcaagtattacgaaaatcatgacgactttactggcactggaaaattgcagtctggatgaggttgtacatttttcggcaacagcggtatacgaaaatgaaggtggcacttcccatattgccagagatctggatgaggaaatgacgctggaacagtgtctgtacgcgatcatgctggaatcggcaaatgaatgttcctacgctgtggcagagcatgtgggtggtggtgactatcagaaatttatcgatatgatgaatgcaaaagcagcagaacttggctgcaccaatacgcattttaacaactgtaacggtctgccggatccgaatcatgtggtcagtgcccgcgatatggcactgatttccagagaagcgatcaaaaacagtatgttccgtaaaatcgtgggaaccgtgcgttatgaaatcccgccgacaaacaaacatgcggatccaactccgctgaacaatcatcatcagatgatcagcgcatacaaaggtcgtcaaaatctgtatgaatactgtgtaggtggtaaaaccggatggacttctgatgccggaaatacactggtaacttttgcagaaaaagatggcatgacactgatctgcgtggttatgggatgcagcgcaggcggtcagtacagcgataccagaacattatttgattattgttttgacaactttaagctttttaacgtatcacagaatgaaaaccgttacgaaaatacgcaaagtacaggaaattctttgtttacagaatggaatgcctttgcaaaagtagacagtacggcacagatcatacttccggcgaatgcaaattttgcagatacacagacagaggttaattatgatcagacaagtgacagcattcttggaacgctggtttactcttatggtggaagacaggttggaactgccaatgtggtcacgactggagcgaagatcactgcttatccgtttggggaaaaatctggtacggtaagtaaaaacgataaccagacagagctgtcagaaaaaagtgcagaaaccgggaacgatgcgcagaataacaatacttctgcgacaaaatccaatacacagatcagcaaaaagaaactgctgttgatcggcggaggtgttgtgggagcaattattgtcgtgctcatcatctggttactgtataataatatccgtcgtatccatcgtagaaaagaaggacgcgaccgccggtttaagactataaaaaataaccgcaagtggaacaagcgtggtggacgctaaaatcatatttcgggtaattgtgtggtttaaaatgtaggttatgaaaagggactctgcaattttgtctcgtccgctaacaatcgctggccgagaaaaaatagccagagtccctttcttttacgttgtgttttaaaaccacactgcttacccttgcgttgtgccaccctaaatagccgggaatttcagttctttatattttccatatttctgctgaaccacatccatatgctcaaagaaatcaattctcgtcttaatgatctcatttaagtgttctgcacgggcagagtttacatttcgatcacggatcagaccattctcagcaagtacaaatttgtactcgccattctcgtcttttaccagatctccacctgcaccacaaactgcacactcgaatgggaactcaataccatcccaatgtttgtcgcctttgtagatcagtgcggaatgacatctcgggcacattccctgatccggatcaccaagccatccgcgctcttctaccggagtgttgattgctttaataatgttttcgcccatcttgtgagcacgctcaatctgctcgtcgcgcagtaatacgttacccggacgaccatttcttgtggacagcatctggtcaacaacctgtacagactgtgtgaacatggtcgcgcccatgccttccagggcaagtgtctgccagtcatggcaggaaccgccgacagcgatcagtccgcctaccatatgcggatcttctttgactgcaccgatctcaagcaggaaagaaagctcgtatgccagaaatctctgtgcaaatttcagatacagagaacttggtgtcagatcataggtcggaacaccaacaatgattccgttgcaggtgtacatttcctgaacgatcttgtccatatcatctttgctttttaagatacagccattgtatttatcaagttttcccattgctacatcacccatctgcatggtacatgcttcacatccggtacaatgctcgatgttgtaatcaaataaattgatcagtttgcactcagcaccagcctcctgacaggcaagcagcgcttcttttactaaaatttcgctgtttccgttgtggcgtccagccacgatacctaaaatcttcattgtaaaacctcctaaatttttaataacctcaataagtaacctgaatttgtagctgaaatccaaaaagtaagttgctattttataaatggatttcttggttaaattcagtgtaacaggaagcaactggtctgactagtgatgtatctttctcaatacatgcaaaagtattatagaaatatgccttttggtaatggatttgttgcaaatgggttatggaaatgatactatttgcatggacaatgacctatatttgagaatagataggtttgtaaatagataaaaaataacgggaaggacaggaaacggatatgacatttaatcagatcaaatattttgtcacagtggcagagtgcctgagttttacagaagcagcaaaatgtctgtttatcacgcagccggcattgagccgccagatcagtgccatggaacaggaacttggaacgaaactttttgtgcgggataaaaagcggttgaaattgacaccgggtggaagtgtgctgtataaccgcctgctacatttgctgacagactatgaggaggcggtggaggaagccagacatgccaattccggatatgagggaaatctgcatatcggatttctggatatctatgatatttccggtttgtttgacgatgtgatccgggaatttcgggaggcatatgaaaatatcgaaatgagtttggagcgattttctctgaaggaactgccggagcggttgtatgcccgggatctggatctcattttgacctatggtttttccctgtatgataaaccggatcttatgaccgtaaatattcagaagtttgattcctgcatcatgctgaaccgaaaccatccgctggcggcgcaggagacgatttcgctggcggatctgaaggaggagcgctttatccagttaggaccgaaagcaagtgaggaaggctatcggtatatcaccaatctatgcgtgcgatgtggactgcacccgaatatctttccggtggagaagatggaggacgtcatgctgtgggttcagactggaaatggtgttgcgattactacaaaccgcagtatcgaaaagcagaatcctcatgtagtgatccgcgatattgatgtgccggaggcgaaaaatcataacatcactatggcatggtgtaagaataattacaatccggcgatcgcaatttttatggaaatgcttgagaaaaaattaacaaaaattttataaaaatcttataagatacacgattttaagggatttgagacaaaaatcccaaaaatagtacggaaataaaaacattataatgaagagaacggcaattttttaataacaaaaatggattaacaaaaacggcgattttagaaaaaaatgttgaaatctggaaaatgccggaaaaaattgcagagttaaatttgtataacgcataacactaatgcacaaaacggataagtgaaaattctttgtgcaaattgcacataaaagagaaggacagactgctctggtttggtgaaaatagattgactttaagaaattcttaagctaaaatacgggtatcgcattcgaaactaccccacggacgtgacggacaaatgtctgtagggagtaaggttttgaaggtaacatatggtttaatggtattataggaggaagttgaaatgaacaacaaaaagaccagtagctggaacctcggtgtaaaaggctacatcgtagttattctggcgttcttctcatgttatgtgtattccgcactgacatcagattccctgaacgtgacacgtgacattttcgttaatgttttgaaactcaatcagggtgctatttatgcaatgtcaactattgcagtaccgtttggtatcgttggaagtattattcttggtcgtctgatcaataagcattcaatccgtctttactggggattaagtatgatcatcactgctgtatttacagtagcaatcggtcagatgcacaacacagtaggtgttgttgtatgttatgtagtaatctacacattctcccttgcatctgctatgctgcttgcaggtgagatcatcggacactggttcccgacaaaacgtggtgtagccatgggtctgtgtacagctggttatccgttatctgcagctacaacatctgcagtagcaggtaagtttgctgaaagtgctggatattccatgtactatgtagcaatcgcagttattgcaattatcgttggtatcgtagtaatccttttcgttcgtgatttcccggaagaaaaaggtggatacccggataacaaccctgcattcgatggtgagaaagcaaaagctgagcatcaggcagctcttgagtatctgaaaacatccaaatggacagctggtaaatgtctgaaaacaggacgtatgtgggttctctggatcgcagttggtatcacaggattcatgtccatgggtatcatgtcaaacttcgtaacaaaatttatggttatgggatatgagcttccgaacgtacttcagatgcttggtatcgcaggtatacttgctatcccgggatctatcgtagtaggttggttagatgttaagatcggtacaaagaaaaccggtatcctgatcaacgcacttgcacttgtagcagttctttgctgcttaacacatgtaacagcattacattatatctcccttccgatccttgctgtaatgttaggtggatcttccaacttaatggtatcctgtacagcagctatctggggacgttatgatttcaaaaatgcattttcagttatccagccgctgaactctgttatgacaggtgttggtatcactgtagtatctgcctgcaacagcattgacaagacatgtcagcttgcttacatcatcatggcaattatggcagtagttggtctgatcgctatgtgtgcattaaaagtagagccgatcgacaaagacgttcgctaatcagcagaacataaattagaaaaaaatattgttttagtcatattccctgaattattacaataggactgccggacgaagatgtttcgcccggcagttttttgcttgctaggaaatgatactgaaaattctattgataaaaaataaaagcagaaaataggcattttatgtatacaaaggacaataattaaacatggaaaaatttgcataaaaaaccaaaaagttgttacgttttacttgtggttccatgtgcaatcctctataataattctatatggtaaaatgcaggttacagtataaggtcaaataacacggcagcaaaaggaatgacagaacggtagattagggcagcaggataaaatactgaaaagagaattatttgattataacatatcgtgaaaccacgcgtccctatgcgtggctttttgcattttataaagatttatatggatttataaggttcgatacaggaggacaaaatgagtatcaaagagtgttatgacaaaatgggtgcagattttgatgaggtaatgcagcgtcttggaagtgagagttttattaagcgttttgccgtaaagtttctggatgattccagttatcagatgattctggacggaattgaggcaaaagatgcagaactggctttccgtggagcgcatacattgaaaggtgtctgctctaatcttggatttacaaaactgtttgaggagagttcaaaactgacagagattttacgaggaagagaactggtcggttatgaggaagcactggcagaagtggaaaaacagtatcagattacggtagatgcgatcaaggcacttgacgcgtaaggaaacatactgcaaaagatgagatcaatggtatatcagatgggagatgactccacctctataggtggtgagaaacaagttagtatcagtggtgggagccaatcccccatctgatatagcctcc

SEQ ID NO: 13155 - DNA, 17298 bp, Unknown
  gut microbiota DNA sequence
gtcgatccggtaaatttttacctgatccagaccactgtctactgcgcagacacactgctgatccggtgtcacctttacacaggtaacatgtggcatagagctgcggtctgtaatatttacaccaatgcctttatggaaaattccatctgcgatctcaccgatagaaccatcctcattcaggttcatcatggtaatacgtccgtcatggtagcctgccacaaacaggtaacgatcctgctcatccacttccagatagcatcctctcatgccacctgtccacacagaattgatcggttccagatctccatcttccagaatacggaaggactgtacaccttcatctgcaatagaataaagaaactttccgctggtagaaacaattaaatcagatggattattaatcggaaccaccttgcgttctgtcatttttcctttctcggcatccacatcaaaaatatggattcccacactgcttccgtgtgtgtaagtgccgacatatgccacataacgatcttttgccatgactattcctcctctttcctacgcaatatgtcataaagttctgctgcatggttgtcctgctccgaaacctctgccccggaaagagcaccattttctgccgctgcaagttcgatatataaaacctgcttcggatgcggcgcagattgcatctcctgcccttcttcgtccacgattctgcgaacgactaccggaatgtttcttccatccggcttcatgatttcaatctgttcccctacagaaaatttattgcgctgttcgatacggtataatccgtctgcagtgcattcccctataatgcccagataggtatactcttttacataagtattgttgtcataaatctgagcactttcatccggttttccgaagaaaaatccggttgtaaactgacgatacgtgcaattggaaatctgatccagataccagtccatgtttttccggtataattccggagactccagataatcatcaattgccttacgatacgtacgggctacggtagccacgtacaatgcggtcttcatacgaccttcaattttaaaactgtcaattccactgtcgatcagctccggaatgtgctcgatcatgcacaggtccttggagttaaaaatataggtgccacgttcattctcgtaaaccggcatatattctcccggtctggtctcttccacgatggcatatttccatcggcatgggtgagtgcaggccccacgatttgcatcacggccggtaaaataattggacagcagacatcgtccggaataggaaatacacatagcaccatggataaatgtctccatttccaaatctgccggtgctttctccctgatttcctttaactctgccatagacagttctctggcagttaccacacggcgtgcgccaagctgatgccagaactgatatgttccatagtttgtattgtttgcctgggtactgatatggatatcaatctccggacatacttctctggcgatcataaagacacccggatctgaaatgatcagtgcatccggtttgatctcttttaattcttcaaaataagctctcactccgctcagatcgccattatgagccagaatatttgctgtaatatatacttttacatcatgagcatgtgcaaacgcgattccttcccgaatctcctccatggaaaagtttttcgctttggctctcagtccaaaggcttctccaccgatatatactgcatccgcaccaaacacaaccgctgtttttaatacttccagactgcttgccggaattaataattctggatgtttcatgtaatgctccttactctttttcctgttgttctttctttacactgacggtcacgccatcccccaccggcagtactgccgtagtcaggttctcgttgtgggtcagttcatacagatactcccgcattctcttgtggatcgtgcggtttcttctggtcactgcataatgggactctatgatatctccgtcctgcagtacattatctgacacaagaataccaccctctgccagtaaacgcaagacatcgtcaaagaaatggatgtactgccccttggccgcatccataaaaataaaatcatatggttcctgcaatgtctttaacacttctgcggcatccccctccagcagtgtgatcatctgatcccgtcctgctttcgtaaaattctcttttgcaatgggaatgcgcttttcataattttctatcgtagtgatctcacagtccaccggattatattctgccatcagtaatgctgaaaatccgaccgccgttcctacttccagtatccggaccgggcgcttcatcgccagtagtaattttaacaggctctgcatttcccggcggataatcggtacataatctgctttcgcttttttttccaattcttccagaaacggtgtatttcccgtgttgagagaattgatatatgtcacaaatctttcatcaacgatcatagtctaacctgtaccagtttcttattcttcatacagaattgcttcaaaatccagacatccaagcagttccttattgatctgctgaatgatatggcagactgcaacttccgctgccagatattcccctaaaagaggatctttgtatacatctgcatattcctgttccagacggtctgcttcggtaaacagatcgatctgatctttgctattctgtaaaaaataattttttcttcgaaattcatgaagtctgtgctctttttccggatagtgatgcacttcctcccggatcttctgataccggcagaaagcgtcactgttctgcagcgcaagcttcagttcctcgatgcttgtatttaaatccattttctcttacacttccatgataatcggaatgatcatcgggcggcgttttgtctttttccatacaaactcgcccagtgaatctttgatctctgtcttgatcttgccccagtctgtgataccgcggtcggtcagatccgtcacatgctcattcaaaagatgctgtgcctcatccatcaggctctcagatccacgcacataaacaaatccacgggatacgatatccggtcctgccaaaagctgtccggaaccgccctgcagtgtcaggacaacgatgatgataccgtcttctgccagatgctgacgatcacgcataacgatatttccgacatctccgacacccagtccgtcgacaaatacggaacctgccggtacttttccaactacttctgcgccgtcttcatcaatttccagtacatcaccggatgaaatcatcagaatgtgctctttatccataccaagttctgctgccacacctgcctgcgctttacggtgtttgaactcgccatgtaccggaattgcatatttcggatgaagcagggagtagatcagtttgatctcttcctggcaggcatgtccggatacgtgagtatcctggaaaataacatctgcgctctggcggtacagatcgttaatgatttttgaaaccgctttttcatttcccgggatcggattggaactgaatacgatcagatcgtttggctgaatcttcactttgcggtgaatgccgtttgccatacgggacagagctgccagtggttcgccctgacttcctgtggtgatcagaaccgttttctcatccggataatttttcagctggtctacttcgatcagtgtattgtccggaatgttcagataaccaagttcggatgcaatggaaatgatattgaccatgcttcggccttctaccactaccttacgtccaaatttatatgcggtattgatgatctgctgcacacgatccacattggatgcaaaggttgcaacaatgattctctgatgtgtatgatcactgaaaatactctcgaatgtttttccgacctttcgctctgtcatggtaaatccagggcgttctgcattggtactgtcgcacatcagcgcaagtacgccttttttaccgatctcaccaaaacgctgcagatcaatggcatctccgtaaaccggtgtataatctactttaaagtcaccggtgtgtaccacggttcctgccggagaatagatggccagtgctgccgcatcctgaatgctgtgatttgtcttgataaactccacacggaaacatccaagattgatgtgctgtccgtattttaccactttacgttttactttattaagcatattgtgctcaccaagtttgtggtcgataatgccgatggtcagctttgtcgcataaatcggcacattgatctcacgcagcacataaggaagtgctccgatatgatcctcatgaccgtgcgtgataaaaaatccctttacacgatcgatattgtcttttaaatatgtgatatccggtatacataaatcaataccgtacatatcatcttccgggaatgccagaccgcaatccaccacaataatactgtcttcgtattcgaaagcagtaatattcattccaatggcttccagtccgccaaggggaatgatctttaatttagatttttttgtatttgccaaaaaatcgcacctcctgttttatttccgttctcatttttcttacatttcaatatccacgtcgtccagcatctctgcaaaaactttggagatagcatttaattccacatcatcctccaccattgcatagataacatcttcgtcctctgtctgtacttccttcaaaatatatgcaacagaatcctcctcttcttcctcagctgcaagcagataagtcgttccgttgatacatgtctgttctaaaaggtacaattcaagttcttcctgattctccggatctgtaaaaataattttgtccatcgcacttctacccttccgtgtgctgtctgctctgataatccagatatccctgtaatataaagatggcagccagttcatccacatattcttttctgttctctctgcggattccgacctgcatcatagtacggtctgcttctacggtggtcagtcgttcatcccagagcactacctcaagtccggtacgcttctccagcatttccttaaactcaagtgtcttctcacatcgttcgccttctgtgttgttcatatttttcggaaaaccaagtacaatctttcctacttcatattcctctttcagttcattgatccgtgccagtgtctggcgcagctttcccggtgccttccgccgcacgatctcaattccctgggcagtcaaaaacaaggggtcactgattgcaaccccaaccgtctttgaaccgaaatcaagtcccatgattctcatacgtttatcctaatcccatccatgttttgcaacgtaatctttcagaacttcttctaccagctcatcacgttccactttcatgatcagactgcgggcatttttataacttgtaatatatgtcggatctccggacataatatatcccacgatctgattgatcggattgtatcctttctctgccatcgctttatatacgatttccagaacatcaccgatttttaattccggtgctttttctactttaaaatattgtgtactgcttaagtcctgcataacttgtacctctgtcgttaaaatatatcaatatttattctaatataaataagggaaaaattcaaccgtcattatccggttcgccaggttttcctccgttggtacccatactttgacatattccggtgtcagtccttcaaaatagcgcacgccatccacctctaccggttcctcaaataatacggacacttcttttcctttataataattaataaattcttttttctgcttttctgccagctccatcaggattccactgcgctctgctttgacagattcctgaatctgatccggcatggatgcagcaacggttccgtttcgtttggaatatttaaacacatgcacctcataaaaatctacttttttcacaaatgcgcaggtctcctcaaactcttccggtgtctcccccgggaatcccacgataatatccgtcgtgatcgccggatgttcataatactgacgcagcagatcgcatttttccagatattcttccggcgtgtatctgcgattcattcgtttcaaaacagtgccgcttccgctctgcagggacagatggaaatgcggacataccttcggcagttttaccagagcctgtacaaaactttctgtgataatccccggctccagagatcccagtcggatacgttcaataccgtcaatctcatgcagtgtctgaatcagttccagcaggctgctgtcgcagtcaatgccataagaactcagatgaattcctgtcagcaccagctcctgaaaaccgttttctgccagtctgcgggcttccacagcgacatcctccagtttccggcttctaactctgcctcgcgcatacggaatgatgcagtaactgcaaaactgattacagccatcctgcactttcaaaaatgcacgagtatgctctgacggatgaatgaccgtcagttcttcgtattcctgttttgtatgattaatatccagcacgccttcctgctcaacaccatgatctgcctcataggctgccagcattgcaagaagatcctgctttttattgtttccgataataatatcaatggccgcatctgctttcgcctgctccgtggatgtctgcacataacaccccgctgccacaacgattgcatccggattcattttctttgctttatggatcatctgtctggatttacggtccgcaatattcgtcacagaacaggtattgataatatacacatccgctctgtcatggaacggcacgatctcatatcctgcctgctccaacatctgctgcattgcctctgtctcatatgaatttactttacatccaaggctgtgtaatgccgcttttttcattgtttcaactcctatatcgtgttgcgtatgcccaaaatcaattttggtaagtcatttcaaatattccgggcgtacattattgactttttcataatttgaagttactattgaataagataaaatatatatttttcaggagggctggtaaaatgaaaacagtacagatttctttaaattccatcgataaggtaaaaagcttcgtcaatgcaattactcagttcaattttgattttgatctgatttccggaagatacgtcatcgacgcaaaatccatcatgggtatcttcagtctggatctgtccaaaccgatcgaccttgcaattcatgcaggcgacacagatatggctgagatcatggaagcattaaaaccttatcttgtataatctgatacagataatgatgaaaatacttatttcaaaaccagataccgggaaaagtcaagatgattttttcccggttttttatttgccagaaaattacgctgaactttctggcaagcaaaaaacactttctgaaaacaatgcaagtttttatataactctaaacctcaatatacgaatcattctttttctatacttattcaatagactgattttttctattcctcgcaaacagtgattgtctctgttgtctcgatagctgtctgcatcagttcatcaattttctcattcagatgctgttcggaacgctcaatgatcttcaggttcggttttgtcactggatgttttgcaacgaagatcgtacagcagtcctcaaacggctgaatggatgtctcataagtatcaattttttcagaaattgcaataatatcatttttatcaaaaccgatcagcggacggtataccggcatattgcatactgcattggttgctgccagtgactgcatggtctggcttgctacctgtccgatactctctccggtgatcagtccaaggcatccggactcatttgcaaaatgctctgcaatcttcatcatataacgacgcatgatgatggtcagctggtcatgcgggcatttgtcataaatataaagctgaatgtcagtaaagtttacgatatttaatttgattggaccgctataacgggatacgattcttgccagatcgataactttctgttttgcacgctcacttgtataaggcggtgcatgaaaataagtagcctcaatggtaacaccacgctttgcaatcatataacctgctaccggactgtcgataccaccggacagaagcagcattgcttttccggctgttccaaccggcataccgcccggtcccggaatgatcatggaataaatatttacctgagaacgaatttccacgttcagcatgatatccgggtgatgtacgtcaactttcatctccggataagtgtccagaatgatctcaccaagatctgcattgatctcctgggagtttttcgggaagtttttccgtgctcttctggaaactactttgaaagtcttatttttatccggatatacgtcatccagatatttcaatacgtcttttgccagctggtcaaaaccgttctcatctactctgactaacgggcagatgcctacgataccgaacactcttgtcagggccagaactgcctcatcgtaatcataatcgccttctgcatctacataaattcttccctgctctctggaaacggaaaaagttccgtccaccggctgcagagcatgtccgatctgtttcattaacgcttcttcaaacacgtaacggttttttcctttgataccgatctcgccgtatttgatcaaaaatgactgaaacaacataagtttgtttctcctctctcattggttctaacttgtaattattctgcagttattttcaaatctaaactcaagtatactttcagtattcgtgctttcaagtcgaacgcacgtgagacttggtgcgtgattctggtcagcgcaagctgacatcttcttttcagaatcactgcacatcctcgcggagcatttatctcagtcggagattgaactcccactgagaaatacttgttactactcaccacttgcagaagtgggagtctcaactcagactgagatgaaatatgcattatgcaataacatattctcctatacatttgatccgttgcagaaaatctcgttgttatattttagtgtcttctatatctacgcagcattggaagtaactcttccagaacgctgtaagtataatctaactcttcttttgtcgtctccgggcagaaactgaatcgcagcgtggattcctgatgcgcatgatccagtccgatattcagcaatgtgctggacagggacggatgattggaagaacatgcgcttcccgcagacacataaatattgcggtcctccagtgaatgaagcaacacttcggaacgcacacctacaaaacttgcgctgacgatctgtggcgcactgtcacggtctgtctttccgttgatggtcacatcctcaagttgctgcagcttctctgtaaaatatgctttcagttcatacagatgttctgcattatcctccagatggtcatacgcctctgtcgctgccacaccaagtcctgcaattcccggcacattaatggttccggaacgcatgcctttctgctgatctccgccaaaggaaatcggacgaatctttgtcttatctttgatatacaaaaatccaatgcccttcggtccgtgaattttatgtccgctgacagaaagcagatcgatatgcatccgtttcggaatgatctgaaactttccgtaagcctgaatcgcatccacatgaaataccgtggccggattgtgatctttgatgatttttccagcttcttcgattggctctaaggcaccgatttcattgtttaccatcatcatggaaacaaggatcgtatcttcccgcagctcctgctgcaaccgttccagtgaaatctgaccgtttgcgtctaccggcagataagtgatctcaaatccctcttcttccagaaaacgcatggtatttttcacggatgcatgctctacgctggtggtaatgatatgtttgcctgcacgctggtttgccagtgctgtcccgatgattgccaggttattggactctgttccaccggaagtgaatacaatctccttttcctgacaacgcagggtttttgcgatagctgtggttgcctctttgacatatttttccgcttccacacctttcatatgcatagaggacggatttccgaagtccaccgtcagcgcttccaccattttattttttgccgcctccgaacatctcgtggtggctgaattatccagatatgcttccattgtcagcattctccctccgttttttcttccagttccagcatcagcatggacatggtgcagattgctgccgtatccgtgcgcaaaattcgttttccaagggaaagcacctcagcatcctgccgcaaaagttcaatctcttcctcagaaaaaccgccttccggaccgataaacacactgatagactgtcccggctttaccttttttaacgcttctctggttgcttccataccgcgttcattttcataaggaaccaaaatcatatcctgctgctttgcatacactaccgcttctttgaaactcattacggtatgcacttccggaattttgctgcgtttggactgttttgccgcactctcactgatagcctgccaacgttttactttattgccggccttttttgcatccagttttacaacacaatatttcattgccaccggaatgatctcgtgcacgccaagttccaccgatttctgaatgatatactccatacgatcgccctttggcagtccctgaaacagataaatctgtgacgggagctccgtatccggcgcttcctcatccagaatgtctgcctgcacgaaatcatcagtcagttccgcaatctcacaaaacatatcccgtgagctgctgctgacccggattttttcacccggacgcatacgcagtacgtttttgatatgattgacatcacttccagtgatggtcacgtattctttaccaatctggcaatcatccacaaaaaactgatacatgcttatttcctcgctgtaatgctgacccattcaccctgatgtgtcacttccagaaccgtcatgccagctttttcaatcgcttcttttacttcattctctttaaagtcaatgattccggaagtaatgaatacaccatcttttttcagacgtgccggaatgaccggtgccatcggaataataacgtctgccagaatatttgcaacaacaacgtcatatttctctgttccgactttttcctgaagttctgtatcatcaatcaggtttcctacgtaaaaatcaccctgttctctgctcaggtggtttacctcaaaattctcataagtagaggtaatgcaatcctcatcaatatctgtaccggtcagatgtcctgcaccaagtttcaggctgacgatagaaaggattccgcttccgcatcctacgtccagcacttcatcgcctgctttcatatatttacgaagctggtggatacaaagctgtgtggtctcatgtttaccggttccaaaggaaatgccaggatcgatctcaatcagaatcttgtcctgatcggcctgatccagttcttcccaggtcggtttgatcagaatatcatcaatcgtaaaggaatggaaaaactctttccagttattcatccagtcgatatcctctgtctcgctgcttgtgatcttgccgcttccgatatttacatagctgcgcatttcttccagtgcttctgccacttcttttaacttctcgctgtgatcctctccggattccagataaaagctgacataaccgatgccctgatctggtggaagttccggcagaatatcaataaacattttagaagtatcagattcagacaacggtacattatcctcgatttcaatgccttcgataccaagatctgccagcgtactgctgatgtaatcttccgcttctgtggtggtttcaattgtatatttatcccatttcatcgtacatattcctccatattttattatttcatattaagtgcacatgagatttcgcacatcactctgctcagcataagttcctatattttcacaaaatgctatgcgctctcatagttccgaacataccgattagtcctgaaatcccgggattttcatttcaaatctcgtagaaacaggactcatcaatgcatagatatttttatattaccctataaccctatcattcgacaagagtttttttgtctgaccgaaaattttgatagaaaatttaataattccactttttctttgcaaaaatatgtttcagtgcatttttctactttatcctctgcggaagcgatccaacatcataaaaatttcttcttttcgcggatatgcatagccgcaggaaagggctccatccacaaaatctgtcattccttttttctccagcagactgcagatttccgcaaccaacacctgcatttccatagaaaccgcaccttttttcacgatatatttcagtatcgctgccagagccgccatctgctcggaatcaatcaactgctccacataccgcagatccaccatattatgctcaatggaaaatccatctgttcccattacttttgtcttgatccgttcttcccggtctcctctgccatgtcgttttgcctttcgctccatttcaaacatacgcttttcagacggaagtacaaatggttctgtattgcacttaaaatccaccgacggatattccggcagtaattcctgtactttggccttcacgtctttcggtcgataggcgtccatctgaataatggtatctgccacatggaaaaaggcaccgctgctgcccgcaaccagaattgtggaaattcctgctttttcatacagatcccgcactctggcgataaatggcgtgatcggctcctgctctccactgacgacacgctgcataaaggcatcccgcacaagaaagttcgttgcggaagtgtcctcatcaatcaggaaacaacttgtacccgcttcgattccttccataacacctgccgcctgtgatgtacttccgctggcatcctccgtggaaaaacagtgcgtatcctttccatttggaagatcatgaataaacagggacagatccagattggagactgcacgaccatcctctgcacgcagcttcaacgcattggctctggtaataacatattctctgccatcacctttcacatgattgtataccccttgttctaaagcctgcagcaacgtggattttccatgataaccaccgccgatgatcagcgtcacgccttccggaattcccataccaaaaatgctgccgccaaatggcaaatcaatggcaagttccatactctttggagactcaaatgccaccgcatcttttaacggctggctggacacaccgctctttcgtggcagaatacttccatttgcacaaaatgccaccagttttcgttcttctaacacttcacgaatcttctgctgattttccgccagttcaaaaccttcctgaaccagcctcttatcccacgcctgataatacagacactttttcacgatttgcggcagaaaatccagtaagattttctccagttcctgcgcattgatcgtacgtccatttgccggaaaaccaacttcaaacctcacaatcagcaatttttctgtaaattctaccgctgtccggcgcataacttccggtcccggtctgctagtagagatcaatccgctttttccagaaccttttgccttaaaactgtactgatccaatgctctggaaaacttgcgtaagatcagatcctctaacgctgtttttgtatgtcttccttcaaaatatttctctggaaatcccgcttttgccaacggaagttccacatgcagggaggacggtgccgcaaaaggatcgccctgtacatgatcgatagacagcacaaagtcaccgaaggtatagcttcccctcagtgacttgtatgccggataactttttcgatgaattgattctaatttattttttaaatctgttttattatacatccgtaatcctatattattttcaatctgtttttcagttctgtcatcatctgtttttctatcatccagattccctctgaatttcttatttcagataattacagtaacaattatttatgagaactaatcttcttttttattaaagaaacctctctttttgtgatgtttctcctgctttacaccttcttcagacgctgtattcagggaatcacctgctaatgcatcgtaagctctcagtgcatcttttgcctctgcgcttaaggatgtcggtacctgtaccaccagggtaacgtactgatcaccacaaatatttttgttacgaagagatggaacaccttttcctttcagacggattcttgtgtttgtctgtgtacccggttttacagtataaagcacatcgccgtgtacggtgctgattctcatctcgccgcctaatactgcctgcgcaaaagaaattggtgctgtagaataaatattcatatcctgacgctggaagatcggatgtgaggatacgataacctctaccagcagatcgccacgcggtccgccattgacacccggctcacctttgtcacggatacgaacactctgtccattatcgattccggccggaatggaaaccttgattttctttctgctggaagtataaccggttccacggcaggaagtacatttatctttgatgatcttaccggatccattacattccggacaggtctgaacgttctgaaccatgccgaacagagactgctgggaaaatacaactttaccttttccgccacattttgtacatgtctccggagaagtacccggttttgctcctgttccaccacaagtcgtacattcatctttcagtaccatatcaatttctttctcacagccaaacactgcttcctcaaacgtgatacggacactggttcttaagtttgcacctttcatcggtccattggatgcgcctcttctggaaccgccgccaaagaaatcgccgaaaatatcgccaaacatatcgccaaaatccatgcctgaaaaatcaaatccaccagctccggcgccgcctgctccaccgtcaaatgcagcgtgaccaaactgatcatactgtcttctcttctctgaatcacttaataccgcataagcctcagaagcctctttaaattttgcttctgcttctttgtctcccgggtttgcatccggatgatattttttggctaactggcggtatgcctttttaattgtggcatcatctgcgctacggtctacaccaagcacctcataataatcccttttctgttctgccatatctgaactccatcccttatgttttactctatttttgtatcttctggtctcacgaagggcaatttcccttcgaagattaatccaacaatgcaccagaaggcattccgccctctggtgcgttatttatcaatttgcatttactgcgatgaaccgcatgtgtttaacttctgattaaacctctttgtaatcagcgtctacgacatcatcatctgctccgcctgctgcctgctgaccagcacctgcgttcatgtccggacctgcgcctgctgcaccctgtgctgcctgtgcctgctcgtacattttagcaaatacctgctgagcacttgtcattaatttttcttttgcagctttcatctcatctaactctgcatctgtcatcttgtcagcttccggatgcgcctcaaggagtgcttttaatgcatccaggtctgcctgaacagttgctttctcagaatcagatacgcctgctccaacttcctcaagagctttctctgtctggaatacgaaggaatcagcatcgtttcttgtatcgattgcttcttttctcttcttatcctgagcttcgaactctgctgcttcttttacagctttatcgatctcatcatcagacatgttggatcctgctgtaattgtgatgtgctgctctttgcctgttccaagatcttttgcagatacgtttacaataccatttgcatcgatatcgaatgtaacctcgatctgcggaacaccacgacgtgctggcgggattccatccagacggaactgaccaagggatttattatctctagcgaactgacgctcaccctgtacaacgttgatatctactgctgtctggttatctgctgctgtagagaagatctggctctttctggtcgggattgttgtatttctctcgatcagtcttgtagctacaccacccattgtctcgatggataaggaaagtggagttacatccagcagtaatacttcaccggcacctgcatcgcctgcaagtttaccaccctggatagaagcaccgattgctacgcactcatccgggttcagggatttgcttggctctttacctgttaactgttttactttatcctgtacagccgggatacgtgtagaaccacctactaacagtacctgaccaagttcagaagctgttaagccagcatcttttaatgcgttctgtaccggaactgctgttctatcaaccagatcacgtgttaactcatcaaatttagctcttgtaaggttcatatcgaaatgtttcggtccctcagctgtagccgtgatgaacggaaggttgatgtttgttgttgttgcggaagaaagctcttttttcgctttctcagctgcttcttttaatctctgaagagccattttatctgtagaaaggtctacaccttcctgttttttgaactcagcgatcatgtagtctgtgatcttctggtcgaagtcatcaccaccaagtctgttatcaccggatgtagataatacttcgataacaccatcaccgatctcaatgatagatacatcgaatgtaccaccaccaaggtcataaaccatgatcttctgctcgctctcattgtccagaccatatgctaaagctgctgctgtcggctcgttgatgatacgttttacatcaagacctgcgatcttaccagcatcttttgttgcctgacgctgagcatcattgaagtatgccggaactgtgataacagcctcagatactttctcgcctaagtagttctcagcatctgcttttaatttctgaaggatcattgcggaaatctcctgcggagaatatttctttccgtcaatctctttcttataatctgtacccatctctctcttgatagaggagattgttttttctgcatttgtaacagcctgacgttttgccggctcaccaaccagtctctcacctgtttttgtaaaagctactactgatggtgttgttcttgctccttctgtatttgctacaactaccggtttaccaccttccataactgctacacagctatttgttgttcctaagtcgataccaataatcttgctcataatcgtgtcctcctatatattgtttcctgaattaacttatttttatatttaacgaataatcgttaatggctatttttaattagct

SEQ ID NO: 13156 - DNA, 29415 bp, Unknown
  gut microbiota DNA sequence
accacagaatcacggtatgtgtaacctttctggaattcctcagcgatgatgttctcgccaaactcctcatcctcgatatgcattactgcgttatgcagattcggatcaaattcctgaccaaccgcttcgattggttttactcctgcttcttccaacatggtcatcatctgtttgtagattttttccataccttctacgaaaggagatcctttttcttcctcagtgacagctgccagaccacgttcgaagttatcaacaaccggaagtattttttctacgatactttttgcaccggtctcaaacatctgggtcttttctttttctgttctcttacggaagttatcgaactcagccatctgtcttctgactctgtctgtaagctcttcgattttctcatcttttttatctttcttctctttctttttgaagaaagagcctttttcttttccggcttccggttcttctgctgcagcctcctcagcttcttctactgtttcttcctcagctgcatcatttatttcttcattttctaaaatttcttcttccatttcttccggactgatgtttttaccctctgccatcgaaatcccacctttccgttttcatcatctctcaatgactactcatctgtctttttaaatatgtcatccagctgaacctttaaggtccgcaggttgtcaactactttttcgtaatccatacgtttcggtccgacgattccgacggttccgcggattccttttccaagatcgtaagtggcggtaaccacgctgcaatctttcattccctgcatcgggctttcgtttccgatgtacacctgaatgccggttcccggatttccgttttctttgtcgacagtaaacagatctttgaactcctgcttttcttcaaaagcactgatcagctcgcttgcccgctcggaatcactcaactccggatatttgaagatattggttgctccgctggtgtaaatctcaaggtcttcgtcttcctgaatcgcctgagcaactgcatccagcacatcgcttaccatggcactgtggatacccgcctgctctttcaatctggaaatcgttccaaggttgatatcctcaagtgcaagaccatttaaacttccgttcagcaaaatgtttaacttcaacatggtttcctgatccggtgtctcctctgtacggataatcttgttctttacgatgttaccatccagcatgatggttgccagaacctgttcctcatccacggtggagagttgaatgaatttcacttttccgtgatgggtctgcggtgcggataccactgtcgcgtaattggtatttgctgccagcatcttcgcgatctgttttaatacaaattccatacgctccgttttctcgatcacaaattccttcatatcggaaatctcatgatctttttcctccatcaggtgatctacataaaatcgataccctttgtccgatggaatacgtcctgctgaagtatgcggctgaacaatgtatccaagttcctccagatctgacatctcgttacgaatcgttgcagaactgagattcagatcagacgctttcgcgatcgttctggaaccaaccggctcacctgtttccagataagtctgaatgattgcatgtaaaattttcgtttttctttcgtccaatccttcgctcatgtgtttcatgctcctgtaattgatgcttttttctttgttagcactcaaccgtttggagtgctaatatcttcattacctaatgtagcactatcgtttttctttgtcaacatctatttttatttttttcatattttttcaaatcatccttttgaacagcatctatcacatgcaaaaaggattcatctgccacaatcgtttgtaacaaatcaatcctttttcttctatacttattcttctgtcttgttcaatgccattctgtattacatatcacattatatataataagaattacaacaaaaattccgccagtacataattgctgacatctataccatgttccgtcaaacgcacatagcctgccatttcttcgatcagctgttcaccctttaattttcgaagtacctcaccatagacactgtccagtgttacctgaaatgttgtttcaaactgctgccgggagattcctgccatcagacgcagccccagaaacatgaattcttccatctcggattttttgtccaatgtttctatatggatatgatgctctctgcaacacgcttgctgtaatacggtttttttcttcggcaacacagtttcgttcccggataatcggcaatccaactcattttgttcatccattcccttctgattcaaacaagtctgatctgctgaaatgtattcctgttccaaatattccttcagattcgacgtgttctgaaacctttgatgttccactaatgaagatgcgccaagtcccagtccaagataatcttttctggtccagtaaccgcagttatgccgacattcatatcccggcttcgcataattagatatctcataccgctcataccctttcgtatgcaaaaaagcctccgtcagttcatacatctgacgttctacatcttcctccggaagcagtctcggatgcccgccttcctcccgaatttgctcatcttccgcaaaacgttcataaaacggtgtaccttcctcaataatcagactgtatgcagaaatatgctccgggcgcaaagctgtcactttttgcagcgtattctgccagcttttcagtgtctgtcccggcagcgccgacatcagatccacattgatattttcaaacccggcttttcgtgccagatcataactttccagaaactgcgcaaaattgtggattctccccaaaagctgcaattctctgtcatccgcggactgtaatcccatactaagccggttaaatcccgcctgcaccagtttttccgcctttcctgctgtcaatgttcccggattacattccacagtaatctcagcatctgccactaaatgaaaatacttctttaccgtctctaatatggcagcaagctgatacccttccagaatcgttggtgtaccgccgccaaaaaagatgctgctcacctgatattccttaaattgtggaccataatatgcaatttcttcctgtaacttctttatataagaaatccgcaccggcggatcagccggtgcagataaaaaatcacagtatgcacattttcgttcacaaaaaggaatatgaaaatataattctaattctttcatatgttccctctaataaattcgctattttacatcattctcgcaaccatttacgaatatgcatataaattaacgtaacctgtttcttatttatcatccagtttcagaacactcataaacgctttctgcggaatctctacatttccgacctgacgcatacgttttttaccttccttctgtttctccagaagttttctctttcgggaaatatcgccgccgtaacattttgccagtacgtctttgcgcatagcacgaacagtctcacgggcgataacttttccaccgactgctgcctgaatcgggatttcaaacagatgacgcgggatctcctcttttaacttctcacacatttttcgaccacgctcatacgcactgccagagaatacgataaaggaaagcgcatccacttcttctttattaataaggatatccagttttaccagatcagaacgggtgtagcctttcatctcatagtcaaaagaagcatatcctctggaacgggatttcaacgcatcaaagaaatcataaatgatctcattcaacggcagatcgtatttgatcagcgcacgcgtttcttccatatattccatactaatataaataccacggcgctcctgacacagatccatgatggcgccaatatactcactggttaccatgatttctgcacttaccatcggttcttccatatagtcaatctcagacggatccggcatgttagatgggtttgtcaaatccatcacggttccatctgtcttgtgtactttgtaaataacgcccggtgctgtcgttaccagatccaggttgtattcacgctccaaacgttcctgaataatttccaaatgtaataatcctaggaatccacaacggaaaccaaatcccagtgccgcagatgtctctggttcaaactgaagcgctgcatcgtttaactgcagtttttccagcgcatcacgcagatccggatatttagcgccatcggacggatacagaccacagtaaaccatcggatttactttcttgtaacccgggagcggctctgcacacggattggaacgatttgtgatcgtatcacccacgcgggtatcctgtacattcttaatactagccgtaatgtaacctaccataccggcagataattcctcacatggaataaactgaccggcaccaaaataaccaacttccacaacgtctgccgttgctcctgtcgccatcattttgatcggtgtaccgacgcggacggttccctctttgatacggcaaaagacaataacacctttgtacgcatcatataaagagtcaaaaatcagcgcctgtaacggagccttcggatctccggtcggagccggaatcttctccacgatctgttccagaacctgatctacattcagacctgtttttgcagaaatctgcggtgcatcgtgtgcttccagtccaatgacatcctcaatctcctcaatgacacgctccggatccgcacttggcagatcgattttattaataaccggcataacatccagatcatgatccagcgccaaatatacatttgccagtgtctgtgcctcgataccctgcgccgcatccacaacaagaattgcgccgtcacaggctgccagacttcgggaaacctcatagttgaaatccacatgacctggggtgtcgatcaggttgaagatatactcctccccatcttttgccttataaataatacgaacggtctgcgctttgatggtaataccacgctcacgctccagatccatattgtccaacacctgagactgcatctcacgactggtcagcaaacctgtcatctcgatgattcggtctgccagggtagatttaccatgatcaatatgtgcaataatacaaaaatttctgattttactctgatctatcactaaaattcctccatatgtttgttatctgttttatgcaatttattttacaattcatttacggatgcgcctaacatcccaatattaattatgattttaacatcgaacccgggaaatagcaagttttacgtaagttcccctaaaataaatcacatttttcatttccttatcttcgattccttgatttgtcttttttttgatggtatgataggcaggaaacgaatgcaaaggagcaaagaaaatggatattaatgaaaaagctttagaattacataaacagtggaacggaaaacttaccactgaagcaaaatctgcggtaaaaacccgcgaagatttatcccttgcctatacaccgggtgttgcagagccttgtaaagttatcgcaaaagatcctgctgctgcttacacctacacaatgaaagcaaataccgttgccgttgtttctgacggaagtgccgttctcggtcttggaaatatcggtgcccttgccgctatgccggttatggaaggaaaatgtgtactgttcaaagaattcgcagatgtaaatgcagttccgatcgttctggatacacaggataccgatgagatcatccgtaccgttgcaaacattgcaccgactttcggcggcatcaatctggaagatatctctgcaccaagatgttttgagatcgaagaaaaattaaaatccatgctggatatcccggttttccacgatgatcagcacggtactgccatcgttgtccttgcaggtatcatcaatggtctgcgcgtgacaggaaagaaaaaagaagactgccgcgttgttgtaaacggtgccggttctgccggagttgccatcacaaaattactgctcacctatggtttcaaacacgtaaccatgtgtgacaaacttggtatcattggcaaagattatccggatctgaactggatgcagcagaaaatgacagaagtaacaaacttagaaaaccagaccggtacgttagcagatgctctgcgcggtgctgatatttttgtcggtgtttctgctccgaatatcgtatctgccgaaatggttgcttctatgaacaaagacgctatcctctttgctatggcaaacccggttccggaaatcatgccagatgttgcaaaagctgccggagcaaaagtcgttggaacaggaagaagcgattttccaaatcaggtaaataacgtaatcgcattcccgggtatcttcaaaggtgctctggaaggacatgcacgtcagatcacagaggaaatgaaactcgctgctgccaaagccatcgccggacttgtcagcgacgaagaattaaacgaagattttattatgccggagccgtttgatccgcgtgttgcagatgttgtcagccaggcagtaaaatctcacatcgaagcataagattatgaatgcaaaccgctattattcgctggatacttatttaaaagaaactttcggtgaaaaagtatatcgtatttctttaaatggcggcatgacctgtccgaatcgtgacgggacaaaagggacccgcggctgtatcttctgcagccgcggtggttccggtgattttgcagaaagcagtctgctgtctgtgacggaacagatcgaagctggtcgtaaaaagctcgctgccaaaacaaaatgtcgcaaatttattgcttattttcaggcatatacgaatacctatgcgccggtttcttatctccgtccactatttatggaagcaattctgcatcctgacatcgtcgttctctctgttgccacccgtccggattgtatcacaccggaaatccttactcttttatcggaattgaatgagataaaacctgtatggatcgaatttgggcttcagaccattcacgatgaaactgctgcttttatccgcagggaattttctctttcctgctatgaacaggcagttgcagagctgaaacatcggaatattgctgtggtcacgcatgtcattctcggtctgcccggtgaaacaaccgaacagatattagaaaccgtcgactatgtggcacattccgggatttccggtgtcaaactgcagttattgcatgtgttatcggacacagatctggctgattattatgcagcgcatccatttccgcttttttcgatggaagaatattgtgatttcattgtaacctgcctggaacatctcccaccatctatggtcgtccacagaattaccggcgatggtccgcgcaagcttctggtggcaccattatggagcacagataagaaacgggtgctgaacaccattcataaaagactcagagaacgcgatacttatcagggcgctgattttacgtagaaagaaggaagcaagctatggcagatttacataccatgtatcgtgtgatgattctgtatatgttaaatcaggtggaatatccactgaccaacacacagatcacgaactttattctggaaaaagaatatacgaattattttacggttcaggagattctgtctgacctgatttcttctcagttgatcactgcagaatctactcataacaatacccgttaccggattacaccgtatggacaggagacgcttggatttttccatgtaaaaatatcggatgccatcaaagaagatatccgcacttattttgtggagcatgattttgatctgaagcaggaaacttctgtctatgccgattattataaggttcccggggaaggatatgccgtgcgctgccgtatccggaatctggagacagatatcgtggatctgaccttgcatgtttctggcagacagcaggcagaagcggtctgtcagaactggaaaaagaatcatttcccgatttatgaaacattaatggacattttgctcaaataaaaagaacgtatcacatttcaacctcttgtctgcatgacattatattgaaaatgatacgttctttttatatatgctttttactattacgcttaaatcctgtttacagattctttgaatacgcagttatccttatttgtgctttttcacactatagccaaaggaaccgatttttttcccaagttcaaagtattctccatgagaatatgcagtcagtccaatgtcattgagatggaatttgcccttctcatccatatattttggattgacagaaactgcagtcacctctgccagaaacatatcatgggaaccaagctcaatgatctgttttactttgcattcaatgctgaccggactctctgcaattcccggtgccgcgatggttttggactcacatggagtcagatgcatctctttgaatttgtctacctctctgccggatttgacaccacaataatcggtagcaaacgtcagatcgttagttgtcagattgatcacaaactcgccggtttctttgataatatcataagaataacgctcttttcgcacggaaatagacaccattgccggatcagagcagatggttcctgcccatgccacggtaataatgttcggtctctcctccggacgcttgcagctgatcataactgccggtaccggatacagcatatttcccggtttccaaaattctctttccatattactctcctgtttttttcaaacgttctatccatatcctttctggatcttctgaaaagttccgaaaaatctctttcaaaatgctttactgatcctgcattgcagacatgaacatcggaattaactgtttctttctggatacaacgcctctcagcacatggtatgcgccttctttatgaaccggaaatgctttctccaccagttcatccgcatgctctccctcacagatcagataggttgtctcctcaatgatattggtcagcatcacgaataccatctcgatttttctttctgtcattgcttcacgcagatacggaagcaatttgtctctgacctgatccagttcatcctgtgtcatggcactgatctgacctacaccaaaatctacaccattctgactgaatgtcttgaaatcctgatagaagatttcttccggtgtcttgcttccgaaatcacttcctgcctggaacatcgcttttgcatgctcctcagtattgattccggcaattcctgcaagttcctctgccacagccttatctaacggtgtacaggtaggagaacggtacatcagtgtatcagacaaaattgcagaacacagcagtcctgcgatggttttgttgatctccacattctgctcacgatacatctgataaatgatcgttgcagtacatccaagcggctgattacggaaaaataccggtgacatagtctccagacttccgattctgtggtgatcaatgatctccagaatatcagcaccgccgattccgtcaactgcctgtgttttctcattatgatccaccaggatcagctgttttttcttcatgttcaacaggtttcgtctggaaatcattccgacatattttccatcagtatccaaaaccgggaagtcacgatgtttctcttttgacatgatttcccgcacatcatcaatgtattcttccagttcaaaggtaacaagctggtctctgcgcataaagaatttgatcggcatactctggttcaccagacgtgccgctgtataagtatcataatctgtggtaatgaccacacaatttctctctgctgccatcttaataatggattttggcacctgtgggcttccagcaatgatcagacagcttgcattacattccagcgcacaaacctgcgcatcataacggttacccatgataaccagatcgtcatcatccaggaactgctccatcgtctccggatttgcagaaccaaccacaacttttcccttcgtaaaataagcgtgttcgtttccgcaaagcaactgaccttccagtgtatcaacgatattctgatactgcgttttcgctctggacaaaatactattatcatagacatccatataggaagttgcaatatcgccggtaatgatcagaccttccagattgttctctccatctgtaaccggcaaagttacaacattttgttctttcatcatttcccatgcacgtttcagggaaatttttccgctgacacccggtgttttgcggatctcaatatcttttacctgtgcacctacatctgtgatgagtccaggagattttaccccaaaagtcttcagcacatatttggtttcttcatttaattctcccgcacgttttgcctcataacgcccttcgtctgactgattctttaaattcgcatatgcaatcgccgcacagatagaatctgtatccggattcttatgaccgacgacccatactttcttctttttctctatagccatattatcggttgttctcctataccctttattttgggaacagtcctcttccattcccagcttcattaagtcaattagtaaacgtgtaactacccagtgcatttctgtcactgggtattttttcattctatcacttcatttttattttggcaactacctaatatgctatttctgtgagttcttaccatcattgcaattttaaacaacatggcatcttcaaacgtacgaatatcaagcccaatcttcttctcgatccgctccagacggtacaccaacgtattgcggtgaatatatagctggcgggcagtctctgaaatattcagattattgtcaaacagctgacggatcgtcgccattgcttcctcatccagttccatatccgcatgatctcccaacacttctttcagaaacaggtcacacatctctacggaaagttgtgagatcagacgtcccagtccaagtctcctgtaataaaacacccgttcatcatcagaaaacaccattccgaccttaagtgccatagatgcctggcgatatttttcatgaaacaatacaaaatcttctgcggcatcggtatatccaacccatgcattacacatagcttccatttgtaagttgtcgatgatccgtctggcaaactgatcgttttccacatcaattccacggacatttttgataagcaccattttcttatcatccacgtcgatcagataatccaccccatataccacaaacatgtttttcagcatttccagaataatctcattttgttcatctgcaaactggatcacgaaaatcatgtaagttccgttcttcattcggatctgatgtcttttttcctgaatctgctgttcggaaaattcaccatttagcagctgtctcaggaaattaatttcattcgtcggctcctgtgctgccagataaagattccggatctggcagcatgccatctgtccgatgacatacgaagcatcaccggctccattattgcttgcaagcaaaatgttttctgtctgatcattgatctcaatttttaaaaagatccaattctggatcgtctgactgtctgccatagattttgcaaacaaaacaaccagctcctgaaccttttcctccagatcaggtaccgtagacgccagcattttcccctttttattgaacaacacaaaatccatacgggagatctgtttcatttcctttaacgcctgtgccagtttttttccgggcaaacgttgttccaatgtctatccctccttaaaatgaaaactgggtatgaaactcatacccagttttctattgcaaaagtgcaccatctgtacacttttcatccttatgcataattctgcatgttacacttcttagtgagaaataacctgctctgtctctttatcaaagatatgacctttgttgatatcaaatgcaactgtcacatcatcaccgtaacggcaaggtgtactggaatcaacttttgctgtcattgtaacaccatttgctgtgtagtaaagtaatacttcagaaccaagcagctcgtatccggtacattttgctttgattgtgtaatcagcatgtttctgcagatactctggctcatcatccatatcatccggacgaataccaaatacaactgtttttccgtcatatccgccatcttttaatgcttttgctttgtttgctggcattacataggtagcatcaccacttgtcagtgttactttatcgccttctaccttgcatacgcaatctaagaagttcatctgcggagatccgatgaatcctgcaacgaacaggttgtccggctcattgtacagtttctgtggagaatctacctgcatgatcacgccatctttcataacaacgattctggtaccaagtgtcatagcctcagtctgatcatgtgttacatagatgattgttgcgccaagtctctgatgtaaggaagaaatctcggaacgcatctgtactcttaattttgcatccaggttggaaagcggctcatccatcaagaatactttcggctcacgcacgatagcacgtcccatggcaacacgctgtctctgtccaccggaaagagctttcggtttacgatccagtaatttctcaaggtccaggattcttgctgcgttacgaacttttttatcaatctcatcttttggcacttttcttaattttaaagcaaatgccatgttgttatatactgtcatatgaggatataaagcatagttctggaataccatggcgatatctctgtccttcggctcaacatcgttcattctctttccatcaatatcgaactcaccttctgaaatttcctccagaccagcgatcatacgaagtgttgtagatttaccacatccggatggtccaacgaagatgatgaactctttatctgccacatccaaattgaagtcttttactgcctcaaaaccgtttggatatctcttatagacatgttttaatgataattctgccattttttaattaccctccataaaataattctccacaaaacgccttgttttgctatgcacttatactaacaaattctgtacgctttgtcatcgggtattgtcacaaatttcacatgaaaaccttggtatttctgccagttttttgttcacctctcacaatttttcagtatattgactatatgtcgtttccacatttcgtcattttaacgaagccattcggtaacttactgttttccggtacttccaaaaccgccacggtttgcatttcccagagatgccacctcttcaaaaacgatctgtggctgattttccacaatacggaactggcagattctatcatttacattgaccacggtatctctagttgcatacaccggcatgcgccacatatcatcatcaccacaataagaaccatcaatgattccgcagctgttcacctgcagcagaccataatttttaaatgttgagctgcgcggtaccacatgtgcctcatatcctttcggaagctgcatggcaacacctaacgggatcagtttaaattctcctgctttcagttctacggtctcgctagcacgcagatcgatccagtctgatttaccgtcaatatactccagtcgatcaattttgtccgtaaaatatttaatacgaatattttccatgtttctttcctccacatttttctttctgtttttcacttgtagttatttgttcaagtcgaacgcacgtgagacttggtgcgtgattctggtcagcgaaagctgacatattcttctcagaatcactgcacatccccgcggagcgtttatctcattctttatgtatagttaaagaaaaacccggcatcccataaagacaccgggtatgagtcttcttattttctacggtagcatcagtttacatgctttcatcatcatctggatacagataaaaatcaaaaccttctgcatttccgttgagcatgcagcttccatacagctgctccacatctttcggaactgcaatcagaatatccacataattggaatcaccggattcagtctccggatagctgatttcaaacactttatctaccttatagtaagtctcctgttctctatcctcatcttctgaccatacagacacatcttcctccgaaacatttgacaaattatatgtatctgaaagattatttttgataaccagagaaacgatatagtatacatatccctccggtgctgtaagctgttccagctctgcacgttctgtcgtggatacgttgacataataatcatcccagtttatgtcagacatattcggtccaacataatctgaccaggcatactctacataaatgcgattctggtattctggttcaatctgttcttcttcctgtgcccagttatcataatcggtgtcccatccgtccgtaatctgatcacgaatttcattacgaacgatagaaaagatcgatgaaccagcggcaatcacaattgcaacaacaataataataacgatcgcagctactggtgtcttcctttttttcttttctcccgtccatttgctgttattttcgttctgatagctatatgaggatttttgattcgatgtacgattagtatttcgcccagcatcttccgtacctgcacgataccagtcatgttgacgcggatctttgtatgtatcataacgttcatgcaaatcctgttccatgtcttcccgactgtccggccggttataccgggcacatttcgggcagatcccactgtatttttcataatcatacattttaccacatttgctacattttatcagcatacgtttctccccccaatcctttttctcacatcgtcctgttccttatattaccactgaatatcctcatgctctgctttcttatcacgcagcatcagttccatcacggcatcttttgccggctgatcctcaaaaagcactgaatttacctgttcaatgatcggcatgtcaatgtcatatttttttgccagcgcaatggctgcttttgcagaataaacgccctctacaaccatttttacctcatccatggcttcccgcatggtatagccacgtccgatcagcatacctgctttacggttacggctgtgacggctggcacaggttacgatcagatcgccgatgccggacagaccgtttaatgtctctgaatttgcccccatagccacacccagacggctgatttccttgatgccacgggtgatcagagctgcttttgtgttatcgccatatccaagtccgtctgccataccggctgccagtgcaatgacgtttttcagggatgctccaagctcgataccaagcatatccgggcttgtgtatacacgaaacacctcattcataaagaaggtctgtacctgctctgctgttttctttgtatgtgcacctgccacaacggttgtcggcagtccacgtccaacttcttctgcatggcttggacctgacataactgccacatccgcctgcgggatctcctgttccacaatctcagactggatcatcagcgtgctttcctcgatacctttggatacgataacgatcagctgtccctctgtgataaactctgccagattatgtgctgtacttctcgtaaatggtgacggtactgcaagtacgaccatttcttttcctgctgcagctgttttcagatctgttgtaaaagaaatcgtttccggaattttcacccccggaagtttatctttgtgttcatgctcctttgtcagcatctccacttcatcttccagaatagaccataccgttacgttatgtccattatgtgccagaacgactgccagtgctgttccccagcttccggcaccgattacacctatttctgccatttttctgcctccatatctatactctcacattattatgtaaggattaattttccttttttgccgggcgaaatttgttctccgttccggttgccagacgtttgatatttgcacggtgttgccagaatgccagtgccgtcaaaatccccgcaagcacataagtctccggcaaaaactgtgttgctatctttaataatcccaactgtccaaacacgatagtctgtacaaaaaatccactcaggattcccagggaacccaaagacataaatcccgtcggaactacggatgtaaaaaacagaatcgcacagattggaactattctccaatcaaaagcaaatacgattccaacactgcttgcaattccttttccacctttaaatttcatataaaacgggaagttatgtcccagaactgcgccaaaacccgcatacaattccagtaacttcaccgcatccgggtaacgggttctcgccacgccccagatgatcgccatcgcagccactgcttttaaacagtcaccaaaaaacacaacaacgccggccttccatccaaggacacgcagggaattcgtcataccagaatttccgcttcccttggaacggatatccacattatgtgcttttccgtataacacgccagttggaaacagtccaaacaggtagcccagaagaatacttacgattcgaaatactaccatttacctgtcttcctttctctcacggataataaacttcaatgccgtgcccttaaatccaaaggtgtcacggattctgttttccagatatcgcgtataagaaaaatgcatcaactccttatcgtttacaaaaataacaaatgtaggtggttttaccgcaacctgagtaatatagtaaagtctcagacgtttacctttatctgaaggtggctgctgcattgctactgcttcggtcatgatctcatttaagacaccggtagctacacgcattgcattattctccagaaccatgtcgatcatttcatacatcttgctcagacgctgacctgtttttgcagaaataaacataatctccgcataggacataaaacttaagatctcacggatcttatttgtatgtttgtaaatggtcttatcatctttctcaatcgcatcccatttatttacagcgatgataataccttttccacgctcatgagcgattccggcgatttttgcatcctgctcagtaacaccttctgtagcatcaatcacaaggatgacaacgtcagcacgctctactgccgtcaccgcacggataatactgtaacgctcgatctcttctttgatcttgtttttacggcgcagacctgcagtatcgataaaaatatactcttttccgttatattttaccactgtatcaatggcatcacgggtagttcctgcaatgtcagatacgatcacacgggattcgcctgccagtttgtttaccagagaagattttccaacgtttggttttccgataatggcaactttcggtctggtatcctcttcctcttctttggatgtatctgggaaatgttttaccacttcctccagcatatcgcccaatccaagacgggatgctgcggaaatcggcatcggatcaccaattccaagattataaaattcatatacatccgccatatatttctggaagctgtctactttattaacaaccagaataaccggcttgtgggaacggcgcagcatatctgcaacttttgcatccgcatccaccaagccctgatgtacatctgtcataaatataataacgtccgcagtggcaatggcgatttctgcctgctcacgcatctgtgccagaatgacatctttactgtccggctcaataccgccggtatccaccatagtaaaagaatgatttaaccattctacatctgcataaatacggtctcttgtgacacccggtgtatccttaacaatggaaatacgttctcctgccagagcattgaacaacgtagattttcctacattcggacgtcctacaaccgcaacaaccggtttactcatatttttatccctcatctctttatttcagaatccgctcacacttcttatcttacacaggtcttcattttatcctgcttttaaatcaatgtgagccatttatcaagttactttttccgctttgcgaaatattaaacattaccaagcatgccatcatacagacactgcccgtctgattttacaatatgaatcggcacttgtaaagcattttccaattctgtcagcgtcacatcatccagaaatacttcctctcccatgcgcaatacgttgctggaaagcagaagcatatctcccagttcctgcccggtcagctgggctttcagatccgttccggtcagtaatccggaaacggtgatcatctctccaaaaaagtcatttcggatctggtatacgatcaccttgatgtccggatgctgtttcataaatttagctgccagtctgcgcatcagtcctgctgcggactttccggtagcaatagaaactacacgacgataagtcttattctccgtttccggctcatccagacttttattttcaacagtttcagaacgatctatttctctcagatccacttctgactcattcagattttcattttgagttttaatggattcaaaaccatctattgcttccgaatccatgtcctgatcaaatccatctgtaccatcttccagttcatccgccaggcactgatcaaattcgctttccaacaatgggatcatgccgacaccgttttccaactgaatatatccgtcatagttttcttccggtggaaagggttcttctgccagcagataccactcatctgaagcctgcacaaaatgcgtaccgtgcttttcataacagattttctgccatttatgaataatctccaacacttcttttgcatcttctttttcaaaaggcttcagcggatacaaaccatctctgaatttcgtcaaccctaccggaacaactgacaaactctgcatatatggaagataatctgacagttccttaatgcttcgttccagttctgcaccgtcgtttacacccttacaaagtacgatctgaccattcatctcaatctcaccctcataaaagcgacggattttatccaacgcttctccggcaaagcggttatgcagcatctcacagcgtaattccggattcatcgtatgcacagatacattgattggtgccagcttataacgaatgattcgatctgcgtcttcatccttcatattcgtcagagttacatagtttccctgcaggaaagacagtcgcgaatcatcatctttaaaatacagcgtctccctcatgttcggtggcatctgatcaataaaacaaaaaatacatttattgtaacaggatttataatcatccatcagaccgttttcaaaaacaatccccggatcctcgtaataatctttctctatctccagttcccattcttctccgtttggtttacggatcagcaaagttaacagtacatcgttaatcagaaaatgataatcaaaaacatcctgaatcggctttccatttacttccagcagaacatcgcctgcttcgattcccatctcttccgcgatacttcccggttcgatgccgtcgattttgtgttcttttaatttcatctatttcatcctttcgttctgtaccattgtacccaatttgtgaaataacatcaaccttttttatttttctatattgtatcagcttatgattttgctatctttttatttttccttctttttataaatgttccacaagaataagaacataaaagaagtgtgccaccgaagtgacacacctcttaattataattcgtaatatttacaaattcaaaatatcttactcttctgtaccgtaaagttttacaagtttgttcaggtaagcgtatcttgcttttgcattttcctcagatttctcgaagagacgatctgctttctccggatcctgtcttacaagagcattgtaacgaacctcaccgttcaggaatgctttgtaatctccgcttggagctttgctgtcaagagtgaatgcattcttgccttcagcagccagagccggattgtaacggaagttgttccagtaacctactgctactgcgttcttctcctctgtctgagctttgctcataccaatcttgataccatggttgatacatggagcataagcgataatcagagatggtcccggatatgcctcagcctcagcgattgcctttacgcactgattcatatcagcacccatagcgatctgtgctacgtatacataaccatagctcattgcgatggaagcaaggtctttcttcttaacatctttaccaccagctgcgaactgagcgatcgcaccgatgtttgtagatttagaagactgtccacctgtattggaatatacctcagtatcgaataccattacgttgatatctttaccactagcaaggatatggtctacgccaccgaatccgatatcgtaagcccatccgtcaccaccgaatacccactgggatttctttccaaggaagtctttctgagcaaggatttcctgagctttgtcacatccgcatgcctctaaagctttgatgagcttgtctgtagcaggtccgtttgtaacgccgcatccgtaagtatctaaccattcctgaccggcagcttttacatcttcgtttgtaccgttagcaacaacatcttctactttctcttttaatgcacctcttaatgcattgttagcaagaagcataccataaccaaactctgcagcatcctcgaacagggagtttgaccaagccggtccttttccttccggagttactgtatatggtgtggacggtgaagagttaccccagatagaggagcatcctgttgcgtttgcaatatacattctgtcaccgaataactgagtgatcagttttgcgtatggtgtctcaccacatccagcacaagcgcctgagaactcaagcagcggctgtttgaactgagatccttttacggagttctctttgaatttagcaataacttctgctttgtccggaacagatacaccgtaatcgaagtaagcctgctctgactcattagcctcgaagttctgcattgtgattgcctgaatcttatccgggcaaacatttacacaggaaccacatccggtacaatcgtatgcggaaattgtgatagcgaatttgtatcctggcattcctgtcatatctttgtactgcattccttccggagcagcagctgcctcagcctctgtcatagcaaccggacggattgctgcgtgcgggcagacataagaacactggttacactggatacatttatttacatcccataccggaacatctactgctacaccacgtttctcataagcggatgtaccagacggtgtggaaccatctacataatctttgaatgcagataccggtaatgtgttacccatctgagcattgattttcttctggatgttgtttacgaaatcaactgcatcctgacgtgcgcctgttgccggagcacctgtaaggctctcttctccagctgttttccagctttccggaacttcgatcttaacaacgttcttagcaccagcatcaattgcatcgtagttcatctgtacgatcttgtcaccttttttaccataagtagcttttgcagctgctttcatcaattcatttgctttgtcagccggaatgatgttggaaagtgcgaagaatgcagactgaagaactgtattgatacgcccgccaagtccgatttctttaccgatcttgataccatcaattgtgtagaacttgatgtcgttctcagcaatgtaacgttttacctgacccggaagatgctcttccagacctgccatatcccatgagcagttcagaaggaatgttccacccggaaccagatcctgaaccatgttgtatttatggatatatgcaggacagtgacatgctacaaagtttgctttgttgatcagatatgtggaacggatcggatctttaccaaaacgtaagtgggaaattgttacaccacctgattttttggagtcataatcaaagtaagcctgagcatacatatcagtattgtcaccgatgatcttgatggagtttttgttagcacctacagtaccatctgcgccaagtccccagaacttgcagttgattgttgtagccggagttgtaaccggatgttctgtaacttccagagaaaggtgtgtaacatcatcctcgataccgattgtgaatttctctttttctgtattgttgtaaacagcgatgatctgtccaggtgttgtatctttggaaccaagtccgtaacgtcctgtgaagatcggtgtctggtcgaattttgtattctttaatgctgcaactacatcaaggtaaagcggctcgcccatagcacccggctcttttgttctgtcaagaacgatgatctgttttacagaatccgggatagcgttgatcagagcttctgcggagaacggtctgtacagacgaacttttacaagacctactttctcgccttttgccatcagataatcgattgtctcatcgatcgtctcacagacagaacccatagcgatgataactttctcagcatcctctgcaccatagtagttgaataatttatagtttgtaccaagtttctcattaactttgtccatgtattcctgaacaattgcaggcatatcatcataagtctggttacatgcctctcttgcctggaagaagatatccggattctgtgcggaacccatctgacatggatgatttggatttaatgcgctctgacgataagcgttgattgcatcaagatctaccatatctttcagatcttcataatcccatgtctcgattttctggatctcatgagatgtacggaaaccatcgaagaagttaatgaatggaagtcttcctttgattgctgagcaatgagcaaccggtgtcagatccattacttcctgaacgctggattcgcaaagcattgcacaaccagtctgacgacaggcataaacatcggagtgatcaccgaagatacataatgcatgacttgcaagtgtacgtgcggatacgttgaatacgcccggtaatctctcaccagcgattttataaaggtttggaatcatcagaagaagaccctgagatgctgtataagttgttgtcagagcaccagctgccagagagccgtgtacagtaccagctgcacctgcctcggactgcatctctgttacttttacagtctgaccgaagatattttttcttccctgtgttgcccactcatctgttgcttctgccattacagatgacggagtgatcggatagatagctgcaacatctgtgtatgcatatgatgcatgagctgctgcatggttaccatccatggttttcatagaacgtttcatttccattcctcctaaattcttttgatttagttttgttaattgattaacaatgctttacccttatcttacaataatctcacaaaaaagcaacgctattataccacaaaattgtacatattccaatacaattttgtatttttttgcattcagttttgtgacaacgttacaagtcttccgtaaccaccccggaaaacatccaacgtgataaccatattgtaacctacttttctgtcgaaaacaagaaccacgtgcgtacaatattgcatacaatcttatcaatcaacttattcatgtctaccttgaatccctttcacgtaaaaattctccttccctgcatgttttccttgcttttatatgtaatcttgtgtacaataccagaggtaaattattagataacaaaaacacatatataataaagaagtcaaggagaacaatttatgatcagtgcaaataatgtaactttacgaattggcaaaaaagcgttgttcgaagatgtaaatatcaaatttacagaaggcaactgctacggtctgattggtgccaacggtgccggaaaatcaacctttttgaagattttaagcggacagcttgagccgacaaacggtgatatctccatcacagccggtcagcgactttctttcctgcagcaggatcacttcaaatacgatgcatataccgtacttgatactgttattatgggaaacaaacgtctgtatgagatcatgaaagaaaaagatgccatctacatgaaagaagattttaccgatgaagacggtatccgcgccagcgaacttgaggcagaatttgctgatatggacggatggaatgcagaatccgacgctgctaccatgttaaacggtcttggaattgacaccgaattccactatgctactatgggagatttgccgggtcctatgaaagtaaaagtcctgcttgcacaggcattattcggaaatccggatatcctgctgctggatgagccgaccaacaacctggatcttgacgcgatcgcatggttggaagaattcctcattaattttgaaaataccgtcattgtagtatcccatgaccgttattttttaaacaaagtttgtactcatatcgctgatattgactacgcaaaaatccagctttacgccggaaactatgatttctggtatgaatccagccagttaatggtaaaacagatgaaagaagcaaacaaaaagaaagaagagaaaatcaaagaattacaggagtttatctcccgtttctccgcaaacgcttccaaatccaaacaggctacttccagaaagaaagctctggagaaaattcagctggatgagatcaaaccttccagccgtaaatatccgtacattgacttccgtccgtcccgtgagatcggtaacgaagtacttctggtagaaggcttaagtaaaacaattgacggtgtaaaagttctggataacgtatcctttattgtaaaccgcgaagataaaatcgctttcgttggaagcaacgaacttgcaaaaactactttatttaaaatcatcaccggtgaaatggagccggatgaaggaactttcaaatggggtgttacaacaagccagtcttacttcccgaaggataacaccaaaatctttgatactgatctgatcatcgtagactggttaacacagttctccgaaatcaaagatgctacttacgttcgtggattccttggacgtatgctcttcccgggtgaagatggtgtcaaaaaaatgcgtgtactttctggtggtgaaaaagttcgtgtactcttctcccgtatgatgatcgaagcgtccaatgtattgatcctggatgagccgactgaccatttggatatggagtctatcactgcactgaataatggtctgattaaattcccgggtgtactgctttttgcttctcgtgatcatcagattgtacagacaacagcgaaccgtattattgagtttatgccgaatggttctatcattgataaaatcactacttatgatgaatatctggaaagtgatgagatggctagaaaacgttctgtgtatacaatggcttcttctgatgaagacgataactagaattcttgtttagggtggcttaaaatttactatctaagttttaataggaactccagcaattttgttttggtcgctaacaatcgctccccaagaaaaaattgctggagttcttaatttactctgtgaaattagtaaatttttacgcccccctgcacttcgtaccacatgcaaattttaaaaataagggactctggatatttttctcgaccagcgattgttagcgggcgagacaaaatatccagagtcccttttcataacctgacacaaaaccacaccattacccgaacgccctctttatgacgtaacgatattgcgcagccatactccttttttcacaagtatgaatccgatcatacatttaataaaatctgccgcctgcacaatggcatagattccaagtaccggcaacgcagtaaaccggctgagcacaaatgccagcgacacgcttaccacccatataaatacactgtcaaagaagaacgttataatcgttcttccaccggatcgcaacgtaaaataagccgcatgtaaaaatgcattctgtggcataaacactgccgtcagcataataaaatattttgccagttcttttgcttccgcattggtattgtacagatttggaaatgccggtgccagtgcaagcatcgccagcgccacgattgtacaacaaaataccgaaaacgcgatcatcttattatctgtatcccgcgcttctttcatcttaccagcgccaagcagctgtccgactacgatagccaccgaatctcccaacgcaataaatacaatattaaatacgttattaacggtatttgagatattcaatccggctacgacatttaatccacgcacggaataacactgggtcagcatcgccatgccagccgcccacagcgtttcatttaaaagcagtggtgttccctgaatcaaaatacgtttgaccatagttcccggaatccgcatcgtgcgatacaagccacttgcaaatacatgttttgcctgatgtctgtgtgtccacccgattacgatcagcgcctccacataacgggaaatcacagttgcaagtgctgcccctcttacacccagcttcgggaaaaataacattccgtaaatcaacatgaagttaaaaaacagattcaccagtaccgccacaacgcccgccttcatcggaagtaatgtttctccacattcacgcagcgtgcttgcatacacctgcaccatcataaatgccggcaatccccacacaatgatttccagatattcttttccataacgcagcgtatctgcaatctgtgctgcggtgccatcccctttcaagtacatatgaatcaatgtatcgccttttgtcagcaacaaaataatcgtcgctgtcgttatgataattaccatccacaatttgtagcgcatggtattgcggacgccctcctgatctccttttccaaaatactgtgccgtaaatattccggcgccggaaacaccaccgaaaatgcacaaattgtatacaaaaatcaactgatttacaattgcagccccggacattggctctgtgccgatccgcccgatcataatgttatccagcaagctcacaaagttcgtgattccattctggatcataatcggaattgcaattgacagcaccatcagataaaatgctttgttcccgacaaattttctccaaaaatgtttcttttctgtcatctccatttacctaatcccctttttcgtaatctccgttttcaaatagtaacctgatgtaaacaacagccaccgatgtaaacccgatgactatctatcatttgtataactcattttcttccatgcatgcctatagtagaatacaatctgctattgcactattttttatttccgacgtaattttatctgaagtgtatggaaaatccattttcagatcacggaaatagtattcccggtctctctcaccaatctctctggctacgcgacatggatttccaactgcaatcacatttgccggaatatcttttgtcaccacactgcctgcaccaataacagcattatcaccaatggtaacacccggaagaacgactgcattgctgccaatccaaacatttctgccaatatgaatcggcagtgaataatgtgccgccatttcacggtactccggatctgccggatgtcctgtggtacaaagtgttacattcggaccgatcattgtcctatccccaatataaatatcaccatcatccactacgctcagattgaaatttgcataaaatgcgccttccagatagagatggcagccataagacatatgaacaccatcctcaataaatacgccatctccgcactttccaagcagtccttttaacaactccagtcgtttttcccgctcattcggacgggtatggttgtaatcaaacattacctctttgcagtgtctgcgcaatgcgtccagctcctgttcctgcgcaatatctatcggatctttgtgtccatgctcataaaaaagcatcccatttgcaattctctcttttaaatgcatctttctaattcctttctcctctaaaaatcaaatacacaaccttgtttttctataaaaaaacaaaccatgtttaccttcgtttttcactacacattatctacattttcgtaacaactattaatactatttttgtcacgctaagcattcaggcacaaaaatgcccccagatttccacgttttccatgactcgcgcgatgtgaaaatagcagctccggattacaacaggtacatacatccgttactgccagatgttccggtttcacgcctgcttccaacagcacgatctcatttgctttccaaaggtctagctgatattttccattgcctttgttgagcaggatttctgattcatgaccggaaaatgcctcctcaaactgaaccgccacatcctcactgacctcataacaatcctgacagatagaaggtccaatggcacaatatacgtctgctgccttggtgccatattctctacgcattgcttccaatgtgcattttcccattcgtgcaacggttcctctccatccggaatgactcagaccaattgcatgatgaacaggatctacaaaatataacggcacacaatctgcataaaaagttgccagcgtaatttccggcacatttgtaattaatccatcaacatccgtatagtctttcggacgaataattcctgttcctgcatctgcttctgtcaccacgcggacgtttgttgtatgcgtctgatcggagcagacaattttctcatagggaacgcccatcgcctccgcaatccggcgataattttcttctaccgattctttcacgtccccacgggtaaaactaaggttcaactttgaaaacattccctcactcacaccaccataacgtgtcgtgaaacaatggcgtacgattcccgtctcatccagcaacggataatgaaataacggcagttcttcaccatttttcagttgatgaacgatcagctctggcgtctgcatgccacctgtttttctctttataaataaatctttcttttccacaaatgaatcctttccttcacatgctcccagattcctcaatctgatatcatctgagaatccatttcaataaatgtgaagtctgatatattttttcaatttcgtcaaaaatattctataccactcgattgatccgcacacccaatcagcgaaacgaaccgcaataatcaaaggcattctccatcagataaatgctgtcctgagatacttctgccacatcaaaccgacagggatgctccattgaatatccatatcgtttcagataaaaaactgccgcattggaaatccgctgccgtttgcgccagtccacagcctcacgcggcgcgccatattgttcattactgcgatattttacttccacaaaaatcagatatccatcctttttcgcgatcagatcgatttcaccgaatttacagcgaaagttcttctccacaatgtaaaatccacgctgttgcatccagtctgccactcgctgttcctgtgtcgtaccaagttcatgtgtattcatgtctgcctcttttcactctctccagcttcaggcaattacaatcaaccagaaaatttctgattctttataaatgcaaataacaaacaatggtactcttattgacatatatctgctattgatcaccacttataaaagaagaaatcctctcatatgagataaatttttgattcaagtcgaacgcacgtgag

SEQ ID NO: 13157 - DNA, 11643 bp, Unknown
  gut microbiota DNA sequence
agtatgatggttgatcttcgccattatgtagacgtagatccggaagaactgggcgttcatgagctggtttactatccggttctggcacagattctggaagaaaatacagatattgaggatatcaaagaagcaattcacagaaatatccacgatctgattccgaaacatattacaaaagaagacattcttgcttctattaactataacatgcatctggagtacggtatcggaaacgatgacgatatcgatcaccttggaaaccgtcgtatccgtgcggtaggtgagctgcttcagaaccagtacagaattggtctttcccgtctggagagagtggttcgtgagagaatgacaacacaggatcttgagacaattacaccgcagagtctgatcaacatcaaacctgttacagctgcagtcaaagagttctttggttcttcccagctgtcacagtttatggatcagaacaaccctctgggtgagctgacacacaaacgtcgtctgtctgcattaggaccaggtggtttgtccagagatcgtgcaggatttgaggttcgagatattcattactcccattatggaagaatgtgtccggtagagacacctgagggaccgaacatcggtctgatcaactctcttgcatcttatgcgagaattaacgagtatggtttcgtagaggcaccatatcgtaaaattgataaatctgatcctaaaaatccgcgtgtaacagacgaagttgtatacatgacagcagatgaagaggataattaccatgtagcacaggcgaacgagaagctggatgagaacggatattttgttcgtaactctgtatctggtcgattcagagaagagacacaggagtatgataagacattatttgattacatggatgtatctccgcagatggtattctctgttgctaccgcattaattccgttccttgagaacgatgatgcgaaccgtgccctgatgggagcaaacatgcagcgtcaggctgtaccgcttcttacaacagaagcgccggtagttggtactggtatggagccgaaagcagcagttgactccggtgtttgtgtagtggcaaaacgtgccggtgtgatcgagcgcgcttgctctaatgaaattacaatcaaatacgatgatgatggaagcagagagacaatcaagctgacaaaattctcacgaagcaaccagtctaactgctacaaccagagaccaatcgtgttcaaaggcaatcatgtggaggcaggtcaggttattgctgatggtccttctacagcaaacggagaacttggtcttggtaaaaacccactgatcggatttatgacatgggaaggttataactacgaggatgctgtactgttaagtgagcgtcttgttcaggatgacgtatatacatctattcatattgaagagtatgaagcagaagcacgtgatacaaaactgggaccggaagagattacaagagatgttccgggtgttggtgatgaggcactgaaagatctggatgagagaggtattatccgtattggtgccgaggttcgtgccggtgatatccttgttggtaaagtaactccgaagggagagacagaactgacagctgaggagagactgcttcgtgcaatctttggtgagaaagcaagagaagtacgtgatacttccttaaaagtaccgcatggtgagtatggtattgttgtagatgcaaaagtatttacccgtgaaaatggtgacgagttatcaccgggtgtaaatcaggcagttcgtatctacatcgcacagaagagaaaaatctctgttggtgataagatggccggccgtcatggtaacaagggtgttgtttcccgtgtacttccggtagaagatatgccattccttccgaatggtcgtccgctggatatcgtgttaaatccgctgggtgtaccttctcgaatgaatatcggacaggtgctggagattcatctgagccttgctgcaaaagcacttggatttaatgttgccacacctatttttgcaggtgcaaaagagacagatatcatggatactctggatctggcaaatgattatgtaaacttaacatgggaagaattcaaagagaaacatgaggaggaattacttccggaagttcttgattacctgtatgagaacagagatcatcgtaaactgtggaaaggtgttccaatttcccgtgatggtaaagtaagactgcgtgatggacgtaccggtgagtattttgacagcccggtaacaatcggacacatgcattacctgaaactgcatcacttggtagacgacaagattcatgcacgttctactggtccttactccctcgttacacagcagcctctgggtggtaaagctcagttcggtggacagcgtttcggagagatggaggtatgggcactggaggcttatggtgcagcatacacactgcaggagatcctgacagtaaaatctgatgatgtgatcggacgtgtaaaaacttacgaagcaattatcaaaggtgataatattcctgagcctggtattccggagtccttcaaggtactgttgaaagagttacagtcacttggtctggatgtgacactggaagacgagaacggcgaagaagtaaaactgcttgaaacaagcgaatatggaaatacagatctgaacgcaattatttccggagacagaaacttcaattatgaagaaaaagagtctttcggagagatgggattctcaaaacaggaattcaatgaaaaagaagaactggtaaatgtagaagacgatcagaatgatgctcagacagatgatttcatggacggatttgatgatagcattcttgatgaagaataagaggaaggagcgttgtaaatgccagaaacaaacaataaagaagtcggcacaaacatagcgttcgatgccatccgcatcggactggcttcaccggaaaaaatattggaatggtcccggggcgaagtaaagaaaccggaaaccattaactatagaactttgaaaccagaaaaagacggtttgttctgtgaacgtatttttggaccgagcaaagactgggaatgccattgtggaaagtataaaaaaatccgctataaaggcgttgtctgcgatcgatgcggagttgagattacaaaatctaacgttcgtagagagcgtatgggacatattgagctggcagctccggtatctcatatctggtacttcaagggaatcccgagccgtatgggattaatccttgatatttctccgagaacactggagaaagtactgtatttcgcttcttacatcgtacttgacaaaggcgagacagacctgcagtataagcaggttctgtccgaagcagaatatcaggaagcatacgaaaaatacggaaaatccttccgtgtaggtatgggtgcagaatccatcaaagagcttctggaagcaatcgatcttgagaaagattctgttgaactgaaagcagcattaaagactgctacaggccagaaacgtgcaagaatcatcaagagactggaagttgtagaagcattccgtgagtctggtaacagaccggagtggatgatcatgactgttatcccggttatcccaccagatttacgtccgatggtacagttggatggtggtcgtttcgcaacatccgatctgaatgatctgtatcgtcgtatcatcaaccgtaataaccgtctgagaagactgttagagcttggagcaccggatatcatcgttcgtaatgagaaacgtatgcttcaggaggcagtagatgccctgatcgataacggtcgtcgtggaagaccggttacaggacctggtaacagagcattaaaatctctttccgatatgctgaaaggtaaatccggacgtttccgtcagaacctgcttggtaaacgtgttgactattcaggacgttccgtaatcgtagtaggaccggaattaaagatttatcagtgtggtctgccgaaagagatggcaatcgagctgttcaaaccgtttgttatgaaagagctggttgcaaacggaaccgctcataatattaaaagcgcaaagaaaatggtagagaaacttcagacagaggtatgggacgttctggaagaagttatcaaagagcatccggttatgctgaaccgtgctcctacactgcacagacttggtattcaggcatttgagccgatccttgtagaaggtaaagcaatcaagctgcatccgcttgtttgtaccgcatacaatgccgatttcgatggtgaccagatggctgtccatcttccactttctgtggaagcacaggcagagtgccgtttcatgttgctgtccccgaacaacctgttaaaaccgtccgatggtggtccggtagccgttccttctcaggatatggttcttggtatttactatctgacacaggagagaccgggaagtattggtgaaggccattacttcaagaacctgaatgaagcaattcttgcatacgagaacggatatgtaaaattacattccagaatccatgtacgtgtgacaaagaaaatgccggatggcacagagaagacaggaactgttgagtctacacttggacgtttcatcttcaatgaaatcttgccacaggatcttggatttgtagatagaagcaaaccggaaaatgatctggtactggaagtagatttccatgttggtaaaaaaggtctgaaacagatccttgagaaagttatcaacatccatggtgctacaaccacagcagaagttctggatgatattaaagcaatgggttataagtactctacaagagctgctatgaccgtatctatttctgatatgacagtaccggagaagaaaccggcactgatcaaacaggcacaggatactgtagatcttattacaaagaactacaaacgtggacttatcacagaggaagagcgttacaaagaggttgttgagacttggaaagagactgatgatgagcttacacatgagctgttatccggacttgataaatacaacaacatcttcatgatggctgactccggagcccgtggttctgataaacagatcaaacagctggctggtatgcgtggtttgatggctgatacaactggtaaaacaatcgagttgccgattaaatcaaacttccgtgagggacttgacgtattggagtacttcatgtctgcccatggagcacgtaaaggtatgtccgatacagcgcttcgtaccgccgattccggatacctgacaagacgtctggtagacgtttcacaggatctgatcattcgtgagacagattgctgtaaagatagaagtgagactgctggtatgtacgtaagtgcattcatggatggcaaagaggaaatcgagagcctccaggagcgtatcacaggacgttttgcatgtgaagatattcacgatgcagacggaaacgtacttgttgcagcaaatcatatgatcacaccgaaacgtgcagctctggttatgagcaaaggtgtagatgagaacggagaaccgcttgagaaagtaaaaatccgtacaattcttacctgccgttctaaagtcggtgtttgtgcaaaatgctacggtgcaaacatggcaaccggtcaggcagtacaggttggtgaggcagttggtattatcgctgctcagtctatcggtgagcctggtacacagcttacaatgcgtactttccactccggtggtgttgccggtgatgatatcacacagggtcttcctcgtgttgaggagctttttgaggcaagaaaaccgaaaggacttgctatcatcacagagtttgctggtgttgctactattaaagatacaaagaaaaaacgtgagatcatcgttacaagcccggagacaggtgagacaaaagcttacctcatcccttacggttccagaatcaagatcactgatggtgcattccttgaagctggtgatgagcttaccgaaggtagtgtaaatccgcatgatatcctgaagatcaaaggtgttcgtgcagttcaggattacatgcttcaggaagttcagcgtgtataccgtctgcagggtgtagaaatcaatgataagcacgttgaggttatcgttcgtcagatgctgaagaagatccgtatcgagaacaacggagattctgatttcctgccaggaaccatggttgacttccttgattatgaggaggaaaatgagagactggctacagaaggaaaagagccggcagaaggaaaacaggtactgcttggtattaccaaagcttccctggcaaccaactcattcctgtcagctgcatccttccaggagacaacaaaagttctgacagaggcagcaatcaaaggtaagattgatccgttgatcggtctgaaagagaacgtaatcattggtaaactgattccggcaggaacaggtatgaagagatatcgttctatccgtctggattctgatattgatgagaatgcagagattgatgcaaatgatctgttgggcgacgatttgttagcaggcgatgaaactgttgaaaatgttgagacagagattgatgcagaagatatcgacgttgagactgagacagaagaagctgcagatgcagaagagactgtaacagaataagatataaagaaaaggcggtgccgtagggcatcgtctttttgcaattagaaatgtctgtcagaggttgtaaaagttctttataaataacatttgatccgctgttattggataaaacaatatcattatctgctttttatatagaagcaacacattgtatatgtataaaaacagaaaaaactgggaaaaatcagaaaaatacgcttgacaagctattagacaatcactatactattttagtgtgcacaaaagcgcacaggaaacttttttacaaaatatacaggaggtgaatagaatgccaacatttaaccagttagtaagaaaaggtcgtcagacatctgctaagaaatctacagcacctgcattacagaaaggttacaactctttacagaaaaaacctacagatgcagcttctccgcagaagagaggtgtttgtacagcagttaagactgcaaccccgaaaaaacctaactcagctcttagaaaaatcgccagagttcgtctttctaacggaatcgaagtaacaagctacattccgggtgaaggtcacaacttacaggagcatagcgttgttctgatccgtggtggtcgtgtaaaagacttaccaggtacaagataccatatcatcagaggaacactggatacagcaggcgtagcaaacagacgtcaggctcgttccaaatacggcgctaagagaccgaaagcaggcaaataggacctgtaaaagaccaatagtatcacaaacagaactattgtaagtgttggaattctttttatcgacgataatagataaagatagatgttcccagcatgaacacattagaaagacacatgtgagtaccgttgaattaatcgattaagaaactgctgtgaaagacagcaagccaagaccatgattaaggagggaagtaccgtgccacgtaaaggacataatcagaaaagagaagttttagcagatcctatgtacaataacgtagtagttacaaaacttatcaacaacatcatgttagatggtaagaaaggtgtagctcagaaaattgtatacggagcttttgatcgtgttgcagagaaaaccggaagaccggctatcgaagtattcgaagaggctatgaacaacgttatgcctgtacttgaagtaaaggctagacgtatcggtggtgcaacatatcaggtaccgatcgaagtaagaccggacagacgtcagacacttggactgcgttggttaacaatgttctccagaaaaagaggagagaaaacaatggcagacagactggcaaatgagattatggatgcagctaacaatacaggcgcatctgtaaaacgtaaagaagacatgcacaagatggcagaagcaaacaaagcattctcccatttcagattctaagaggaggaaatcaccatggcaggaagagaatatccgcttgagagaaccagaaatattggtatcatggctcatatcgatgcaggtaaaactacattaacagagcgtatcctttattacactggtattaactataaaattggtgatactcacgaaggtactgctaccatggactggatggagcaggagcaggagagaggtatcacaattacttcagctgctacaacatgccactggacaccgcagaaagaaaataaacctgcaccgggtgctaaagagtaccgtatcaacatcattgatactccaggtcacgttgactttacagtagaagtagagcgttcccttcgtgtactggatggcgccgttggtgtcttctgtgcaaagggtggtgtagagcctcagtcagagaacgtatggcgtcaggcagacacatacaatgtaccacgtatggcattcatcaataagatggacatccttggtgcaaacttctacggagcagtagaccagattcgtgagcgtttaggtaaaaacgcaatctgcttacagcttccgatcggaaaagaagatgacttcaaaggaatcatcgacttattcgagatgcaggcttatatctacaacgatgagaaaggtgaagacatcagcattgagccgattccggaagatatgcaggatgaggcagagctttaccatgatgagttagtagagaaaatctgtgagttagatgatgatctgacaatgatgtatctggaaggcgaagagccgtccgttgagcagttaaaagctgttttaagaaaagctacatgtgagtgtacagctgtaccggtttgctgtggtactgcttacagaaacaaaggtgtacagaaactgttagatgccgttgtagatttcatgccggcaccgacagatattcctgctatcaagggtgttgatcttgatggtaatgaagtagagagacattcttctgatgaagagccgttctctgctcttgcattcaaaatcatgacagacccgttcgtaggaaaacttgcattcttccgtgtatactccggtacaatgaattccggttcctatgtactgaatgcaacaaaagataaaaaagagcgtgttggacgtatccttcagatgcacgctaacaagagaactgagctggacaaagtttactcaggtgatatcgcagccgcagttggattcaagatcactacaacaggtgatacaatctgtgatgagcagcatccggtaatcttagagtccatggagttcccagagccagttatcgagcttgctatcgagccgaaaacaaaagctggacagggcaagatgggtgaagctcttgcaaaacttgcagaggaagatcctacattccgtgctcatacaaacactgagacaggccagacaatcatcgccggaatgggtgagttacatctggaaatcatcgttgaccgtctgcttcgtgagttcaaagtagaggcaaacgttggtgctcctcaggttgcttacaaagagtcatttacaaaacctgttgatcaggaatacaaatatgcaaaacagtctggtggacgtggacagtacggacactgtaaagttaaattcgagccgatggatgcaaacggagaagagacattcaagtttgagtccgcagttgttggtggtgctattccgaaagagtacatcccggcagttggagaaggtattgaagaagcagctaaggctggtatcattgctggattcccggttgtaggtgttaaagctacagtttacgacggatcttatcatgaggtcgattcctctgagatggcattccatattgctggatctatgtgtttcaaagaggctatgcagaaagcagccccggttcttcttgagccgatcatgaaagtagaagttactatgccggaagagtacatgggtgacgtaatcggtgatattaactctcgtcgtggacgtatcgaaggtatggatgaccttggcggtggaaagatcgttagaggttatgtaccgctggctgaaatgtttggctactctacagacttacgttccaaaacacagggacgtggtaactactcaatgttcttcgagaaatatgagccagttccgaagtctgttcaggagaaaattatttccgcaaaagcaaaataaaacttgaaatactttgacctttttaatataatcgaagtatcgagtgataagattcaataagaattatgaatgccttaggcataattttaaggaggacgcaaaaatggcaaaagctaaatttgacagaagcaaaccacattgtaacattggtacaattggacacgttgatcacggtaaaacaactttaacagctgctatcactaaagtattagctgagagagtagaaggaaacgagaaagtagatttcgagaatatcgataaagctccagaagagagagagcgtggtatcacaatttctacagctcacgttgagtatcagacagcaaaacgtcactatgcacacgttgactgcccaggtcatgctgactacgttaaaaacatgatcactggtgctgctcagatggatggtgctatccttgtagtagctgctactgacggtgttatggctcagacaaaagagcacatccttctttcccgtcaggtaggtgttccttacatcgttgtattcatgaacaaatgtgatatggtagacgatgaggagctgcttgagttagtagagatggagatcacagaagttctggaagagtatgacttcacagactgcccgatcatcaaaggatctgctttaaaagctcttgaagatccgatgggcgagtggggcgacaagatcatggaactcatggacacagttgatgagtatattccggatccgcagcgtgcaacagatcagccattccttatgccagtagaggatgtattcacaatcacaggtcgtggtacagttgctacaggtagagtagagcgtggtactcttcacatcaacgaggaagttgaaatcgttggtatcaaagaggagattcagaaaacaactgttactggtatcgagatgttccgtaaactgttagacgaggctcaggctggtgacaacatcggtgcattacttcgtggtattaagagagaggacatcgaaagaggtcaggttcttacaaaaccaggtacagtaacatgccatacaaaattcacagctcaggtttacgtactgacaaaagacgagggtggccgtcatacaccgttcttcaacaactaccgtccgcagttctacttcagaacaactgacgtaacaggtgtttgcaaccttccagaaggtacagagatgtgcatgcctggcgataacgtagagatgacaatcgagctcatccacccaatcgctatggagcagggtcttacattcgctatccgtgaaggtggacgtactgtaggatcaggacgtgttgctacaatcatcgagtaatacaatctgaaaatagatttgttatcgcaagataacttgtgtccaaacgtaagataccccagaaaccttgtgtttctggggtttttctgtactctaagaaaaggattgtttgtaaaattatcagattagaaacagtgaaacgtttatcagaaagatgaaatacggataaatttaaaattgaaaaatcagtctagcggtgccaaaacggtgccaaaaagaaactcctgcgaatatttgctattcacaggagtaatttttttaccagcctttgatc

SEQ ID NO: 13158 - DNA, 10449 bp, Unknown
  gut microbiota DNA sequence
actgttcagataaggagagaaacgaaagtatggcaaaaaatgataaaatggaagttcagaaagaggcaaaattaaaagcactggacgaagcaatcgcacatattgagaagcaatatggaaaaggatccgttatgaaacttggggatccgagtgtacatatgaatgtagagactgttccgaccggatgcttaagtcttgatatcgcacttggacttggcggtgtgccgagaggacgtattattgaggtgtacggaccggaatcgagtggtaagactaccgtagcgttacatatggtagctgaggtacagaaatgcggtggaatcgcaggatttatcgatgcagagcatgctcttgatccggcttatgcgaagaatatcggtgtagacattgataacctttacatttcacagccggataacggtgaacaggcgctggagatcacagagacaatggttcgctccggtgcagtggatatcgtgatcgtggactctgttgcggcactggttccgaaggcagagattgagggcgatatgggggattcccatgtaggtctacaggcacgtctgatgtcacaggctctgcgtaaactgaccgcagtgatcagtaaatcaaactgtatcgttattttcatcaaccagctgcgtgagaaggttggtgttatgttcggaaatccggaggtaacaaccggtggacgtgcgttgaaattctattcatccatccgtctggatgtacgtcgcgtagaggctttaaaacaggctggtgagatccttggaaaccatacacgtatcaaagttgttaagaataagattgctccgccattcaaagaggctgagtttgatatcgtattcggacagggaatctccagagagggagatatccttgatctggcggcaaatacagacgtggtcaataaatcaggtgcatggtatgcatacaacggcgagaaaatcggccagggacgtgagaacgccaagaaattcctgaaagagaatccggagatctgccaggaaatcgaagcaaaagtacgtgcgtactatcatctggatggtgaaggcgaagaaacggcagaaggagccggtgcagatgcttctgtggaagctgctgcacagactgacgcagaataatgcagatacaggagattatcagagggaaaaaaggaaagcttaccattcgactggagggagggctttcctttcccatttatgaaaaagaagcggcaaaatatcgcatgacagagggaggcacgctgtctgaccaggaatggaatgaaatctgtacggagattttggaaaaacgtgcaaagcgccgagctctgtatattttgcagagaatggaacggacggagtatcaactgcgtcagaagttgcaggagaacggttatccggaggaaatcgtgcagtgtgccattgattatgtgaagtctttccattatgtagatgattatcgttatgcctgtacatacatccgatatcatcagacggagaagagccggctgcagttaaaaatgaagctgtatgagtgcggtgtcgcgtcagatctgatcgaacaggcgctggaagacgaatattccggcgaggaagaacagttgatcgaccgtttgctggaaaagaagcattatgatgcggaaacgatggatcagaaagaaaaacagcggatttatcagtatctgatgcgcagaggttttcggcctgagactatccggcatcgaatggggatctgatcgaatgagggaagtttgcggattttgttactttataatggacaaagtcggaaatttacgtatatcggtgtatataagtgcttttgggtgaattatttacctgaaatgaaaaggatttttgtgtcgaaacggttatggattgtatacagtttagtgccctggttagtattatttgcttgacagaaagcacaaaaaagtataaaatttaatagttgtaatttatgacataataccagatataaattgttatatgtacaatgaaaattaaataaggaggtgctcctgtggcgcagattatcattgcggtggtaattactgctgtagttacaatcttgcttacttacgtagcatctaatgcacatttcaagaaagtctctgatgagaaaatcggaagtgcagaggatcgtgcgagagcaattattgatgaagctgtgaaatctgctgagacgaagaaacgtgaggctttacttgaagtcaaggaagagtccatcaagacaaagaacgaacttgacaaagagattaaagaccgcagatctgagattcagcgtaatgagcgtcgtgtagaacagaaagaggctaatctggataaaaaactggaagctatcgagcgacgtgagcagagctttgcggtaaaagaagaagagattaagcgacagaaagcagaagttgccaagctgaatgaagaacgcatacaggaactggagcgaatttcaggactcacctctgaacaggcaaaagaatatctcctgaaaacagttgaagaagatgtgaaactggatactgcaaagttgatcaaggaaatggagcatcaggcaaaggaagaggctggaaagaaagcaaaagaatacgtagtaaatgcgattcagaaatgcgcagccgatcatgttgccgaaactacaatttctgttgtgcagcttccaaatgatgagatgaaaggacgtatcattggtcgtgagggacgtaacatccgtactcttgagactatgacaggtgtagatctgatcatcgatgatacaccggaagcagttatcctgtccggtttcgatccaatccgtcgtgaggtggcacgtatcgctcttgagaagctgatcgtagatggacgtatccatccggccagaatcgaagagatggtagagaaagcacagaaagaagtagagagtatgatccgtgaggaaggtgaggccgctacacttgaagtaggtgtacatggcattcatccggaactggtacgtctccttggacgtatgaaattccgtaccagctatggtcagaatgcattaaaacattccatcgaagtagcacagttaagtggactgcttgctgcagagatcggtgtggatgtcagagttgccagacgtgcaggtcttctgcatgatatcggtaaatctgttgaccacgagatggaaggttctcacatccagttgggcgttgagctttgtagaaagttcaaagagtcccctaccgttatcaatgcagtagaagctcatcatggcgatgttgagccggagagcttgatcgcatgtctggtacaggctgcagatacgatttccgcagcaagaccgggtgcacgtagagagacactggaaacatattcaaacagattaaagaaactggaagatatcacaaacagtttcaagggagtagacaaatcttttgcagttcaggcgggcagagaagttcgtattatggttgtacctgagcagatcagtgatgcagatatggtacttctggctagagacgtttcaaaacagattgaagctgaattggaatatccgggtcagattaaggtaaatgttattcgtgaaagccgagtaacagattacgcaaaataagtatcatagaccataatcagacagttcgtatgatgaaaatgagtttaaagacctgtaagtcttcgaaagaagatttgcaggtcttttttgcgcgcaaaataagatgtttttggcgtttatctcagtcgagaagactcccacttctgcaagtggtgagtaataacaagtctttctcagtgggagtacaatctccgactgagatgaattaaaaaagcatgaatcagttaatctgattgtatagaagatgcggctgattatgtactattattgttggtgaagtaaatagaaaaagtatttccgtttttggtaattgagtaaaaaataatagatttgaataaaaaagaagatctcacgtaattgctagaatcctgtctgggtgagcaggaatacaagcatcgtgagatcttctttttggtatgaaatattaaggtgcatgagtcaaaaatagataacttacatcagatatataacaaatttatattagcagtggaatttgatcacaaatctaatatagcatctggcagtttattaacgtgccagtcccgctgcatccaactgtttgcggatctgtggtgcaatcagcagtgcaaggatcattttaataaaatcacccggcaggaacggaataacacctgccataagtgctgcctggaatcccatatgtgcctgaacagcaagccaagcggttccaagtgcatagcatacagcagttccaaggatcatgccaaggaagcagagagcttttttgttacgaaaatgatcgataaagaagcctgcgatcagtgccagcgggataaatccgatcaggtaaccaccggttggtccaaagagtttgccaggaccgctggtaaagctggaaaataccgggattccaaccagaccgatcagaagatagatcaggtagctgatggttccttttttcgttcccagaatgaacagtgaaaaataaatgacaaggttggtaagtgaaatcggcaccggaccaattggaatagaaagtggtgccagtacacaagttactgcggtcatgactgcgatcatagcaatctgttgaatcgtaaattttgagtttgttttcgttgctgtgttgttcataaatcattctccatttcttatatctgaaatcccatatcggtaagcatttcctgatcctgcttcgtgttatttccgacagtggtaagcatgtcaccggtgatggtggcgttgacacctgcttcaaacaaccggcgtccaccgtctttgaagtaactgcgtcctgctgccattcggatatatgcatccggattcaggtagcggaacattgcaaccgcacggataatgtcatcttcggtcagtggtggaagctcagcaaacggagttcccggaaccggaatcaatgcattgatcgggatggatacaatgccaagctctgataaagatactgccatatccaaacggtcagcaaatgtttcacccatgccgataatgccgccggaacagactgccagtcctgctgcctgtgccagtttgatctcatggattttatcgtcgtaagtatgtgtggtacaaatatttggaaaattgcgtctggatgtttcgatgtttgtatgatacatggtgacacctgcatctctcagacagaaaaatgcttccggtgacagcaatccatgggaagcacacagacgaagtttactgtttttacgtaattcttcataggtgtggatcagtttttccagatcttcgccttccacagttcttccggcagtaacgatggagtatgcatgtacgccggcagcttctcttgcgcggcagtccgcgaggacgacatcggtgtctaacatgccataagtctcacaggaagtgtggtgaaaggatgactgcgcacagaatttgcagttttccgaacattttccggcacgaccgttgatgatggtacacagatctacggcgtttccacataatgcctgtcggatttcatttgcgccggctgccagttcttccagatctgcagtttcaaaaaaagacagatcgtcatcgcgggtcaggcggcgtccgtttataatttctttggtaagttcagtgatattcataatcaattctccattcttgcatatagaatcgtgttcagaatgtcatttcaaatgaaatttgcagggcgatgtgagaataaaatcattttcggaatcatatgatccgtcagcattgccagtgttttcctttgaaatatatgattctgttgcttagtataatcagaataaagttaattgtcaacctataaaataatttcaggttaacattagaaaagataatagcaagaaatgttaacaaacagtattgcgatattcatttggtgtcatgccttcctgtttcttaaaagcagtacaaaatccgctctcatcagaaaaaccggaacgaattgcaatttctttcaccgacatctgacttgttttcagtaaaaattttgcatttgccatgcgggtagtaatgagatatttgtgtggagtcatgcctgtttctctggcaaatacccgggaaaaatagtatggactcaatgctgcaatatccgctaattcctgaagggtaatggatttataaaaatatttgttaatgtgcgagatggcatctgatatatcggtttgagttttgcgggttgcatgctgtgtcgtttcagcagttaacaaatccgtcaggatatttgtgatcgtgccggaaatttgatcttctgcaattggtgcacggctgcggaaagtatcgtagatattatagaggaatctgtaaatggcatccgggtgcgctggatagagcagagatcctttttcgagcacaatggtttcataaaaagtacgcgccattggaccatcaaagtgcagccagagagcttcaaaaccggaatctgtaccgtaggcatgtggcgcatagcaatccagaaggacaagctgacctgccgtagcctgcattgtctgatcatccaccgttacaaaacaggttccctttaaaatatacatcagcagaaagctgtcgtaagaatcccgcgccagtcggtagccactttcgtaacggaatgatccggtacagattggatagaaaaacagtttttttgccagggtgcttggggtgtatacgtagtaatcggaatttggcagaacgtgcgtttcgtaagatatcatagggacctcccgagtattgaaatttagaaaattgtaaaacgttttgcaaaaaatattgttgcaaatggttttgttttgcttgaatttgtttgtagggtgtagcaattctaaaaacaatatataagtatctgctgataagaattgcatattaataatctcatgtgttcaatttacaattttagtaattactgtaagtatacgtgttttatcagcttctgtcaaaagcaattttttgcaatggaacagcaattaaatcgaatgaaaacgggaactatatagaatataatgagagcaaaaaattgataatgattagatgaatattagaaatgcacttttaaaatttgcttacaacaaaaagctgagaattatgggacagataatcaaaaagggcaaaaaagtgagcttacacagaaacgataacaggagaagtaatcagaaaggatgggaaaatatggaaacagcaaaatatgcaaaaatctgggaagaagatgtagtgattccaacttatgagatcggtgcaccggacaaaaatccgatgtttctggaaaaacgagtatatcagggaagttcaggaaaagtatatccgtatccgaccacagaaaaaatcagtcatgaaaagaaagacaagatctggcatgcagtatatctggaaaatgaatatctgaaggttatgatcttgccggaacttggtggacgaatccagcgcgcatacgacaaaacgaatgattatgattttgtatattataaccatgtgatcaaaccggcgctggtgggacttgccggtccgtggatttccggtggtatcgaatttaactggccgcagcatcaccgtccaacgacatacatgccggtggatcatctggcagaaacccatgaggatggcagtgtgacactgctggtgggagatgtggatcagatgtacggcacaaaagtaatgacttcctttaccttgtatccgggaaaagcttatatcgaaatccggggacagctttacaaccggacaccgcttccgcagacatttttgtggtgggcaaatccagcggtttccgtcaatgaatatacgcagtcgatttttccaccagatgtacataccgtgtacgatcatggaaaacgcgcagtttcaagatttccgattgcaaaaggagaatattataaacacgattacagcgaaggggttgacatttccagatacaaaaatattccggttccgacctcttacatggcggaaacgtcaaaatatgattttgtgggcggttacgattataaaaaagaagccggactgctccatgtagcagatcatcatttttcaccgggcaaaaagcagtggacctggggatgtggcgagttcggaaaagcctgggatcgcaatctgacggatgaagatggtccgtacatcgaactgatgactggtgtatacacagaaaatcagccggatttcagttggttgaaaccgtttgaggaaaaagtatttacccagtattttatgccgtataaaaaagtgggaggggtaaaaaatgcttcgatttatgcggctttgaatctggaactgacttcacaaggcgcaaaaatcgtcgtatacgcaacagaagaatatgcggatgcggaaatcgtgctggagcagaatgggacagaagtattccgaggacagacaaaactgtctcctgtggaaacttacgaagaaattattccggtgtcagcaaaaaaagtacaggaactgaaagtgtcagtttatggacacggcagactgctggtggcatacgagccggaagaggaaacgattccgaagcttggtgagccggcggaggcagcaaagaagccggaagaaattttgacaaatgaagaactgcttttgacggcacagcatattgagcagcatcggcatgcaacttggcgaccggatccatattatctggaaggcttgaaacgggatccgggagacattcgaatcaatcaggcctacggtatgcttctgatgcggcggggacagtttgcggaagcggaaaaacattttcgtgcggcaattaaacgtttaacctggcggagtccgaatccatatgacagtgagccttactataatctgggacttgtgctgttttatcagggcagaaaagaagaagcgtatgatgctttttataaggcggcatggacaaatgcacagcaggaaatgtcctattattatctggcttgtattgcgtgtggggatggtgaatatgagcatgcattggaacttgtggagcgcagtctggtaaaaaacagtcacaatgtcaaggcaagaggattgaaagctgtattactgcgtaaattaaatcgtgtggaagcagcagaaaagtggagagcagagaatctggaattagatgcttttgattatgtgacactgtttgaaaatgttttagcagaaaaagatgcagatgaatttcaggagcgaagcagaggtttttatgagacatatttgcagacagcaagagattatgcagaatacggttgtctggaggaggcaatttgcatattgaaatcttgcgctgtgcagcagccgatgatttattactatcaggcatattatcagcagaaattaggtgcatttgttaaagaaaatatgactatcaatagagaaaatgatggagtagcaatggaattgtgccagaaagccaatgcagaaaacagcaaagatataataaatacattatatgaaagagcagaacagtgtgcaccagattactgtttcccgaataaattggaggacattgcagtattggagcaggcaatcgttgcaaatccaaaaggagcaaaagcctactattatttaggtaacttgtattatgataaattgcagtatgatcgtgcaatcacactttgggagcagtccatcatgttggatgcatcttatccaactgtacatcgaaatctggcaattgcatattataacaaacgtcagaatgccgaggcagcccgcaaggaattggagcaggcttttgcgctggacgaaacagacagccgtgtatttttggagctggatcagttatataagaaacttggtgtgccgtttgaagaacgtttaaaacagtatgaagcgcgggaagcactgatcagagagcgggatgatgcgatgctggagtgggtgacactttacaacctgaacggggaaccacagaaagcctatgatctgattatgagtcattccttccgtccatgggaaggtgcagaaggtcggatttctggtcagtataagattgcactgatgacactggcaagagaagcaatgcagcagaatgattatgaacgtgcggagcaattactgaatcaggcattgcaatatccggaaaatctgggtgaaggacgtttggaaggaaccaaggataatgacatttattatgaacttggtgtggtacaggaacatctgaatcgacaggatgaggcgcggaagtattttgaactggcacagattggtgacaatgaaccggcgggtgcaatgtattattatgatcagccggcagatatgattctgtatcaggcactggcaagtaaaaagttaaaccagatgaagcagtatcatacctgcctgaacaaattacaggactacggggaacggcatctgtacgatcaggtggaagatgactttttcgcggtatcacttccggatttcttgatttttgaagatgatctgacagagaaaaacagggcacattgctattatctgatgggattgtcgaaattgggcgcaggtgaatatgcggcggcagaggaaaattttgag

SEQ ID NO: 13159 - DNA, 145 bp, Unknown
  gut microbiota DNA sequence
tttcagaaacactggaagtatcctgcgtgattgatactataaacaaagccaaagctcgccgaaatattgatctaccattaattatccattcggatcgtggcagccaatatgttgcaaaggaatataaaaaagcaactgaaaatat

SEQ ID NO: 13160 - DNA, 345 bp, Unknown
  gut microbiota DNA sequence
catggtctcaccgcagcatggacatttaagaggatcatatccgaaggaatgtaaaatacagtcgcgccagcggttgaaggaaagaaatatctttcgtttttcttttgcaatggcaagatttagtttggaatcatttttatgatttccagcatatagaccatagtatcggatctgcttgaaatgtttttcagggatgtgttggatcaaccgctgaatgaattgcataacaggaacagattcggtaataagccggttgtcttcgtgccggttatagtgaaaggtgacagtttcaccatcgtaatgatctatacgtgaggttgcgatgactggacgaccaagataacg

SEQ ID NO: 13161 - DNA, 7058 bp, Unknown
  gut microbiota DNA sequence
atacaacccggatgtaacagtagatacatatgatgagttcctgaaaacatatgcagataccatctacaatctgccagaataattaaaacataagaaacgaagttagaaaataattttggaggcaatatatgagtgcacaaggtttaagtaagcagtcgaaaaagaaaatgattactttcgcagtcatcgcagtagcggtcattgtagcaatcattatcttaaacgtactgacagaaggcaaactgctcaacccgaagaacctgaaaaacgttcttgcaggttccgtagttccgacattagtagcttttggctttttgatcgtatttaccggtaacgtaacagacctttcccctggtggaatcgtaatcttagcctgtacagcaaccggtcttcttggaaacgcatacggcgttccggtaatggtaatcggcggtatcgcagttggtgttggatgtatgctgttaaacttcttagtttaccgtattacaaagatcccgccatggattgcaggacttggccttttgatggtatatgaggcgatcgccgtaaactatgcaaacagcgtagctgcaaaaggacagaaagttgttgttatgaacaatgacatccgtttcttaggacagcagccgggtatctacatttgctggatcatcggtatcgttgttgcatacatcatctttaatcacacatcacttggtatcaactaccgtgcaaccggtgacaacgaagatgtagcaaaggtaatgggtatcaacgtagataaagcgatgatccttggcggtatcgtagcaggtgcattctttggatatgcaggtgttatcaaagagagctacgcagcattcgtaaatgcacagtcaggtctgaccagtttaagtaccacattccagccgatggcagcagcgttactggcacttgctctggcaagctccatcaacgttatcattgcggtaccgatttcaacattcctgatcacactgatctttaacgtgttgacattatttggtgttccgtctggtacattccaggatttcatccttggtgttatcgtaatcctgtttgctatcttagcacagcgtaaagttaagggggttgtcaagtaatgagcgaagtattgttgaaaattgaaaaccttaacaaaagttttggaattacacatgcaaatgtaaatatcaactttgagttaaaagccggagaagttcgcggacttgccggtgagaatggttccggtaaatccacacttctgtcccagatcgcaggtctgtacggaagtgattctggaaaaatgtacatccgtggagaagagtattctccgaaaaacccggtagatgccaacaaccataaagtagcaatggtcgtacaggagttgggaatgatcggttctcttccggcaagcatcaatatctatcttggaaaaacaaagaaatttatcaaaatgaacgacctgcaggatcaggcaaacgcagtttccgatcgttggggacttccgagagtaaacctgaaacgtatggcaggcagcatgaatattgagaacagaaaaatggtcgagctgatccgtgcactggcagctgatccggacattctgattctggatgaggtgacacagtcactttcccacgataaccgtaaagttttatataatctgatcgaaaaattcaaaggcgaaggacgttccatcatcctgatctcccacgatctggacgaggcaatccagctgacagactccatctccatcttacgagacggtgagctgcttgagacaatttccagtgaaggtctgaacgaagacattctgaaacgcaaaatggtaggtcgtgaacttggcggcgcttactatcgtaccgactgggaaaacgattatgatgacgaagttgtattttccatcaaaaacgttacaacagagggcgtaaagaacttaaatgtagacttacataaaggtgagatccttgcattctgcggactgagtgattccggtatccacgaagtaggtccgatcgcatacggtctgaccacaccgaaggaaggcgaagtattcctgaacaaagacaatgtcaagatcacacagtctattcaggcactggagcacaagatggcttacgttccgaaggatcgtgatggcgaggctatgatgatgaagacaaccatcatgagaaactttgtacttccgtccatcgaggatgttgcaggaaaagcaggtttcctgaattacgcacagttaaagaaaatggcagaggaaaacagaagatctttccatctgaaatgtaccggcaccaaccagaacgtaaacggtctgtccggtggtaacaaacagaaagtaaacttaggaagatggcttgcaaaagatctgagcatcctgatcgttgactgcccgacacgaggcgttgacgtaggtgtcaaagcatatatctatgattgtctgagagaagccaagaaaaaaggtatcggcacgatcatgatcaccgatgagctggtagaggcaatcggtatggcagacaacattgtagttatgaaaaacggcgaagttaagaaaacgatcggacgtagttccggcttcaacgaggaagaaattattgaggtgatggtataatgaaaaagcagggtaaaattcaattactggatattgtgccaatctttattctggcaggtatctttattatctttactgtcgcatcaaacggtgcaacattatcatcctacaacttaaaactgctctgtacaaacgtggttccggtcatcatcggaagtttgggatgtattttcgttatcgcacttggtggtacagatatttccatcggtgcaagtgcagctctctgttccagcatcgcagcagttatctctggacagacagcaggatgggtggcaattccggtcacaattatcctttctaccgctttaggtgcactgatcggttttattgttacaaaattccatgtaggatccttcatgtgtacactggcaatcctgatcgcaggacgtggactgctgaactttatgcttcagcagagctccatcgcagcaccaaaaggaatcagctttgtaacatcttttgcatttacaattattctgctgattgctctgatcgtgatcgtatggtttgtatttgagtataccaaattcggtttctactgcaaatgtatcggtgagaacgagagaaccgttcactccgtaggtatcaacgtaaagaaaatccgtatcatctgcttcatgatctccggtctgatggcaggtatcatcggtctggtacagatctgccgtgtcggtggttctacaagtacactgtgtaatatgctggagatgaaggttcagatggcgatcttccttggcggtattctgacaaccggtggtttttccgcaaaaatttacaaactgatcattggttccttcacaatcgtagttattgagaacggaatgatcatccttggtgtatccagtgccctttcagaggcaatcgagggaattatccttgttgcaatcctgatcacaactgtatactgcagcaaagtggcagtaaataaggatctgaagatggcagctctggcagacaaggagagtgttgcagaatctgcggctcactaatgaatgttattgaaaaatagcgtcatactataagagatgaatttatgcactggcaatgattgcgtgtgtaacattgtcagtgcgttttaaattcataggaaattacagaaattcctatgaacaaagcacttcgtgcagataatgcacattcgcacaagagaaaattattgcgttgcaattgtgctcagcgcggacaagaaagatgtgctattcaaagatgattattacggaagtgcgcaatagcacactttcttgataataataacggaatctgatggaaaagggttaggttctattttttttgacttttttgttgttgaagggagttttattatggaaaaaaacaaaaaaaatggcaactcattggtaagttttggtaaagccggatggggtacgatcattttctgtatggcaatgttctggttcttcgtaggattttgtacagatggtaacaacattacagcaccggcagtagcggaacatcttggtattcagtccggaacagttctgcagatgaattcttacggtggaattcttggtgttatcttctacattgcattttcccagctgaccaaaaagattggcgccagaaaagtggcagcgatcacactgatcatctccggtgttgcatatattgttatgggtaactgcccgaatcttgcagtgtataccatcgcttatacctgtctgatcggttctattatgtccgcaggttatgtggcaggtggtgcgctggtagcacagtggttcccgaaacgtaaaggtgtggttatgggatatacaaccatgggattaaatatcgcatccgcaacctgggttccgatgatgacactcatcattgcaaaaatgggatttgaaaaaggtgttatcgttccgggcgttttagtagcagttcttgcagtaatcggtctggtatttatgcgcgatactccgcaggaacgcggtttaaatccggatatggtatctgacgaagtgtttaaagcagagtacgatacagacagtgcagaagatgacaaacgctggacggttggaaaactgttaaaaactccggcagtatggacagtaggtatcgcaacaggtctcttacagtgctgttctaccggtgttatgagtcagctggtggtacgaaaccaggagcttggaatgtctgcaactcaggcaatttccatgatgaccgttattgctgtcgttggtatctttggttcctggttcatcggaattctggatgacaaattcggtacaaagaaagttatgatcctgttttgtatctggtatgcagcagcaattctttccaatgttaccaataccacagcaggtatgtatatcgcagttattatgattggtatttccatcggtggttccgcaaactttatgacatccttcccgtcatctgtattcggacgccatggttttgagactgtaaacagtgtcatcttcccaattcagtctattttgactgcaagtgcatttatgatcaacggtatcagcttaaatgcaaccggaagtctgagatggagttatctgattctggcagtgatcgcgctgctcaacatcattttcgttggtctgacaaaagaccatcagttcaacttggattggaaaacaacaaaatagtgaaataatgaataagaagttgttgcacaaatgtgtgacaaaactgcaacaaaaataattgaaggatgcgttgacgcaacaaaaaagtcgaaaaaaccgcgaaaatgcgccatttaaaactggcacaggttttgcaatatataaagtaagtaacaaggtatcaaaaaaggaggattataatatggcgaaaaaatctctggttgcccttgtaaaaggcactgacattcaggaaaatgtcaccaaagtattcgaccttatgggtggagtagaaaacgtaatcagaaaaggttccacagttgtactgaaaccgaacgcaggacatgcagagccacctgagacatctgtatgtacgaacccggaagtagttcgtgccgttatccgcgaggtaaaaaaagcgaacccgaaacgtatcatcgttgcagaagcagctgcaatcggctgtgacacagaggagtgcttccgcgtaagtggaattgctgctgttgcagaggaagagggcgttgaattaaaagatatcaaacgtgacaaagatctggtaaatgttgccgttcgtggttaccgttccaatatcgatcatgtattacttccaaaattcttaatggaagcagatcacctgatcaaccttccgatcctgaaagcacatgccagcatggtattctcaggagcattaaagaacatcaaaggtgtcgtacaggataaagtacatatgcagatgcatcagcagaacctgactatggctatgatggatgtatggagtgcatgtcgtgccgatatcaacatcatggatgctatgcgtgcagcaagtggatacagcccgcatatgccggttccgatcgagacaaacatgattcttggttccaaagatccggttgctatcgaccgtgtggcctgtgaagtaacaggtatcgatacttcctgtgtagattacttcaaagtagcaaaagagacaggtcttggaaactatgaccttgaggatatcgaggttgttggtaataccatcgaagagagctacaaaaaaatgtggattccatatatcggcgacatgagcacacgttggccggaatatgatgtaaaatgtgaaggcgcatgctcaagctgccaggcacttcttgcaatcaacatggaagaactgaaggctgttaacgagtatgacaagaacgcaggtatgacagttgttatcggtggaaagaacgagattccgaaggatattccggatgagaagatcgtacttcacggaaactgtacaaagaaatatctgaaagatcatccgaatgcatactggatccttggctgcccgccaaatgagccggcactgtatctgaccgttcagagaaaagaagtcatcaatggtatgggtgaccaggaggaagaaatcatccgtccatgtatggcaagagacgcagcagtatggcgtgactttgtattcaaagctgctgacaaatattacgaggagcatccggacgagagataatggaaggatacgtgtatgtagacatggatcagaagctccgcaatttgctgaataccatttttaccgatgaattcatggaggaaaatactaatttttctaattttgaaggatttcagtattccagcgcagttatcacgaactggaaagccgataaaatggtttacgctcagcttctgatggataacttcgtaaaagaaagtaccagattttcatcctgggaagaaatggtacaggtagcggcagaacaaagattcggtgctgcagcaaccgcgtaattcataaatattaccgaaaggtgtattactttctctatataaaatgccccgccggctggcggggcattattattgctgtgaatgctgtgaacgatgcgttatcatcacgatttcatcgggggggg

SEQ ID NO: 13162 - DNA, 238 bp, Unknown
  gut microbiota DNA sequence
aagtgtcatggataatgggtatggaatgttccgggagctgctggaatataagctgaaatgggaaggaaagaaaattgtacgggtggatcgcttttttccatccagtaaaaagtgctgtaaatgtggcagggtgaaggaagaactgaaactttcggacagagtatatatctgtgcgtgtgggaaccagatggaccgagatctgaatgcggcaatcaatatccgtgaagaagcacgtcgt

SEQ ID NO: 13163 - DNA, 27981 bp, Unknown
  gut microbiota DNA sequence
aaagtatttttttgcaatcagactaattttccttttagaataagtatctttctataactacaatatatgtatatgtaacagatgaatcacacaccatatttcacataaatttgaatcgaaataacttcgttatgaatatttattgcataacataagaaatcgggaaatcttttctcggcaagcgatttagtgagtgactgaatttcacaagattttgcgcgaatgggaagcgaccagcatttataggagctggaaatgagcgcgataaaactcttgcgaaatgaaggtaacgaatgactagctgctgagaaaagatttcccgatttcgtattttttcaataactttcattttatcaaaaaaataaaagagacagcctgtcgatctgctgtctctttaaaaggagaaggtattttttactatgggggtagcaaaaaactatataatgtattgggggtatttacaggtattataatagcaaattcccataaataagtgtgcataaagttcacaattttccaatccactttttgtgcagtttgccaattacctctcagtcaccttctccaaatcacgcggtaatacgcacaatttctatacatattccacatttttttactcagcagacgtttccacttcttttccgtcaacggttatcacatcatcggcttttgcctcaaataatgcttcaaactcactgcgtccgattttttctttttccagaagaagctctgcgcagcgatacaatacatcctcgttctcacggatcatctggcgtgctttattgctgcactcgtccagaatacgttttacctcgctgtcgattctggcagccacattctcactgtaaccgcgggtgtgtcccagatctctgccgataaatacttcttcgtcatcatcatagcagatcattccgacatcatctgacataccatatttggtaaccatcgcttttgccatggcagttgcctgcttgatatcctgagatgcgcctgtggtgacatcttcaaaaatcagttcctctgccacacggccaccgaagtccacgatgatctcctgcaacatctgtccctttgtgcggaacatttcatctttttccggaagcggcatggtataacccgctgctcctgcgcccgtcggaatgatagacacggtataaaccggtcccacatccggcagaaggtggaacagaatcgcatgacctgcttcgtggaacgctgtgatccgtttctctttttcggaaataacacggctcttcttctctgcaccgataccaactttgataaatgcgcgtttgatatcattctggcagatgtacatccgtttgtcctttgccgcgatgatagcagcctcatttaacaggttttccagatcagctccggtaaatcctgcggtagtctgtgcgatctgtttgagatccacatcatctgccagcggtttgtttttcgcatgtacattcagaatctgctcacgaccgcccacatccggacggccaacatatactttacggtcgaaacgtcccggacggagaagcgccggatccaggatatcgacacggtttgttgctgcgatcacgatgattccttcattgactccgaaaccatccatctcaaccagcatctggttcaaggtctgctcacgctcgtcatgtccaccgcccatgccggttccacgacggcgtcccactgcatcgatctcatcgataaatacgatacacggtgcatgtctttttgcctctgcgaacatatcacggacacgggaagcaccgacaccgacaaacatttccacaaaatcagaacctgagatagagaagaacggtacgcccgcttctccggctactgcctttgcgatcagagttttaccggtacccggaggtcccacaagaatgacacctttcgggatacgtgcaccaagttttgtatacttggcaggatctttcaggaaatcaaccattccttccagttcctctttttcctcactcaatccggctacatcactgaatttgacattgacattttcgcccatggtcatcttcgcacggctcttgccaaaattcatcattttggaattgctgccgccaccggactgtgcggacatgctcataataaagaagatcaggactcccgccatcagcaatgtaggaagaagctgaatccatacattttctcccggtacatccttcagcgtataatcctcaaaatttgcttttttgagcatgctttcaatctctttgacatcggaaacgctcatctgttcgcggcttccgtcatttaatacaatcgtcagattacccgtcggaacttcttcattctgacggatcacaatggatttaacctgatcactgtccagttcctgctgaaactctgtcatggtgcaggtatttgtgttcagaccgttactgccaaaggcacgccatacaaacacaatgatcaggaaaataaagacatatattccaaggcctctaaaattacgtttcaattttcaaagccctcctttttcatatttcaagagttattcctttccactttcaaaagcgggattctcatgtaaaacggacattctcaatccactttcactgcctgctcatgaacgcaatcattttgcaaccagcattcgcactgagattagtcgttctctaccacgcctacatacggcaggttacgatatttctgtgcataatccaggccatagcctacgacgaactcatccggaatctcatatccgatataatcaaccggtacttctaccacacgacggcttggtttgctcatcagtgtgcagagacgtacgctttttgctccacggctctttaaattttctaccagatagcttaaggtacgaccggaatcaatgatatcctccacgatcagtacattttctccttcgatggaatcatccagatctttgatgatacgcacgatgccggtagactctgttccgtcaccatagctggatacagacataaaatcaatgaaaaccggaacagtgatgcgttttgccagctcacacgcaaagaaacttgcaccttttaaaatgcagatgatctttaccggctcaccgttcatgtcagcactgatctgtgctcccagctctttgatcttgttgtttacttcttcttcggtaaacataacacgaatcttgtcactcatttttctcttttcctccatgtatacacacttcaaaaatgtgctttgtcttctgtgttaccttgtatgcttcactgatgcgctgaccgatcacccacaaaatatggcttccctctgccagcagcaacagctgatcccgttcctctttcggaatcttactgttgatcagataatctttcagtttcttgtggccccccgctgcctgcacctgcagatagtctcccggacggcgtgttcttatctgaacagtatctttgattttatcataatcaaaccatttcgtacatgttttttccggaatttgttgaaaatttccatcaaattccaggatttttgtcgtaatatgttccccggattctaaaatacattcccctggaatcacaagttcatgttcccttgtctttttctctgctttatttttagcactttgcttttttcgattgttccgatctgtctggtctgtttgttttttctgtccgaattccttctgcaacacaatctgctcataatccacatacgcacggattccataaggcagacatacgcttttacctacctgagcggtaaaaagtgtcttcacggattccatgtgagctgcggtcagatcttttttgctgcctgccagttcgccaagcagacggtggatcagatttttctgcaataccgttggcatggctaatatgccttgtctctgcaaacgaatttttacaattttatttttttccctttcatatgtgatatacgcactgcctgcgtcccacgccgcttcatccagatattcacagatttcttccagatagcccgcggtgcgcacgatatgcggcacagcggcagtattcacctcacaaagctgcggcaatacctgactgcggatccggttgcggctcatagtcacatccgcattcgtgctgtccgtccgatattcctgcccgatctgttccagatacgcctcaatctctgcctttgtcacgcagagcagcggacggatcagcgtcagcttctgttccggcagttcccgcaccggaacaatgccgcacaggcctctgagccccgttccgcggctcagatgaaacagtaccgtctcggcacagtcatcaccatggtgtgccactgccagacggtttgccccgcattttcggcaagcctcataaaaacagcgataacgcagctcccgcgccgcttcctccagcgactgatgctgcgtttttgcctggtggagcgcatccaccgaaaatgtgtgcagcggcacgttccagtctgcgcaaagctgcctgacaaatgccgcgtctgcaagactttccgcgccgcggatgccgtgctccacatgcaccgctgtcaggcgaaaatgcatgcattttcgcagttcgcacagcagatgcagcaggcagacggagtctgcgcccccggatacccctactgccacatgatcgttttcttctatcatatgatattgtctgataaatatttgtattttcttttgcatcttcttccttccgtctatcgctccagattccagctgtcggtatcttcttcccatctaccgctcccagattccagctgtcagcatctttttcgacctatcgctcccatatcccggctgtcaggatcgtcatgtcatcccgcacacgaccaccggtaaaaagcagcacctggtctaatacctctctggcaaactgcgccggattgttggttgtgaccgcgcgaatgatctcctgcatcgtctgatttgcattctccacatggagatgttctaacacgccatccgtcaccatcaccacaaaatcactgttttccagtttctgtgtgatcttcggcactttctgtccggcaaacacccccaccggcagactgctctgttccaccacgcgcacttcgtcaccatggcggataaacgtcaccgccgcaccgatcttgtaaaattctgcaataccgctgtccaattccagccgcatcagatccactgtggaaaacagattattttccccgtgtgtcaccatggcagaattcatcatgcgaagggcagtatccggcaaaaatccggcttccataaatttctctattaaatctatcaccatttcgctctctttacaagctgcataaccgcttcccatgccgtcggacacactcataatacagcttccgttatccagcatctgaaaagaaaaattatccccggatacctgctcatcatcccggatggcttttgccacaccgtaatacgccgtcagacggcagctttcacagaaaagcagcgacatgctttttgctcccagaagcgccttactgtccttcaccggtttaaaacttctgccactcacactgctgattatttttgccatttctttcacagatatacattttgtgccacgggtttttccctgaaaataaatctgccactttccatgactgttttccagaatccgaagctgctccaccgtgatcccccgctctttccacgcgtaacgcatggtagctgccagttttccctcccgtgcggtcacgtcctgttcctcattggcacagtcctccataatgtacgccatggcatccagctgctgcgcgatcacatcccggttttcctgcagacggttgtaccacgccatgttcagatgcgccttttcaaacacaagcatgatctgttcgatcatctcatccttgtacgggcaatactgctccagttcctgtgcactctcattgacatctgccccgcgctgcaatgcctgcaaaaagcggtacagcacctgatacatcggtgtcgtattttcttcccaacagattgcacactgattgcaggacgcacagattcttccggtgacctccgtctgcatccgtccaagctcctccgcggtaaaatcttccttatagcggttcatctgtcgaaacgtcttcgataatttttcaaaagattccgcatactcattcaaccgctgtccgcccgggacgtacaccggcagttctcctgctgaacgtggctcccactccggaatcagtgacagcagttttgtcaccacatagataaatccgcatactaagattccctcacatattcggataaaaaccgccgacgtccccggcagtttcatactgctccatccgatgccaacagccacagtgatccctgctgtgaggatcgctgccggaaccgtcctgcaatgtccgctgtaccattccacaccacggatcagcaccgtactcaacagcacgatcagaccgtatttgaccagcaccgtcaccggtgccagaatgatcagccctcccatggtgcacaaaaacagcagactgcggttgacgccacttaagaatccagtcataaaaatcgccggaatcagcgggtaaacgcctgccagttcaaactgggacgataccagcgtggcaatgcacaaaagtaattgtttcagatcgaatcgtttcatatttttccctccctgataatcaagcagatgttcaccatccgctcatactacctgctcataacccaatttcagccatgcagcttatttggttaaatccgctcagggaatcattctagtccgattcttataaaatctttgtcaaacccttgtccggttttgcaaaagttttcggcaaaatctgttcacggaaaggattttgaatcgaatcgaagggtttgaacctgtttatgaagttaaaaaaaccatgaatcctgaaatcactcaaaattcatggtcttgcttatttctctttaaaaacaatctcatctggataggtcatgcccagttttgatttggcagtatcaataatgtactgttcggaaccgacgtaagcttccttctgtttcagttcttctgcccgatccttctctgcctgtaactgttctttcttggtcttctcttcctgtttgtacccttcattcactccgtataaatgtacgatctgtacggacatgatcaaggtcagcacaactaccacgcaggaaacgcagattttacctgttctattctgttttttctttttctgcttcattttacgcatacgacttttcaccctctgttattcatatcctgcgtctacagtttacacaaacccattttaactgttttgtatagttttttcaattgtttttttacatatctactgctttttttacccgtcctgcaagtgcgttggatacatttacccaaaggcttcaacagaaactgtaatatcttcacaatgcccatgataactgcccggatcacacgtaaaatcagacggaaaaagaaacttccaaaacgtaccacaaaccggctgaggctcacgttgtacaggatcatgccaagcagcacgcccatgatcacaaaccagcgtagcttcccatcattttcctcatacatgagctgaaacagcacaaaggcactgatcagccagaaaaacatatcctccacagcgatccacacggttccatgaggaacccctctgcgaaagatccgtagcagatcgtaacagaagatcaatgccacgccaaacgccattgcatgcaaaaacagactgccctgctgcatgatccccggacttaccatctacttgaacagccgccccagaagcgactccccctgtgatgcttttcccttgtttacatccgaatactgaatggaatcaatttttcccgacagatccacttcacctttttccagcgtcagacggttcacatgaaggtccatgcccctgatcatcaacatccccatttctgtctccagtaaaatctcatttacatcaaaggataagatatccgatatgccattcaacgcacaggttccgcggtttgtcaggattatcttgtgttgtctggatgcctgtctctcttccataaaaaaacctcccttactgtttccagtatatgggaggtcgtctgtatttatgactgatacatgcatccttcctgatggtttctacaaatgcatttactttccaccatcgggaattgtttctacaggtatttgaacatctcttttgcttcttccttacgggaagtatctgctacctgaagcacctgtgcacgtacggatttgtttccaaaggcaatttcgatcacatcgcccactttgacatccagagaagcctttgccacacgaccgtttaccatgacacgtcctgcgtcgcaggcttcatttgccacggtgcggcgtttgatcagtctggatacttttaaatatttgtctaatctcataatctgctccaattcgacttgttcagaccaatggtttacttccatttttgatctgatgataaaagggggcatgtcccataacggaatgcccccaatgatctgctttttatttcgtaaatttttatttgtacttcgtcagacgaattatgcgtttacgatatcttttaatgctttaccagctttgaatttcggagatttggaagccgggatttccatatcagcacctgtctgtgggtttcttcctgttcttgctgcacgctcagctacttcgaaagtaccgaaacctactaactgaattttgtcaccgttttttaaagtatctgcaacgatgtctgtgaatgctgctaatgctttctctgcgtcttttttggaaagttctgctttctcagcgatagctgctactaattctgtcttgttcattataattgtcctcctatagaacgaaacgtgttctcttttttattatatagactatttatacttgttttccctgtatttgtcaaggaaaaccacgttttcagcggttttccagacagttttcaacataaaaacagtctgttttcttctagccaagcattggctcaacaattgccataacagcggcaccaagttctgctgctttggcatctgctgcttccatggtatctgctttcacaccatagtagaatttcagttttggctctgtacctgacggacggaagcatacccatgctgcatccagaagttcgtaatacagaacattggaattcggcagacctgtcggtgttacctcaccggttgccagatctgtaacggtatctttcttgtaatctcttgctttcagcactttgtactcaccgatctgtgccggtgtattgtcacgcagtgttgtcatgatctcctggatctttgcaagaccttcgataccttttaatgtgatcgctttaacatcgtctttgtaatagccgtatttctcatagagatccagcattgcatcccacagagtcttgccctgtgtcttgtagtatgcagctgcctcacacagtgccatagatgcaacaacagcatctttatcacggcagtatgtacccggaaggcatccgtagctttcctccataccaaagaggtatgtgccgtttccttttgtctcaaactcaagcatcttctgtccgataaatttgaaaccggtcagaacttcatacagttttacaccataatctgctgcgatagcatctgcaaggtttgtagaaacaatagattttacaaaggctccgtctgccggaagtccgtatttttcttttctctgactgatctcataagcaccgatcaggcatccggacatatttccggtcagggaatgatattcgcctgttttgctgtcttttacataaacgccaagacggtctgcatccggatcagttgccagtaccagatctgcatccagctcttttgccatgccaagtccaagagtaaatgcctcagcagcttccgggttcggatagcttacagtcgggaattcaccatccggaagttcctgctccggaactacataaacgtgtttgaaaccaagctcttttaatacacggcgaaccgggatatttcctgtaccgtgaagtggtgtgtatacaattttcagatcatctgcaacggcattgatggcatcctgattcagaaccagttttttcagttctgcgatatacggatcatcaatatttgcgccgatcacttcatacagacctgctgcaacggcgtcctctttggacattgtcttggtagttgcataatctgtcacagcttttacctctgccatgattccgctgtcatgcggcggtgtgatctgtgcgccatcctcccagtatactttgtatccgttgtattccggtggattgtggcttgctgttacgttgatacctgcggtacatccaagataacgtactgcgtaggacagctccggtgtcgggcggagactctcaaaaatatatgccttaatgccatttgctgccagacataatgctgcttcatttgcaaattccggagacattcttctggaatcataagcaattgcaacaccttttgcctgagcccctactttaatgatgtagttggaaagtccctgtgtagccttacgaacggtataaacgttcatacggttcgttccggcaccgatgacacctctcaaacctgctgtaccaaactcaagatccatgtaaaaacggtcttctatctctttttcatcatttgcaatgttacgcaattcctgcttggtatcctcatcaaaataaggattgtttaaccaggattcatatgcttctctgtaacccatgacattaacctcctgtgttcacttcaatcatgtgagcatattttgctcatacacgtttattatagcataacggtgagtaattggaaactaattttttgtagttcgcgcatcatatccgtgcagatatcgctcatatctgcacataaaactgctctcttataattcctgtctcaacaccgcaagaaattctcctcttgcctggttctgccggatctctttctgcaatttttcgtaatttttgccggaatcccacactttccgcgtgcggtaatactgattggcaattttccagaatttctccggataggacaaccggtaataaagaccttgcaaatcctgcgccgtcagctcctgtttcctgcggtatccctccagaagctccatgccaagccgcacattccagttatttttctccatgatcttgcgcataaaattccccagatccgaaatctgaagtccgactccggcatgctccagatgaatcagtgccgctccatccggcgtaaataaaatattatgctgattcacttccccatggcagattcccaccgtgtatccgccatccttttcgggatctttttccagaaaatccaccacagtttctgactgctgataaaattgatcaaagaactgtaaaaacaaccgttcaaaatcacttttattattccgctttaatatgtacttgcggatatgccgcagatcccggtcgtgtttgcggtattccacacaaagtcctccgttactgtctgcctccgcattttccgtatttttctgctccgatacatttttttgttctgacacacggacaaattcttccccacagcagcttcggtgaaactgcgccagaaacgaaactgccagcagcagatcgactctgttatttacttcacattcccgcccgcgcatccagcggtgaaatgtataaaaaacatgatccacaccttctgtgagcagcgcaccttctttatttttcagcatcgcatcacagcgaatcccttgctgctccaggcagatccccagccagtacaaaaattctgctttctgtaaagagccggtatattccttcagcgcgaacagattctgttttgattcacagatcagaatcccccgtcccttgtaaaatttttcaatctccggttcctgtttttccagaacctgttccacctgataatacacaaaaacacccctttatatgattaatgtacaattgatttccgttttgcactcttttaatcatatgaagaggtgtgttaaattatgccttggtgatgaagtcctttatttcttattgtttcatgtaaaaatcactttatctaaggaacacaagggacttacttatttgagttaaagtaccagtccagtaacgcttctttctcattcagcttcggatcttccagaacctgttccagcatcgcatgcaggattacaccaatctctttgcccggttgaatccctcttgcgatcaggtcggaaccgtttactgccagatcctttaaggacaggcactgatgtttttctatgatctggcgatacatatgttcatagcgatccacgtaaagcagtttttcctgctgtaaaaagctgctctgcgccagaatatctgcccgttttacctcaaaaagctccggatactgctccgttccgttgcggaagattgcccggcggactgcccgtcctttcaatggcggacgatcgtcatgtgcccgaatcagtgcggttacttttcggatcgtatcgttgtcaaatttcagtctgcgcagaattttacgcgccatttctgctccaacttccggatgaccgtgaaaatgatggattccgttttcatcctctgtgcgacagaccggttttgccacatcatggaatagcatagtcagacgcagcactctgtctgcccggatttcctgcatggagcgaattgtatgcactcccaccgtataaatgtgatgtgggttatgctgttccgtttccatcatggtacaaaattccggcaggatcacagcagcaattccggtatcatagatagttttcatctcctccggatgatcggatgtcaccagtttcaccagttccacctgaatccgctctgcactgatttttgacaggttttccgccatatcacagattgcctgacgggtggcatcttcaatagtaaatccaagctgtgccgcaaaacgaaccgcacgcatcatgcgcagggcgtcttcggtaaaacgctccgtcggctctcctacacagcggatacgcttcgcctttaagtctgcgataccgtcaaaagcatccaccagaccggtttcatcattataagccatagcattaatggtaaaatcccggcgttttaaatcttccagcagatttgacgtaaagatcacgtccttgggatgacgggcatcctcatattcgccgtcaatccggtaagtagtgacctcaaatccttccttatccatcagcactgttacggttccgtgctgaatcccggtatccaccgtccgtggaaaaattgctttcacctgctgcggtttggcagacgtggtaatatcccagtctccaggggtgcgcccaaggatactgtcacggatacaaccgcctaccgcataggcatcatagccatgtgctttcagctcaccaatgacggtttttactttttccggtaactcgatcttcatacgcaccctcctgaacttttattttctcatgctgatttttattttaacagaaaaacgtctctgcgtttttcccgccagatttgagtcacaaaatgacatcttcctctgcaaatctgtgcgatctcctatactgaggatcagctgtttttgctgattcctagtatgccttaccccagtaaaccagttttttcgctggttttccacagcatacgcatacatcagaaatatgctcctgatcgttaaacggcatacatctggatgttgctgctgtctcttctttaatcttgtcctcgcatgcacggtctccacaccacataccacggatgaatcccggtttattttctactgcgtcacagaactcgtcatagttgtgagcatctgtaatatgtgcatcacgatgtgcttttgcacgctcgaacatgtctttctgaatggtctctaataactcaggaactacattctctacttcatccagagaaacaactgttttttcacgggtatcacgacgaaccagtacacactgattgttctcaatatctttcggtcctaactctacacggatcggaataccacgcatctcctgctcagagaatttccatcccggactcttatcagaatcatctaattttgcacggcatactttgcccaaacgttcctgaatctcctgtgctttctccagaacaccttcttttctctgctggattgggattaccataacctgtgtcggtgcaatgtgcggcggcagaaccagtccggaatcatcgccgtgaaccatgataatggcaccgatcagacgtgtggtcatgccccaggatgtctgatgtacatactgtaatttgttctctttgtctgtatactggatgccgaatgcttttgcaaatccatcgccaaagttatgacttgtaccggactgcagtgcttttccatcatgcatcagtgcctcgatggtgtaagtagcctcagctcctgcaaatttctctttctctgtcttctgtccgcggatgactggcatagccagtacttcctcacagaaatctgcataaaggttcagcatctgtactgtacgtgcctcagcttcttcagcagttgcgtgagcggtatgaccttcctgccataagaactctctggaacgaaggaacggacgtgtttctttctcccatcttacaacggaacaccactgattgtatacctttggcagatcgcggtaagactggatatcatttttataaaaatcacagaataatgtctccgatgtcggacgtacgcagagacgctcctgcagcgggtttaatccaccgtgtgttacccatgcaacttccggtgcaaatccttccacgtgatccttctctacatttaagaggctttccggaataaacattggcatgtatacattctctacaccggtctctttaaaacgacggtcaagctctttctgaatgttctcccagatcgcataacctgccggtttgatgaccatgcatcctctgacgctggaataatcggttaatcctgctttttttactacatctgtgtaccactgtgcaaaatccacatccatagatgtaatggcttctactaattttttgtcctttgccatgactgtatctcctttacacttatttaagatagaaaaagccggaaatccaatccctcatagggaccggaattccggcggtaccaccctgcttatatgcattatgctgcatatccactcaataccgttaacgccggttctacgccatactcatcgcatggggctcagggctcggttccaaatgttccaaacaaggatgtcgcagcatacatgcatcacatgtacatcctctctctgtagaatttcccacctgtactatttcccgtcacagctgatttcttattatatgtcttttctaattgaaaaactgtaatcaaccgttattctaagcgaatctgacgggaatgtcaagagagtgtttcgcgcttcagcgtatgcgctgcctcagaaaccgttctttcctatctgcctgttcttcttttctgaccgtaaacagtcactcctgcagcggttcctcccactgcaaagagaataaaccataccagcatacgattatcatctgctgtctttggagatttcttctttgtagtttctgccttatttgccgcttttgtatccgttgtcggtgtagtctttgtatcattaccgttggatccggtcggtttgttgttatctgtgtctccggtagcaggtgtaggatttttcttatcatcggaattactatcctgctttttgtctgtcagttttgcaacgaccgtctgttctttcgtaacctccacaaaaccattctgttcgatataatatttaccacagtcttcacaataccagtattctacatttccttctgcggtcttggtagctgcttttgcttcgacaaatttcaaaccttcatgaacactcatattgtatacaccatactgttcaccacagatcacgcactctgctttcttcacgcaggtcgcacttcctccggtatgtttacactgataatcacaaactttgcatgcaccatcttcccagtcatgcgcttcgcttgcagatacctgtgcgtcacagcaatcatatacctgtctgtgatctgattcggtctgtacccatactacttttccactatgtttggaaggatcttttgcagtatactccttgccacagttttcacagatagctccgctggtacaggttgcctctccgccgctatgtacacatacatatccacaggtctcacaaacgccatctttccatttgtgattttcttttgctactgtcactttgccacagcaatcatatttcttctcatgggttgttgctgtctgtgcccagttttccattccggtatgatgatccgcatctacttctccatacggaagtttacagattatacaaattgctttctcggtacaggtcgctgttcctccggtatgattacatccatatccacaggtactgcaatgaccattttcccaaatatgattctcagctgcagaaacttctgcgccacagcagttatatttttcctgatgtgttgtctctgtctgtacccattcaacacttccgctgtgatttgtcggattcagatcaccatactctttctggcattcggtacaaactgctttctttgtacagcttgcttctccaccggtacaatttttggtttcctcttttgtacaaccctgtgcggtacacttgcgtgtatgtgtgccgtcaccattggactgccactcgccataggtatgctctgcttttgcttctgtaatgatctgaccacaatccttacaggttacagctgtcgtacagtcaccattgtctgttccgctgtgttttgtctttgtacttgttgctttacatccctcattttcgcaaactttccaatgataggtggcatcttttaaccacgtatcaccgaacttatgacttgcctgtgccgggaatgtcttatgacaaacagaacaggtagattcttttgtacaattgctgctgtccgttgtgtgatttttatttaccgtaatagtcagataaatactatatccgtctttgtctgacagcgcaattttctgtacaccatctgctgctgaaacagtatagtaaccgtcttcacctgcggtcagttttttgccatcaactgtcacttcagtataagcagcagaggttactttaaattttgcattttcacagtaagtaccattatttttgatgccgtctaccacagtattcgcatctattgtgctgtaataataagtgactgtctgggttcctgctgtatacttacctttttcactgccttctttgcttaaaagtgtatatccggacggaatctttatatttgcaggtactttataaccggtgcccggtgtaccctgaagtgtaattgcctcacgtaatggctgcttgctgtctttcaataaatactgaacaactacttttcctcttgtcgtagatacagctgatcctgtaaaacttgctttatctacaaggatcattgtggtatatgccggtacatttacagtagctccggaaatctctccaagagataccacacctgcactttcgccatttgcaataattacccattcagaatctgcatctgcgttcggaatagtaatctgtttggcagcatctgtctcgttatttaatactgccatgctattccattcaccggcagcttttgttgtatttgtcaatacatatgcctctttggaagctatatcctgactcctggcaagcggtgagaatgcttttcgaatatccatcagacctctgtaataagatactacatcggcaaattctgcggaatcctgccattcaaccagattactgtctttcagtgatgttccattgacactgttacacatttcttctccggcatccatatataaggttcccggtgttgcatatttcattgctgctgtctgtttataaatttttactgctttttcgtttctttctccataatcactgccaccgatattgttgatgatcgtatcatagagagaagttttgttctggcgatcggctttttgatagtcgtcaccccagatcaccagattggaatctttcttcgccagtcctgtttttatttctgataaccagtcgttttctcttgtgctgtttctatcccttcttgtattaacgttactgatcagatcaatagaaaatccatctacatgatattcttttgcccagtatgccatggaatccacaatataattccgatacatcgcacgctctgtcgcacattcattatcataatccgtagttgtataataggtataaccatttgcactatctcgccataccattctataaaaatatcccggaactgttttctccaatacagaatctttcggagaaaccgtatgcgtatatggcatttccatcacaacagaaataccggctttgtgcagtgcctgaatcatttctttgcattcttttataacagtcttgctgtctgactttttcgaagcataagaactttccggaacattaaagttctgaatatcatactccccgtattcgtcagtggaagcaaaatctgcaaacggtgcaagctgtacggttgtaacacccagttcttttagataatcaataccggacaccagttcacccgcactgtttaccgttgcacccgtttctgtaaatgcactgtattttccgccgcctgttgtaccggaagccggatctgcggaaaaattcttcacacttactttataaaccgtgtttgcctttgctgtatctacatacacatgtctgtcattgctccaaccatccggagatacggtagacggatctataatataagacctctttccgtcttcactggcagcaacaccatatggatctgctgtctgatatttattaaaagttgatccactaacgtttccatttacatccacataacgaatatcttttgcatttgtaattgtatagtcataataatagtcatcccatctgcctacaagtgttatttcccatgcaccggtccatcttccatttctaagcagtttttccaacacatatgtgcctactttaaatgcattttcatcttcattacttccagttgtatagatattaacttttacatctgttgcaaccggagcccacactacaaactctgtagatgttttttcgtatgttacaccaagtttttttccgtatgcatcttcatcatagaaaaacagctcatcaattgttgtattcgctgcttcatcgaagtaattatttaccctgtaggacgatgcccttccgtctacaacactgccggaaaataccattcccactgccagcgccactgccataatcttttttaaatatttcataagctctccttcctcttgtcgtactttatccgcaatatttcagaaatattacaaaaagcattacattctgtcactattctacaacaaaatgtacaaaaaaaaaatgccatttgcatgaaatgacatttttacgacatgaacgatatatttttcttatttttttctcctgaaactgctcatttttttgatgatcgcaacgattccgacaccgatgatccagataattcccatcaggaaaaggaatactgcaagtaccgttcccccatctgatcccatcagtggagcataaaaatctcccatcagtatgacaaactgagaaatcatcaacaataacgcaaccatcgcctgtgcaaacagtccggaatgattcttatacaactgacgatataaaataaacatcaatgcaatcacgatcactacaacaaacagaaatccaaacaaatttcctgcaccggttcccggttttgctgatcgtgtacctgcgcggataccggcgattgctgccaccggcagaaccccctgccagaatccagctctctttttcttcatcccacgtttatcatccagtacataatagagttttgccgcttcctcgtacatatccgccgggttcagtccacggaaacgataatactcaataatatgatcatagatcattggtttgagatgactatctgtcagcatatctgcaaaatatgccataaacgccggttgctttaatgcggtctgatattccggtttctggaaaaactgttgaaacagctttaatttgtggcaatatggtggttttagcaacatttccatctcaaccagggctttctgaatcagcaggatcaggcgttgctcatccttccgctcattttcctcaattacttcgtcaaaatcatactgtggcgcaggatcctgctgtgcagattcactctgagattcccatacagtctgattttctgcatttttctccgcataatcttctatgccataatcttctgtcacttcctgatattcaccctgcgcttctgcttctgtgctatctgtacttttctctgaagtattcgtattctgttctgtaccttctaattcttcctctgaaaatgtaccctgatgattgcttttgggtgttactttctctgctgcttctccaacagatgcattttctgcttccatcgttttgggttcctgctccggatttcgtcgttcacttctctgtccacggctccgtctgcgcagcgtcatatatgcctcatggatctgctgaaattcatccggatgctcctctgggtgatactttttggataaagctgcataggcttcctttatctcctcctgtgaacttccccgtttgatatgtaaaatctcatacgcttctgattcatacatctgactgtctcctccaaaagtgtctgtgttttcttgttctttctgatctgtttatcgtaattgacgctttctatctctggtctgacgattccaattcgtttatctaaaacagattacgtttcgccatcgtcatcatcgctccactcagggaaatccagttttccctcaaatggatcataatgctccaatgacgcaatcatatgttctaaaaattcccgatatttccgaatcctgcgcggatcctgttctgccaaagtactttcaaaattccggatatgatacatcaacctgtctctggtttcaggtaacgcttcttcataaagtgcctgcaaacgctccagaatcagttgattctctgtcatatcttttggatgtactttcagtttttcaagctgcttcatccgtttggcaatctctttttcatccatgttctgagacagcacttttttcacactttttcctgtggatacaaccgttacttccacttccagtattccgttaatatcgtaagtgaagcggacatcaaccgactccatacctttctttttcttcggaaccgcaactgtgaccacccccagctgcacattgtcctccgcatatggttcttctccctgcaaaatttcaattttcacttcgctctgataatcagcagcagtagaaaaaccgcgtattttggaacatggcaaaatagaattacgctcaatgatcgcactcatatatggatgtttcggatctgcttcattattcaccccggtacctaacgtaaacgggcagatatccgtcagaatataatccctcacttcatccttacgctccatgacaccgcacaccagtccaagtccccgggcaatcagctgatcactgaaaccagttaccagaggtgtctgatcaaaaagctgctccatgtaagactgtaccagcggcatctttccggaaccgcctgccagaatcacggcatcgatatcttccacttccacacgactgtccctcagggcacgccgaagcaccgtctggatccgcttccagacggcagaactttcccgcatcatccgctcgtttgtatacacgctctgatatgtctgtccgccaagcaccgcagtcattttcacttccttctccgtggataaggcgattttgcatttttccgcctgacggagcaggatcgcgtactccttttcacttaagtttccccgctgaagctgatgttctctcaggaaaccttctgcaacggcttcgttgaaatcatcgccacccagatgattgtccccggaaactgccagaatatctaccatagtatcaaagcagtctacaatagaaacatccagtgtaccgcctccgaagtcaaacaccagaaaaagctgctcattttgtgtatcaaaataagaagccaatgctgccgcactcggctcatttacaattctttttacattgacaccggccaacgcacccgcacgtttcgttgccacacgctgtttatcgtgaaaatatgccggaaccgatatgatcacgtccttgatttcttcgcccatgtattctttcgcatcctccacgatagcactgacaagaaatccggacaattcctccggcaaaaatgttttcccgccaaggttgtatttctgatcgcttcccatattctttttgaaagaaaatgcagtatccttcggatgtgtgatcagacgttcctttgcaatctgccccgtcacaacactgccatcctctgtcacgctgaccacgctgggcgtcagaaatgatccaaaacggtttggaatcagttctactttcccgttgcggtatactgctccaagagaattcgttgtccctaaatcaattcctaaaatcgccatttttcttcccgtccctttaacctgttagtctttttaacccggttactgtccatcaggatcagatcaaaactgtttcccgacatctgctgccacaatttgcagactgatatttcccatttctactgttcccctttaaactgcatcatctatctgataaagtttgtcttataatcacgttcggtctgcggtaacgccacacctgctgcctttcctgcttcaaaacatttcagcatccatgccatatttcttgcaagatttcgcatggtctgcagaccttctgcatcttcttctgcttctcccggaactgctccatgaacctgattccagtatgtagaaccgaccaccggcatctgacagattccaaaatacttgttcattgcatcaaaagatgctgtcgtaccgccacgacgtgctaccgctacggatgctcccggtttaaacgcaaaggatgctccactgctgtaaaatgcgcggtccagaaatgccatgatccgtccacttggatgtgcatagtatactggcgttccaaatacaaaaccgtctgcttcttttgcttttgcagtaaactcatttactttatcatcgtcaaaaacgcatcctttttctgaacattggccacatcccaaacagtcacgcaccggctctccaccgatctgaaaaatctcatattcaatgccttctttttccagctgttttcctacttctaataaagatctgtatgtatttccattggcttttgcactgccatttaacattaaaactttcatgttctgctcctcctgtaaaatattctgtttttacttatcttttgcttatataaatactataaatattgttttcaaaaagtaccactatcatggttgtttttgcattcatctgcttccctttatttgtttgcatgatttatgcacatcttataacataataccgatattcctgttatttttcaactaatcccggggattttaacataaaacctccgggattattattgatattattgaatcattaaaaaatgttgaacacttaattatcttgcatacaacctgaaattttaagaatcaactctgtctactgcaatatgcttaactgatctgccagcgcacatggcttccgttttcgtccttacttacgataagctgatcgtcaatctcctgctttaactccgtcacatgggaaatgataccgatgagtttgcttccgcctgccatctcctgcagcacacgcactgcctgatttctggaattttcatccagagaaccaaatccctcatcgataaacatcacgtccagatgaattgccgcggaactttcctgaatctgatccgccataccaagtgccagtgacaatgccgccataaaggactctccaccggataaggtacgcacttcccgcacttttccggtaacagcagaatacaccatcaggtcaagaccatggtttctgccttcaccggctttttccagatcatacatccgcagttcaaactgtcccgcagacatttccaggaaacgccggtttgccgcatacagaattttctccagatactgccgctgcacaaaggtttccagatccatacgggaaccgctgacattgcctgccagacggttgtacagttcattgatccgctgatgctgcgccagaatctgcgcacggttttccatttttggcttcaaaatatcataagctgcacagtcagtccgtgtatactgattccattgctcctgttcgtttctcaggttctgcaactgattttcagcttcttcacgcttctgcatgattgcttccagatccggttttggctgctctccgatctgctcttttgcagaagtgtagatgccctgcgcccgcgccagtttttctttgtagacattgatttcctgctgaaacatttctgcgtcttttgcagtatacttctgtgtcagttcctgccatttttcttccgtcagatcacgttccgtcaacaatgccttgtattccgtctggcgctgcctccgcgcttccaccagcttcgggagttcctcccgatagcggtgttccagcacctgcaccttatccagcgtctgtcgcgcctgctccgtcagcttcgctgccttcgcataggcttcatccgcttgcatcttggctccatttacgctttctaactcacgctctgcctcttcttttgatgcaaaggtaagcaaaccggtgagattttttaataccgcacggctgctctcaagctctgtctgtacgctctgctgatgtacctttgctttctgtaatgcttcttccagctgcactttttcagcttctgcattctgtaactgattttgcaccttttccagcagtttcacatctgccagcagttcttttccttctaattccagttctttctgactggcatctacgaccgcctctaccagggcaagttccatcatttccggaatttcttgcaagctgtcctgcatatgtccgaacaacttttcaaccgcattttttgcaatcagttctttttcctctgccagcgcgcctgctgcatgtgccctcagtgcacatgtctcctgctctgcccgcagtttctcaatttccagactcatctcatccagtttttcccgggtgatctcgctgtgttcctctgcaagttcgcagggagctggatgctccacggaaccgcacaccgggcatggctgccccggctttaactgttcctttgcgagcagtcccgcctgcatgttaaaaaagatctgacgtatggtttcgtatctgccgtgtgcttcctgatagttcttgcttgcatccgaaaattctttctgctcagcttctacgattttcttctgctttgtcgattccacatgcagtttctttgcctcctgcacttcctctgctaatgcttctgcttcttttttctgattttcccagtaagccagcttcgtcggcgcatcttttttagcttcctcctgcgctttccactgctgaatctgtgactctaattgtttctgcttttcttctgcctgttttgcttcctgttctgctgacttctgctccgcttcttttttctgtatctgcgctgtcacatctgcaatcttccggaaagtttccaatgcctgattgacgcgctctgccacacggttgtatgccgcattctgcttctgctgttccgctccggctgttttttcctgttcggctgcttcctgtacatttttcaataattctggctgctgctgttcacaattttgcagttctttttcggtgttttcaattaattgcatgctatcctgcaaacgtttaaaaccactctgaatctcataagcactgcgaatctgtccggtcaacagttcctgtttttgcatctgctctgcctccgctttgcattcgtccagaacagtctttgcctgctccagctgctgatacacctgtaaaagctgttctgctttggcaaacttctcctgcgcctggtttcgttcctgctctgccgcctgcaactgcgccttgatctcctgctgcttttcctgcaaatatgcgcacaactgctccagttcttccagcagctgctccatatcggtcacaagaaactgttccgaacggatcactttttctttgatttcctgcacgatgtccgcacgctcatactgttccggaatttcgatatgcccggcttccgtctggcactcggtacggatcacggcgatttcctgctgtttttccttgcggcgttgtccaagttcctccacaattttctgatacggctccgtgttgaacagttttcggaaaatcacttttttctcatcggattttgcccgcagcaattccataaattccccttgggcgatcatagcaacctgcataaactgtcccttggtcagtcccagaatctccaccagtttctcatccgtttccttcttattctgggaaaattctgtctgatccggtaaaatcagtgaaacggtctctttttcttctttcgttccggttccacgtttcaacggacggatatgccgcggggttcttctcaccgtataaacctgtcggctggcgccatccccttcggaaaatgtcaactccacgaaaggatctaactccggctttgcatactgactctgcaattcgtttccgctttttttatttgtgccggaacttgcttccccatacagggcaaacacaatcgcatcaaaaattgttgttttacccgcacctgtatcgcccgtgatcagaaataaattctgctccggcttttcaaaatcaatggttcccggttttacataggagccaaacgcctgcatcgttaatttcaatggtttcattctgccgcacctcccgtaaacaccgtgttcaccacatcctgtaaaatctctttttcctcatctgtagtatcacctaaaaatgaacaacaggtgtcaaatggatctattttttcctgcgctttccatgcctccgcatactcccgctgcgtcagcatttcccgacggatttctaataaatatggaaacgctgcacgaatccgatcctgcgtgtcaaaatccggttgatctgtcagtgttacagatacataatccacgcaggactgcgccagcacttcctctgtacttcctttcaaaaccttaatctcacgcaacggttttaacggaagcacccgtgtctgcacctcgccttttgctccaagttctacttcaatcacacctttttcctgtcctgcctcactgacggagcaagccaatggcgtaccgcaataacgataatattcacttcccactttcattggtttatgaatgtgtcccaatgcggcataatcaaacacctgcaatacttccgcagacacttcatcaatatttcccacagtgcggatctccgaatccatacgctcaatctcatctgcatcctttccaaccggcaaataaaactgatgactagcaaacacattccgctctgattcattgatatcttcccgcgcgatcaaacgtcggattgtctcattgtaagacaaattatttcccttttcatctgttcccgtaatctgttttaccatagatggtttgacaaatggcagtagataaaaatttaccggtccgtatgcatcctgcaatacaattttttccatccattcttccggacgaaccggaggcataccgatcatatgaagattctgccgcgccagcacatttcgatagcagtttacacggatggcactgtcatggtttccgctgatcatcatgatgaccagatccggcaatttttccgtcaattcagagataaatccatccaacacttccatagcttctgccgatggaaccgctttgtcataaatatctccggcgatcaccagtgcgtccggttgttcctgcaccgcaagctccgtgatctgatgcaaaatatattcctgatcttcccgcagatcacggttgatcagttttaatccgatgtgaaggtctgataaatgaaaaaacttcatatgatgcctgtcctttctgaattgcaatttttcccatactacatgtgcagcctttccgactgcgcgtttgtattccattataccaaacatacgttttgcgggcaataaaatcattgtctttcacccatatcattacatcaataaatctgcctttctgtaatagctgcttaacaaaacaatttgcaaataaaaaagtgtcttcgacactt

SEQ ID NO: 13164 - DNA, 7944 bp, Unknown
  gut microbiota DNA sequence
gcgcagttgaagtatgtcatgcaattgcatgacgcgcacctcgcaacaagaatgccggagcattcttgaatccattcatccgcgccactcgtagccaaaactggcatggtcaaaaatgccaaaactggaagtgttaaatataccaatgtggggttaagatagacaccaagttaatcatcggtgaaaacattataatcaaacaaagcaaaatttattagaaaaacataaagaacgaagaggtgtttcttatggataaccactataaccattttaagaaaatagatgcacattcccacattggaaaattcggaagtccgtttaacattgattttgacctcagccgtctgacagaacagatggaggagtacaatattgaaaaaacgattctttgtccggcaggatgtcatctgaataaggaactgaaagaggcatatcaggcagcgccggacaagatcattccgctttgctgggtaaatgccaatgaagggcaggaagcatatgatatgctggagcattatctgcgggatgaaaattttgcaggggtaaaaatgcagccgctttttgatgcatttaccgcggattctccgatggtggatccgatcatggagattgcagaagcgtacaaaaagccggtatttatccactgtggacatccgccttattccctgccgtggcagatcggtctgctggcagagcgccatccgcatgtgccgaccgttatgatccatatgggacacggacatggtgtttatatcgaaggcagtctgaacatggcgtacaaatatgacaacctgtttctggaagtatccggaatgccgatgggatgtcagatcaaaaatgcttatgagaccgtgggaagcgagcgcgtcatgttcggtatcgattccccgttccatcatccgagtgtagagattcagcgtgtttattcctgtggattaaacgatgcacagctggaagatgtattttataacaatgcgaagaaattcatggaattaaagacaatctaatttatgctgtcagagttaatattaattacgagtaagcagtataatccgatttaaaatatgcgactgatgaatgtgactttattaagacgaattttatcagaaaaaatgacaaaaatgaaaaatggagagtttgagaggagtaaagaaaatggatgcacagacaaatgtaacaagcaccggacagaagatccggaccgttgatatcacggtgacagcagcaatggctgctctggtatttttgggaacttatatttttaaaatcccgaccatcagtggttatgtacacttgggagactgcatgatcctgctgaccgttgctttattcggtatgaaaaaaggtgccattgcaggtgccatcggcggcggattatctgattttattggcggatatttctactgggttgttccaacattgctgatcaaatgcatgtgggcaattgtaatgggactgattatgcacaaagtgttaaaagataaaaaaggatctttcctgatcggtgccattgcaggtggtgtgcttcacatcattgcgtacacactggtaagagttgtgctgtatggtggaaaaaccgccattatcgagattccggcactggcattccagaccggcgcaggtatcgtgatcggatttgtgatctacatgcttttgaaaaaatcaggtgtagcaggtcgtctgtccggtatggtcaaataagaataagaaaaaatgttataaatgaaaaagaaccagggtgtcagggcaggataacctggttctttttataattgcgtttttatccttgcacagatacaattaaatcgctataattacaacatatgtgaaaggacaggaaacgcatgagaaatgaaattcagattgaattacagcctgttcagactaaacgggcgagcgaagaaatctataatcaaatcagacagttgattctggacggagaaatccatccgggtgagcggcttccatcggaacgaaaaatgatggaaatgatgcaccgaagccgtccgaccatacgtgaagcgatgcgtatgctggagcgggaaggatatataaaaatttattccggcagcagcggagccgttgtgcaggaattaaatgtagataatgccgtacagtctctggagaccatcattcagatgaagggcatgaccattgaagaaattctggaatttcgacgtctgacagagtgtgaagcggcacgtctggcagcgaaacgccgtaccgatgaggatctggagagaataaaaacaattcttcagcgatcagaaagtacaattggaaatgcggaagaatttatggcgtgcgatatggagtttcatgtagctgtggcggaggcttcccagaacagtatgtattccattatgctgcaggtgtgcaggaatgtgcttgaaaaatctctgacagagattctgaacagaggcaagaaaagcacacagaaggtgcggtatgagctgattttggatgtacatagaaagatttatatggcagtaaagaaccagaaggaagaggaagctgctaaatggatgacaacgcatctgatcgatgcagagagtgatattctggcaaaataatataagtatttgatgagaagactaggtattaagtatcgcatcatctcagtctgagatgaaaaagaaccagagtgtcagggcaggacaatctggttctttttaacgaggaagagaacagaatgaaaaaatcaatttatattattctatatgaggaagggtaattctaaaaaataaaaaggcaattgttaagttctaagtatattcctctgttctcccagctttcgctgatacttatattaatgcaaatatcatgccagtttttaaacagcgtaaaacgggcttttttcgtgatttcctaaaaagaaacaggtatttttgcaaaaagaaacaggatattttgcaaatgcaggttgaacgtacgtgagcccgtgttctgcacaacaggagacgatggatctttttcggacacaccgtctcctgtttgttaaaaagcattcttgaacgtttgagaaatataaataggtaacttatttcttcaaagataatccatgttgttttaattttcgtgaaaccgtggaaatatccacatccagaatctcactggcttctttcagattcttaacatccttgatggcaagggttaaaaattctttttcgtaagaagaaaccgcttcggataaggtcatatttttcttgacttccatataggaatctatgccctccagatcaaagatactgtacaggaaagagttgtccagatgatccatatcggaggcgcataccaccaaatattccatgatatttcgaagttcacggatgttgcccggccagctgtagccgatcaaggcatctttattttcttcggataatacaaggtgtttgtcgtatttctcattgaagatatttatgtagtgctcacacaaaagcgcaatatcgtctttacgttctctcaatggtggaacattgatcggaataacgtgaagacggtaatacagatcgcttcggaatgttccttccgcaatctttgctttcagattgcagttggtagaagcgataagccggatatccagagggatcggtttggtaccgcctacgcgggtgatctcattgctctggatggcacgcagcagttttgcctgcagctccatcggcatatcgccaatctcatccagcagaagcgtacctttgttggctgcttcaaacagaccttttttaccctgtgcatttgcacctgaaaaagcacctttttcataaccgaacagttcggattccagaagctgtgccggaatggaagaacagttgatcttgataaaaggcatgttatttcgtttgcttgcggtatagattgcatcggcgatgagctctttaccggtaccggattctccggtaaccagaacggtggcatctgtggatgcaacattggagatgaactttcggatctgagtcatctcttttccgtcgccgatcatttgcttttcggataaggtaaaagtttcctgaatgacctgtacggcattcttggcagatttcatatcagaaagcagatttaaaaatgtgttgtagttatcacgcagattcgtataggtagataattcgcggttggttgctataatatactgcaattccccattactgtagaaaatcggcatgccaacaacaatactaggattcttctgtcccggaagataggacagcttcatcaccggttcttttttctgaataacatccggcacggtggtaaccgtgaaataatcggtggtttctgcaatgtgagaaacggttttgccgatcaggttttcttttggaataccggaagacttttgatatgctttgttcacatacaaaattgtttcagatgcatctgcaattaaaatattatcatccagattatcgacaacgatctggtagtcaatagtagatgtggtaacctgatgaacagactctttgactgctttgagttcctgaaggacctgctttttggaaacgggatcagaaccaagcattttgttcatcagttcatcaatacgctgctccgcggagagcatgatttctctgtctgtcattttgttccccttcttgtctcccttatgtaaaaataaatgctactactgtcacattataatatagacaagaaatatgttcaacaggttactattttttcatctgtataaatttcgcatacacaaagccaaataattacaaaagtttctgcagttttaatagctgtacaaacattttatctctgtatttgcatacatcatcaactgtatttccctgccagtccggacggtttgcgatttcttcatctacaccctgtgcatagatttcatcgtattcggatggctcgttgccgtatttttctgccattttgcggaaaccgccgtctacaccgagactcatggtaagcatctgaccggtgacagccatacgcataccgggaccgtacatgatggctttgtcgatatcttctacggagcagatatcttcctgaatacactcttttgcggatgcaagcgctgcccaggacagacggtttacaacgaatccgttgatctcttttttacagataatcggaacttttcccattgcttcgtagatttcttttgcttttgccataatggtcggatctgcaccttctccaccacagatctcgatcagcggaagcagataagacgggttgtacggatgtccaacgacgatggaacccggatacatagcgccctcctgcagtttgcttggaaagattgcggatgtggaacttgcgatcacggtatccggaccggttacattctgaatcgtccggtaagtatcctgttttaactgaaggcgctccggaatacactcctgtacgaaatctgctccgcggacagcatcttccagatcattggtgtaacggacatctgccagcgcagcatctgcttcctcctgtgtgatagcttccgcttctaccagaatatccatgatgtgtgttaagttggacttcattttatccctgtcaacgacatcgtataaggtaacgtcaaaattgttcaaagcggcattggcagcaagaccagcaccaatcattcctgtgccgacaaaggcagctttataagttttcatcgtaaaaacctcctgatctttcatttatttatttttttgatacttaataattgtgcaaaattgatgccatcgtcatacaggcatggtttttgcagtataagagggggaatgcgaaaaattcatagcattttgcatgggttttcaggtaaaaaacagaagatcggctgtatttggaacaacatacatctggtttttggaaaaaaaaatttgcgcatttgcaaaaagataactgttctttgtgagaagcttcacatgcgttcgacttgaagcagatgaaataaaaatgggaggtattatggaaagatattaaaatcacaaaattacagagaataggaaaaaaataaaaatttggaggaaaagaaaaatggataaagttattattaccgcagcactgacaggagccgtaacaccgaaggagaaaaatgcgagtattccgctgacaccggaagaaattgcagaggacgcttacaaatgctggaaagcgggagctgccatcgttcatcttcatatgagaaatgatgaaggtatcggatgtatggatgagaagaaatttgaggagaccatcaaactgatccgtgcgaaaaaagattgtgatgtaatcatcaactgtacttcttccggcgacaataccggtacagccacttatgaagaccgtatgagacatcacaaagagctggatggcattgagatgggaagttatgatgccggtacgttcaattggatgccgggtggagtatttatgaacccgccacagttcctggaggagttaggtgacgtgtatatgcagcgcggcatcaaaccggaggtagagatttttgatgcaggtatgcttggtatcgcaaattattttgcgggaaaaggtcatttatccacaccgatccactatcagttctgccttggagtattgggtggtatgccggcaacggtagagaatctggtatatctggtaaatcatattccggaaggttctacctggtctgcatttggcgttggcaaacagcatctgccgatcatgtatgcagcactggcactgggcggcaatatccgtgttggtctggaagataatgtatacttcagcaaaggcgttccggcaacgaacgttggtctggtagagcgtgcagtaaaagcagtagaaacatttggaaaacaggtagcaacaccggcagaggcaagagagattcttggtatcccgccgcttgcaagataagaccggaatcagacaaaaaatttgcgtttttgaaaaaaattagcagtcatgcaaataaaatcgcagaaaaaacaggcgtcttttcgggagaaagtacagaaaatactgtaactacggggatttgataaaaataaaaaactggcacacattttgcaattaaataggctagttgaaaacaaataaggaggtttttacaaaatgagcgaaacatacaaatttgatcttggaacaatgtttagactggacggcagaaaagccttagtagttggtggacatggcggaatcggcgcaggcatcgcagaggcacttgcagcttacggtgcagatgtgtctattgcaagccgtaacatggagaaactgctggaagcaaaagagaaaatcaaagagaaaacaggaaaagatgtaactgtatacaccgtagatgcatctgatgaggaaagcatcaaggcattatacgatacgatcatcgcagacaaaggttacattgatgtacttgtaaactctcagggatacaacgtaaaacatcacctgacagaactcccgaaagaaattatggacggtatgcttcaggtaaatgttgttggtatcgcaatgctttgcaaatactttggcaaacagatgaaagagcgcggatacggcaagatcattaacgtatcttccacacgtggtgcacgtgcatgcttaggcggaaacgcaagctactgtacaacaaaaggtgcgctggatatgcttaccagaacagctgcatgcgaccttggaccggaagtatgtgtaaacgctatcggacctacaaatacagtaacaccgatgatggaagatctgatcaaagagcatccggaaattcttcaccttggtgatgataaaccattacagagaattggtaccgtagaagattgtatgggaccggcagtattccttgcatctcatgcatctgatttcatgacgggtcagattgtatacgcagatggcggtatgacagcaatcggataagccaatttaagaaatataagtgttgttttttattcatagttttacatagctcaacgaaagagggggcagggcttcggacaaagatccctgccccttttttcatttgataggaaattgcgtaaatttcctgtc

SEQ ID NO: 13165 - DNA, 11832 bp, Unknown
  gut microbiota DNA sequence
atatccgcgtggttgcaaaatcaaatgggaatccatcaaaaccatctgctcatatcactccgattatctcctatgtagatgaagcggtagcagataccacagtaccggaaacaccgaaatatgcaaccgctgctgatgtaacagagtcgacagcagccatcagttgggaagaagcacttgataacgtagccgttacaggttacaacgtatatgtcaacggtgaaaaagtaaatgatgaactgatcacagatacttcctatactttaacgggtctgacagataatacagagtatacagtaacagttatcgctgtagatgcagcaggaaatgaatctgaggcatcagaggcagttacctttacaactgcagaggcagacagagaagctccgagtgcaccggcgaacgttgcggcagcagatattaccagagccggcgcagcaatcagctggaaagcatctaccgacaacgtaggtgtaacaggatatgatgtatatgtaaacggcaaaaaagacaacgatgcactggtaaaagacacggcatatgaacttagcgatctgaagcaggatacttcttataaagtagaagtttacgcactggatgcaaaaggcaatcgttctgaggcaggaagtgtgacattcaagacattaaaagcatatgcagacggattatccgatacaaaagatgcagatggcaactggtattactacaaaaatgacaaagttgatacaggcgttacaactgttgcaaagaacaaaaatggctggtggtatgtaaagaacggtaaagtagattttagctataccggaattgcaaaaaatgagaacggctggtggcgcattgtcaatggaaaagttgactttaactgcaacagtgtagagaaaaacgaaaacggctggtggtacatccgcggaggaaaagtaaactttggttacacaggaatcgccaagaatgccaacggctggtggagaatcgttgatggaaaagtagatttcaactgcaacagtgtagagaaaaacgaaaacggctggtggtacatccgcggcggaaaagtagactttggttacacaggaatcgccaagaatgcaaacggctggtggagaatcgtcaacggaaaagtagatttcaattgcaacagtgtagagaaaaatgaaaacggctggtggtatatccgtaatggaaaagtagatttctcctacacaggagtagcaaagaatgccaacggctggtggagaatcgaaaacggaaaagtaaactttaattacaatggacttgcccagaatgaaaatggctggtggtacattaagaatggtaaagtggacttctccaatcgcgatgacatcagaatcaatggaaaaatttataaagtgttcaattagtaaataaccgatatagaattaccccatagtgtactgattgaaaaaagaagcggctttcgaaagagagccgcttctgttgtgcttgaatcaagtcgaacgcacgtgagacttggtgcgtgattctggtcagcgtaagctgacatattcttctcagaatcaccgcactttacaaaatattgcagatcataggtatcgttgataaagatatctgattattctgcatgtgtgttagttgtaatagtttttaatataggatttccggtagctggaaggagattccccgatcactgtcataaacagtttggaataatgctgggaatctttcaaaccaaccatctgagcaatctccgtcagtgatttatctgtatcctgcatcagatcaatggatttgttgatgcggtaaatattgatatagttggacagtgtgatcgtcatatattttttgaacaggctgctcagataacggacggaaatctgaagttcctttgcgatgtcctcctgaagaatcttgtgcatatagtttttgtggatgtaatccagagtgtatgccacatagctgttttgcaggttcggatcagtaaaatcgtgattcggccgctttttgtccagaatatgaagcatgatgttcataatggcgatgttgatattcgcagcagtaaataaactgtctgtcgaggagtgcagcgaaataattttgtttacacagtcatccagtacctgatcagattcctgtctatagtaagtctgacagtgaaaacggatcgcatgcatcataccgatgggataaatgccatcatcactcaagatgatttttgtgaaggtatccgggcggaaatgaatctgttgatattcacagtccccactgtaatcaacacggaaagagtgaataacgtttggcaggatcatgataaagtctccagccttgcagtgaatagattcagaagcaatatccatatggcagcttccggaaactattcggtaaatttcaatggtcgtgtgaatgtgaaaaccaaactggtatccggctttcttcttttgaacgagcgcgcctgtcagtacatcatttgatagggacagggcgagctgttccctcatattttgatttgccataatgttgctccttatatcattgtgtcattgcgatttggtgtgctcttattatagcagaatttgggaaaaagagatactgtttgttgataaaacacttaagaggacgtattgaaaagagaaatacaggtgtaaaatataaggagtcagatagcaatatgcaaatttacacacaattaccagaaaagggatataaatttaaaagaaaaaatcttgcaagatataagaatttcaattataatagaaaagttgcaaggggggaatgaagtttctctgttttttaaggaatataagtaatatatttaggaggaaattaagtatgaaaaacttgaatcgctgggtatatgcgatcatcggtgttatcactctgcttctcgcaggtctggtatatgcttggtccgttatgtccaaatctatcggtgcttcccgtccggactggacagcagcacagttatctatgacatttaccatggttatggcatttttctgtatcggatgtctgattgccggtatgatggcaaaaaaagtcagtccgaagatctacatcattctttcaggaattttatttctggcaggatttatgatcgcttccaccacaggcacttcaccggctaccctgtatcttggattcggtgttttgtgtggtcttggcgcaggatttgcttataacgcagttatgagtaccatgtctttatggttcccggacaaacagggtctgatctcaggtattcttctgatgggatttggtctgagcagctttatcattggtaaagtgtttgcagctgttacaccgtctgatggaacagacaagtggcaggaaactttccgtattctcggtattatcatcgtagttgtaatggtgatctgcagcttcttctttgtaaaaccggaagctggttacaatccgggtgctgcatctgctcagaaaaaagcagtacgtgagccggcttgtgaagtaaacacaggaaaaatggctatgatgccgacattctggttttactatatctgggctattctggtgagtgctgcaggtcttgcactggtttctcaggcaagtggtatcgcaagccaggttggaactactgtatctgatggaaacattgctactgttgtaggtctgatctctattttcaacggtatcggacgtgtaatctttggtggattatttgataaaaaaggtcacagatttacaatgatccttgatatgatcatttttatcgttgctgctctgattcttgtacttgctctgatgagcggaaactttgcattcatcgtgatcggtttcgttgtaggaggacttgcttatggtggagttacaccgacaaactctgctatcatcagtgatttcttcggacgtgagaactattctatgaacttctcactgataaatacaaacctgctgattgcatcttttgcttctactattgcaggtaaactgtatgacgcaagcggatctttcatgacaactattttcatgatgatcatcgtaacggttcttggttttgttgtatctttcggagtacgcagaccgaaagcaaaataaataatagaatatcagatcataaaaaattaagaaagtggaatagtccttttgtgggactgccactttcttttttttataaaatgagttacaatgggcgaagtcagaaaagaatcattggtaaagggtgataaaaatggatgaatgtaaggaatgttacagaaaataacagatgtgacagggaaaacattgaaatccacaataagatagataacagaagcagatagtacagaaggaatgtgaaagatatgaagatagtttttttagatgataattcaattggaacggacattgatctcagtggatttgagtctctgggtgaagtggttcgttacggaagtagtaagccggaggaggttccggagcgtgtgaaggatgcggatgtggtcatcatcaacaagatggagatcaacgagcggaccatcggaacggcagaaaagctgaaacttgtgtgcgtgactgctacaggtaccaataatttggacaaggagttcctggcaaaaaggaatattgcgtggagaaatgtggcaggctattctacagagtgtgtggcgcagcatacgtttgcgttactgttctatttgttggagaaaatgccctattatgacaattatgttaaatcagagaagtatgtaaatgatgctatgtttacacattttgcaaatcattttcatgaactttgcggtatgacatggggcatcattggtctgggagccatcggcagacgggtggcagatctggcaaaggcttttggttgccatgtgatctattattccacttccggaaaccatacggaggatggctacgagcgcgtagattttgataccttgcttaagacatctgatattgtgtccgtgcatgcaccgctgacggagcagacggaacagctgatgaatgcagctgcattttcaaaaatgaaaaacagtgcgatttttatcaacgtgggacgcggaccaatcgtggtggaagcggatctggcagatgcgctggaacagggtgagatcgcggcagcaggcctggatgtactgagcgcggagccgatgcgtgaggacaatccactgcgttgcatcaaggatagcgagaaacttgtgatcacgccgcatatcgcatggacggcggtggagacgcgcaagcgtctgatggacattattttacagcaggtgaaggagctttttgaagttaagcaaaaataatgagaaaatgcgatggatgaaaatacataggttacgatggaaggagaacgtatctttatgaaaaataaaaaacgattggcgaagctgatttttgtggcgatactgcttctgatcatctggtatacatttaaggattccgcaggggatattgttgcacagcttcagaaaacatcttttgcggtgctggtggcgattatggcagcaaccgtgatctatcatttgtttgaggcgtggattacctactcactggcgcgcagatataatccaaaattcaagttccgggaagccgtttactgtgcttttaattgttctttttatcgtttgtctacattaggaagtggttccggtgtggcagcaatcgtgtatctgggaaaaaaaggtgttggctattcggaagcaaccggactttatatgattcagtacatggtgcacaaagtcagtgtggcactgttcagcggacttttatttatcttgaactggaaagtaatgtctgtgaattatagagaatatggcgtgtatctgggacttgcgtatgcattgacagtaatcatcagtattgcgttgatcatttttgcggtatcggcgaaatctcatcagctgatcttgtggattgtgcgtaagtttaataaaagcggaaaactgactccggcattgaaaaaactggaagaaagctgcgatatcatggaaaaatcaacatcccgcttgttgaaggatgtaccatcgctgatttctatggtgttgaaaaatttggcaaaactgtgcttctggtattgtattccgtttttaattctgtttggaacaaatgaaatttcaatattggattctttgtcaattacatcgctgtctgttatgtcggcagcggtaattccgacaccggcaggagtaggagcggtggaactaatcatgacgaacctttttgctgtactggttggtgtgcataaagccggtgcgatcacggttctttaccgtgtggcaacctttattttcccctttgttgtgggcggtgtgctgattctgatcagtaaacttgtggttacagttcactcatcacatggattcaggtaatgatcatgcttgcatgaggaattacctggatgcatagtgatgaagggagcgcctttttgtgagcaaaaacagtagcaaagctacggagaagcccgaaagggcgttttgcgaatggcgcgtgtgaactgtaacaacctgtgtattggcagaaataagtaaaaaattagctattgcatttgaaaaaagtatgtgctatcatatgtgcagaaaaagcaaagaaatcttcagggcagggtgaactgaaccgaatgcaattcgaagcagagagtcccgaccggcggtatagcccgcgagcgtgaaagcgttgatttggtgattctggtaagcagaagattccaaagccgacagtatagtctggatgaaagaagaacaagcgaaaataaatacttaaatgagacagaaaaacaaatgttttgaagtccatttaacaaaaaagattttcactccctgagatttatttctcagggattttcttttaccataaatttttgatctgaaaaattatcggagccgggatgtgaatgttacataaaactaacaagagcatcaggcgatgaaacacagatacatcaggcaacgcaaaaatttatggaagcagaaaatccctggaagattgaagggagtgtttttttatgcaggaaaaagaagaatatatgaaacgggcattggaactggcgcgaaagggagaaggtcatacatcaccgaatccgatggttggctgcgtggtagtcaaagacggacggatcatcagtgaggggtatcacgagaaatatggagagtttcatgcggagcgaaatgcattgacccgctgtacagaagataccacaggagctgatttgtatgtgacattggagccgtgttgtcatcagggaaaaaccccaccgtgtacggacattatcattgaaaaaaaaatcgcccgggtttttgtgggaagtatggattctaacccactggtggcaggtaaaggtgtacagatcctgcgggatcatggcatttatgtagagaccggaattctggaagaggaatgcctgaagttaaacgaagtattttatcattacatcacgacaaagacaccgtttgtggttatgaaatatgccatgactctggacggaaaaatcgcctgtgccaccggagattccagatgggtgaccggagagacggccagagcgcaggtgcatcggatgaggggacgctaccggggcatcatggtaggaatcggaacggtgttggcagatgatccgatgttgaactgccgcgtggaaggcggtgtggatccggtgagaatcatttgcgattccaaccttcacattccactggaaagtcagatcgtaaaaactgcatcagaaattgagacgatcgttgcctgcagtcaggaagcgttagaagcagagcgaaagcaggagaaaatcaggaagttaaaagaggcaggcattcagctgatcggcacggaaggtgcacacggagtcaatctggtggaattgatgaaaaaacttggtgagcagaacattgacagtattttactggaaggcggtggaacgttaaatgcttctgcactggaagatggtatcgtaaataaagtatatgcttacattgcaggaaagctcatcggcggcatggatgcacgctctccggtagagggaatgggaatcgaccgaatggcagatgcgatcacattgaaaaatatggagattgaacgtctgggcgatgacttctgcattgttggctatgtcaaataacgatgcaaaaaacgaagataaagtgaaaagaatttcttgaacaaagaatacttgctacatagtgttcaggaagagtaataagacaacaatacctgaacagtaattgatataaaattaaaagttaacttgaaaagaggcgatcatacatgtttacaggattaattgaagaagtgggaaccattcagaatgtacgacgtggcgcccggtcctgtgtactgaccatcggatgcaaaaaagtgctggaaggcagtcagatcggagacagcattgcagtcaacggtgtgtgcctgacagtgacgagcatgggcggcagttattataccgcagatgttatggcagagacaatgaaccgaagttctctggggcagttaagtactggggcaagcgtaaatctggagcgggcgatgccggcaaacggcagatttggcggtcatatcgtatcgggacatatcgatggcaccggaacggtgcagagcattgaaccggatgacaacgcaatctggtacaccatcgcagcaaagccaaacctgcttcgctatatcgtagaaaaaggttccattacaatcgatggtatcagcctgaccgtggcttatgtggatgaacattgttttaaagtgtccatcatcccacatacacagcaggtaaccgctttgcatgacagaggcgttggcgacatcgtcaatctggaatgcgatattattggaaaatatgtggaaaaactgttgcagccggcagcgggagaagaagaaacaaaaaaagaaatcggaatcaccgaagactttttaaaaaaatatggattctaaatttacaggaatcagaaatgcgataaacaagtaaattgaaaaacagatgatagaaaagtaattaaaacttaaatgaatgaaagttaagggaaacttggaggataaaaaaatggcaaaagaaattggaacagtagaagaagcattacaggatttgagagacggaaaagtaattttagtaattgatgatccggaaagggaaaatgaaggtgatctgatctgtgcggcagagtttgcaacacaggaaaatgtaaactttatggcatgcgaagcaaaaggtttgatctgtatgccgatgagcggtgagctttgcgataaactgggactggatcagatggtaagtgtgaatacagataatcattgtactgcatttaccgtatccatcgatcatgtagacaccacaaccggcatttccgcagcagagcgttcctacactgcattgaaatgtgtggaagacgatgcaagaccgtcagacttccgcagaccgggtcatatgttcccactgcgtgcaaaagacggcggcgtactggtgcgtgacggccatacagaggcaaccgttgatctggcaaaactggcaggcttaaaaccgtgtggactttgctgtgagatcatgcgcgaggacggaaccatgatgcgtaccacagagctgttgcagtttgcagaaaaacatgatctgaccgttatcacaattaccgatatcattgagtatcgtcttaaaaatgagagtctgatccgccgcgaagcagatgcaaaactcccgacaaaatatggtaactttgagatttatggatatgaaaatattttaaacggagatcatcacgtagcacttgttatgggcgatgtggcagacggtgagccggtactttgccgtgtacattccgagtgcctgaccggagatgtgtttggttccagccgctgcgactgtggagaacagttagatgcagcaatgaaagccattgcaaaagaaggtagaggcgtattgttatatcttcgccaggaaggccgtggcattggtctcatcaataaattaaaagcatacgagctgcaggagcaggggtatgatacggtagaagcaaatatcaaacttggtttcccggctgatatgcgtgagtacggagtgggcgcacagatcctgcgtgatatcggagcaaaacgcctgcgtctgctgacaaacaacccaaccaagatcacaggacttgcaggatatggcatcaccattgaggagcgcgtaccgatccagatcaaagcacagaaatttgactatttttacctgaaaaccaaacaggaaaaaatggatcatatgacaaactatgaataaaatacaaccggtaaaatacattgtttggagagattttgtaaagtaaatacagagtgataaaagaagtagaaatataaagtaaaaattagaaataaacgtaataattcaaatcaggaggataagaaaatgagagttttagaaggaaatgtagtagcagagggaattaaaatcggtattgtagcagcacgttttaacgagtttatcgtatcaaaactggttggcggcgcacaggacgcttgtgtacgtcacggtgtaaaagatgaggacattgatctggcatgggttccgggtgcatttgagatcccgatcgttgcaaagaaaatggcagcttccggaaaatacgatgcagtactttgtttaggagcagttatcaaaggttccacaagccactatgattatgtgtgcgctgaggtcagcaaaggaactgctatggttggccttgagacaggcgtaccgacactgtttggtgtattgacaactgacaacatcgagcaggcgatcgagcgtgcaggtacaaaagcaggaaacaaaggctatgatgttgcttgctccgcaatcgagatggtaaatctgatgaaaaacatctaataaaagagtaaaaaaacaagagcaaaaggactatttataaaaaacaagtctttttgctcttttgctttatcattagagaagcatgtatatacatgcggcacgcagtgcagtgtggcgcaaaaaatttacaaatatcacgatgtaaattgagaacttctgcatttttcctcaaggagcgattgttagcgactgaggcaaaatgcagaagttcgtatcaaaacataatatcgtaaattttaagccacacgagactgtaattaattctgtgtaaactctaaaagagctatataccctcttggattgatgttaaaataaatatcaattcaggaggatttttttatggcacgaagaagaaaaatggatccagaacgcaaagcgttcatcaacagcttgttggaacactatcaaccaaaggatgctcaggatatccaggacatgttgaaagacctgttaggcgaaacgctgcaaggtatgttagaagctgaaatggatgatcaccttggatattccaagtatgactacaagaacaaagagacagacgatagccgtaatggttatagtcctaaaactgtcacctcttcaatgggaacgattgatctggatataccacgagatcgaaagggagagtttgaaccgcagattgtgaaaaagaatcagacagatatctcaaacattgaagatcaggtactttctatgtatgcaaaaggaatgacgacaagagatatctccgctcatctcaaagatgtttatggtgtggatgcatccgcagaaatgatatcacatatgacagatcgaatccttcctatcgcaaaagaatggcaaaaccggccgctggaaagaaaatatgccattgtttttatggatgcggtacatttccatgttcgggaggacaatcgaacggtaaaaaaggcagtttacgttgctataggtgttaaactgaacggaaaacgtgaggtcctcggcatgtgggtaggaggaaatgaaagtgcaaaatactggttgtccgtcctcaacgagataaaaaaccgaggtgtagaggatatcatgatcgtatctgtggatggattgaccggattcggggatgcgattcatgcagtattcccacaggc

SEQ ID NO: 13166 - DNA, 471 bp, Unknown
  gut microbiota DNA sequence
cagtgttcctggtgaatgctcggggagttccttcacatccatctttttcagcatctgcttgaaggtaaaatacttacaggaattgatctctatacatttacgggcaacttcttcagcagcacctttcgggattgtttttactttatgcaggatacctgcacaggcattataggactgctcttcatgttttgatgatttaaggagtctgtcaatcagttctgacatcgcaggaccaatggcagaagcccagcggcggtaataattaccatcctttgaattgacttctttgtaataaaggtgttctggcggcatatgttcatctaccgtgatatacagcggaaactctctataagaccgcttatgtgtacagatcagccgattatactgatcacagatcctgatctctgaagcggttgccttcaggattgcaggcttgccacagtaagagtacaatacggagtagtagtggcc

SEQ ID NO: 13167 - DNA, 2383 bp, Unknown
  gut microbiota DNA sequence
actcccactgagaaatacttgttactactcaccacttgcagaagtgggagtctcaactcagactgagataaactttgctctccacgaatcagcgaactcaaattctttggagttatatcaagtctttttgcaaaattttcctaggtaacaccactttcatcaataagctcatttatataatatcctggacgaaatgcaattgtgttattatgttctatatagttattcataacgtttgctcacctccgctatctctattttggcagaaagatcgacatcacaataatatccttcatggtttctgcttagagctggtcgtcttcataactgatacgaaaatgttattgcaacaattttattatattcctaattataagcgcattctctccaaatacgcaatcagatttttcatcttctgcttctgagatatccgtgtcaaaaccgattccaactacacgcatggtaacctgactttcatctgacacaaatatgtcgatggcagtatcgtcatttacgccatacaatacctgtccactcatttcttttcctccagaatcgtatttttaaatctctgattttttctttttttctgccacaccacagacaccattgctgccaccagaaaaccaatactgatccattgcgatgttgacagtcctgcataatatcctctctcagcatcgtacctcagattttccaagcaaaaccgcaaaatagcatacaagatcaaataggtttcaacagtataataccactgcttctttatctgcaaatataaaatagcaaatgcaatgatcattaagcaagctgattctaccaactgaaccgggaataattttatgcccggaattgcataagaaccttccggaaaaacgaccgctccaattccatcatatgggattccataacagcatcctgccataaagcatcccactcttccaaaactatgcataaatggtataagaaatataaatttccgaacatatatccctgccgggatcttgtgaatttttcctgccagaaatacgaagatcaatccaaagatcaatcctccataaaatacaaatccgctcaacattaaggcattaaaatattggaaatctgtaatccgcgaccagtcgatgcttttataagagaccagaagatacaatagctttgctcccaggaagccgcctaaaatacagtaagcctctaatatcatccagtcattaaaatccagtttttcatgcttcaacacaaaaaaagcaatgatattccctattacaaccccagatgcaatcaacaaaccataggacggaattgtcaaaccaaataaatgtaaatatacgtgcatgtttcctcctgaatataaaaaaggcttccgcataatgcggaaaccccattcttaacttttccaaacttatagactagtacaaactagcaagaccagcagtgcaacctatgcaagcgatatataagataaggctaagtactaaaccaatgatagagcaaactaaaccaccggtagcgatacctttatgctccggattttttcttccaatcgctcctaaaacaataccaataattgctaaaatagcgcctaaccaaccaactaatccaccggaaacagcgccaatgataattgaaataataccaagtactaatgatgctacagccattacaacttcctcctgttttcttatcttttgtttttctgtaattatcgcagtaatttattattttgtcaatctatttataaaatttctataaatttttaatcaaaaaactttattcttgataataaaatatgcgttttacgcaaaatgggcaatcccatcaagggactacccattcatttttttatgctataagaaataatatctatctcatttttagtacagttttgcaccggccggaatatgattatcaaccatcagaaggtgaagtttctcctctccctcttcctcatggattgcggataataacataccacaggaatcaattcccatcatggctcttggcggcaggtttgtgatagcgatcagtgtcttgccaaccagttcttccggctcatagtaagcatgaataccacttaagattgtgcggtctatgcctgttccgtcatccagagtaaactgtaacagttttttggatttctttacagcttcgcatgcttttacttttactgcacggaaatcagatttgctgaatgtatcgaaatctacctcttctttgaacagcggctcgatctctactttggagaaatcaattttctcatttgcagtgaagaatccgttgttgtctcctgctgttactgcctctgcatcgtttcctgcttttgcagcttttttgtcagaatccagactcttcattgtcgggaatttttttgattgctaagctaact

SEQ ID NO: 13168 - DNA, 2786 bp, Unknown
  gut microbiota DNA sequence
attctgagaagaatatgtcagctttcgctgaccagaatcacgcaccaagtctcacgtgcgttcgacttgaatcacggaacaggaataaattggatagaaacaacaagcagatagcgtgtagatggaagtttttttagagagaaggtaacgtagtatgagggtaggaaaagaaaaaggtgtttcgatagcaccggagctgatcggtttattttttgaggatattaattttgcagcagacggtggtctgtatgcagaactgatcgaaaatcgttcttttgaggcgaaggaagcctatggaaatccgggcagattttatgcagtggatgactttggatatgcgtggaaaacgctgtatcaggcaggagaagaggagccgctgatgcagtatgtgacaggaactccggtgtctgcggtgaatccgcattatctgcgttttacggcaaaacaggcaggacagggatttacaaataaagcatatgacggcattcgattagaaaaagatcatacttacaaagtctctttttatgcgagatgtgtggcatatgaaggtgaatggttccagataacggtgcaaagggatggacagatttttacacaggcagaagtaaaagcggtgaaaccggttccctatgtaccattctgcgacctgaagattccgatggaagtcggctatggaacgctgaatccggatattgaaaaaatccatcagatggatcagagtgataaatgccgtagaaatgagtggataaaatatgaagcggtacttaccgcgctggatgatgtccgcggtgctcagtttgcaatcacactggatgcgccgggtatcgtagagtttgatctgatctcaatgattccggaagatgcggtgtcaggaatttttcgaaaggatctgtttgaggcactacaggcgatcaaaccgggatttgtgcgtttcccgggaggatgtattgtggaaggcatcagtctggacaaccgttattattggaaaaatacagtaggggatgtgaaagaccgccgttatattccgaatctgtgggcttttgatgatgactggggcaaaaatgatccgatgacgaaacggccggatgcgcattatggacagtctttcggacttggattttatgaatattttctgttgtgtgagctgttgggggcaaaaccgcttccggtgctgaatattggcaccgcgtgtcagttccgttctacagaaatggtggattctgacagtacagaatttgaggaatatgtgcaggatgcattggatctcattgagtttgccaatggtccggtggacagtaaatggggcgcattgcgtgccaaaatgggacatccggagcctttcggtatggattacctttctgttggaaatgagcagtgggagacgcaatacctggatctgagataccgttatgaacgttttgaggcagctattcatgcgaaatatcctgagattcgattgcttggaacggcgggaccgtttatggagtgctccattacagaagatgcatggaagtattatcgggaaaaagcaaaggaaaatccgaatttcagttatgcggtggatgagcattattatgtaagtccacagtggctgtacgaccatgtggcaatgtacgatgattatccgcgggacgtggcagtttttgcgggagaatatgcggcacacaccgaagcgcgggaaaattccatggagagcgctcttgccgaagcggcattgctgaccggcattgagaaaaatgcggatgtggtaaaacttgcttcttacgcaccgttatttaatcggatcgggcatagccagtggaagccggatatgatctggtttgatgaccgtgaggtgtatctgacaccgaattactatgtgcagaagctgtttgcaaaccacagaggcagtcatacggtgttactgcatgatcaggatgtggaattgcgaaaaaagggaatttatgtgtctgtttccatggatgaagatgaaaacatcattgtgaaaacggttaatacaacgcatcagaattttgagttgtcactggaagatgctgatggagcagcggtaagtgcatctggaaagcagtggacgttacagggaaccggcgagatgccggaagggttgccggagaaatctgcagtgacggagcaggaggttcagatcaatggatgcgtgacgctgcctgagagaagtatggttgtggtggtttacaggcaatagatgtgatcagaagaagaaaatgaaaacgtgcattttcatgcatttggataaaaaagagctgttgcctaagcaacagctcttttaatgttcttaattcactatgtgctaataaggactcaaaaatatgattaagcctctgcgatagcacctgtaggacatgtacctgcgcaagcgccgcaatcgatgcaagcgtcagcgtcgatctggtactgagcatctccctcagagatagcacctactggacatccaccagcacatgcgccacacattacacaagaatcgctaattacgtatgccataatttttttcctccttaaaaaaatacttgttcgttaagctctcataagcttttcctcataataatataaaaaatccaaaaatgcaagcgttctatgagacaaaacgatcaataagggcacttttttgcgattgtattgaacttaatacatattgacacttgagttagtatatgctatcatagatgttgagtaagttttcccatttggaaattatataaaaaagatgaaaattccgtttgtacggaattttcagactgtagacaaagccctgcttttgcagggtt

SEQ ID NO: 13169 - DNA, 6164 bp, Unknown
  gut microbiota DNA sequence
aaagtgcggataccttttacaagaaggctccgcacagatacccaatgtacacgatgtatctacacagacaccaacatatattttaccagatactgattctactgctgcggaaactccacctgccccaataatttcagagacatctcgtggttttaatacctgtttcgccgcgtcatataattctttccatttatcattcattgatttgagctcctttacaacttccaatctactgcatttattttatttcatttactttatcttttagctttcatctccacatttattactaaaaaatcgaagaacccttccaaaataacgatcaaaacggaagcattcttcgatttcgtattagtttctaaaatttattaatttttctcaaaaagacatccatcaggaaaacttctcaataacttctgccacgccgtcttcgttattatcgtactctgtgacataatccgcggcatcttttacgctctgcaccgcatttttcattgccacacccacaccggcattgcggatcatactgatatcattctcctcatctccgatagccaccgcattttcaatcggtactccaaggaaatcacacaggaactccacaccatatcctttatttgcacccagtggacaatactccagatattctttgcaggaaaaaaagctgctacactttcctttctcccactctgcatgcgcctgctgaaatgcttccaaccgctctttgtgctccagatcgattagaagcattttcggcggttcttcatatagcatgctattcagatttccggtaatcctgcatggcattccggtctttttcacataaaagtcaagctctttattacgttctgccgcaagcacctgtgtatcggaataggtctgaatatgtatcccagcttctgtcgcctcacgcagcagatattcagcatattcaatcggcagacgcttgttgcttaaaatacagtctgctgaaaaatcgtagatagttcctccattgtatgctaccagatagcagcccggtcgcgttaattcaagttcttttgcaattctccgaccgctgctgacagctcgtccggttgcaagggcgatataatgtccctgatccactgcattccgtagtgcttcccgatttttatctgaaatcgttttatcatcccgcattaatgttccgtcaaaatcaataaagaatatctttttttccatacgactggcctcctacgatctctcttccttttctcataaggtgttacttcataagtacttttccagaatatccggttcttcttattaatgtgattgtatcatagtttccattttgttactatctgtaatttcccaaaatcttaaaattccgggcttcatcccgcagaccaagcactgcatttttgatcgcactgtcattcagattaccgctcaaatccatgaagaaacgataatccagtggatctctggaaataacaatggactcaattcggttcatatttaaattattgtaagtcaaatgagacatcaggtgatataatgaaccgcaggcatccggtgcttcaaagcaaatgctgatcttgtccgcgccgctcaaagttacacggtctttggaaatcagcagataacggtccttcggctgtgggcttgtctcatattcttccagaatgtaaaagccatactctgccaccagattgtaattggcagacacataaccggatgtcggatcctgcatcggaagaaaggcgaaattaacttcttcccgctgcaatacatcgcaggcttcccgccagtctgcacatttctgcaaaccacactcttccggaaaatagctttttgccgcttcttcggaagccgaaataaaggctgctgccgcatgggtaaaatcaagttcttttacttccacaaaaccagtcggtgcaaatttgccatgctctgtcagaagctgatactgccgctttctgctgacagacatgatatgctcaaataactctctgactccatgactgttaaaatcagaatgtgccaaagcagctacagaatctaattttgatacctcacgctctttgtcaaatacagcctttccggttgaaattttatattctgccacctgtgtggtcaataccatacggttttcaaataattccacgatctgacggtcgataccgtcaatctcctttcgaatatccagtaaatctttcatctgccttactccttacgttcacccatatttttgctaaaatagataaactaattttttctttatctctatcttcgattacttataaaaaacaaacattccactacagatcaaacaatgacaactgattggattccggaagatccgctaaaattcccaaatccaccatcaggtcaattaccgtcttgctgacttttgtacgctgccggaaatcatcccttgaaagaaattttccgtcttttgccgcctccacgactgcatctgccgctttgtctcccagaccgtcaatggtactgatggatggcatcagtttattatcaatgatctggaaatgatgtgctttcgctttataaaggtcaatcggtaaaaactcaaatccacgggcatacatttcctgtacaatacgcatatctttgtaagtatcctgctcctttttggacagggtatcttttcgccgttcataatcatgcatgaaatattccagtcgttcttttccctgacacatcagctcatagttaaaggatgtggcacggatactgaaaaatgccgcataataagccagcgggtaaaataccttacaccatgcaattcgccatgccatcataacgtatgccgccgcatgcgccttcgggaacatatacttgattttttcacaggaccacacataccagtccggcaccccgtgatccagcatgtctttcttatattccggccattccttgcattttccattggcaacggcaccttttcgtacacgctccataatggtaaacgcctcctcactgtccagtcctttaccgatcagatatgtcatgatatcgtctcgggtacagatcgcagtggaaatcgttgcttttccttcctgaatcaaagtctgggcattaccaagccatacgtctgttccatgggacagacctgcgattctgaccagatccgaaaatgcctgtggtttggtatcaattaacatctgcatagcaaaatcagtaccaaactccggaattccaagagcccccagtttgcatccgccgatatcttccggctcaatgccaagagctgaggtattctggaataaggacataacttccgggctgtccagcggaatcgtctgcggatccacaccggtcagatcctgaagcatacggatcatggtcggatcatcgtgtccaagaatatcaagttttaacaggttgtggtcaatggaatggtagtcaaaatgcgttgtgatgatgtccgtcgacatatcgttcgccggatgctgtaccggggtgaaagaataaatattttcacccagtggaagtacaataattccacccggatgctgaccggtggtacgtcgcacaccaacgcatccctgtacgattcgatcaatctcacaatttcgtttgtgaacaccacgttcctcgtaataattttttacatatccaaatgctgttttatcagctaacgtaccgatagttcccgcacggaacgtctgaccatcaccgaaaataacctcggtatatttatgcgccttactctggtaatcaccggagaagttcagatcgatatccggctctttgtttcccttaaatccaaggaacgtctcaaatgggatatcaaatccttccttgatcagcttctgaccacagtgcgggcagttgcggtccggcatatcacaaccggcttttccggcgtaactttttaccagatccgaatcaaaatctacataatgacagttactgcaaatataatgcggacttaacggatttacctccgtgatacctgccatcgtggctacaaaagaggagcctacggaacctcgggaacctaccagataaccgtcctcattggatttccacaccagcttctgcgcaatgatgtacataacggcgaatccattagaaataatagaattcaactcacgttccagtcgctcaacaaccaccggcggcagatcttcgccgtaaatctcatgcgctctcgtataacagatttcacgcagcatgccatcggaattttcaatgacaggcggacacttatccggtctgaccggtgagattttttcacacatatttgctattttatttgtattctcaatgacaacttcttctgctttttcactgccaaggtactcaaattccttcagcatttcctctgtggtacgcaggaaaagcggagcctgatcatctgcatccttaaagcccttacccgccatgatgatacggcggtatacttcattctccggatcaaggaaatgcacgtcacaggttgccacaaccagtttgttaaattgctcgcccagttctacgatctgacggttgatatctttcagatcttcttctgattccaccggttctttgtcggtgcgcagcataaacgcattgtttcccagcggctgaatctccagataatcataaaactgcacgattcgcgcaacttcttcctgcgaacttccacgtaataaagtacgatataactcccctgcctcacaggcggaaccaagcagaataccttcccgatatttcataaattcgctttttggaatcttcggacgccggttataatatttaatatgggaatccgataccagacgatatagattcacacgaccgatatcattctgtgccagcatgatcgcatgataacttggcatttttcgaatggtctcttccgtataactctccatctggtctaaatcttccatagtttccacaccacgatcccgcagcatttccaccaatttaacaaaaatctctgccgtacaggccgcatcgtctaccgcacggtgatgatgcgccagtgacacattcaatgctttcgccaccgtatccagcttgaatcggttcagtgccggaagcagaacacgggataatgctaccgtatccagaacggtcttctcacactctaatccaagcgcactgcagttgtgcttgataaaactcatatcaaagtctgcattatgtgcaaccataaccgcatcctggcaaaattccataaactttggtaaaatttcgtcaatggtcggcgcatccagcaccatatcgtcattgatgctggtcagctgttcgatttcaaacggaatcggtactttcggattgacaaacgtggaaaaacgttccgtgatggaaccgttttcaacttttaccgcaccgatctcaatgatctggtttttggatggactgaatccagtggtctcaaggtcaaatactacaaaggtatctgcaaaagactgtcccatcggatgttctaccagacctttcaaatcgtccaccagatatgcttccataccgtaaatgatcttgaaatcatcgtcctttccaatggcatgatttgcatccgggaacgcctgtacatctccgtggtctgtgatggcgatggccttgtgtccccatttcatggcacgtttgatgatgtctttgacatcggaaacaccatccatatcactcatttttgtatggcagtgcagttccacacgtttcaccggactggtgtccatacgggtagatacaaaggacgggatttttttaataccaatgacagaaccgatggtcagctcactgtcaaaccggtcaatcgttgttacacctttgatcttcaaaaatgcacctttcgcaacaccgccatttttgatttcatccagatactcatttttacagaacatttttaccatgatcgtatcggtaaagtcggtaatggaaaacatcagaatcgttttctcaccacggatcgggcgctcatccatagacagaatctgtccacgaatgacaacttctcccatctctcccatgatctgttcgatacggattgcttcttcgtcaaaatctcgaccgtataccacatccggattatcggatcttttgtaagaaccacgatccctgaaatcccgttttccgccaaagctctttttgaaaccgccacggtcttcctgttttgcaggctttttctctgctgcagaggattcctttttgacagctgctgctttttcggttttcttttctgctgt

SEQ ID NO: 13170 - DNA, 11438 bp, Unknown
  gut microbiota DNA sequence
caccagtctcccaaggtacttccgacgcaccggcttccgggttttccatgtattctccctccggatgacgtttcgcaccaaagttggaaagccggatgacattttctacctcattctgcatcttgatatctgcatttttccgatattttgatgcctctttttcatgaaactccatctcaatctgaatcgacagattgcagcgttcattgaaaatcttctccagaatgtgataaatttcctcttccttctgatgcgccagaaccgtatcttccagactgacacgcagtactttttcctccaccacgtctaattttgcatgacgcagcagattgtattccagcagactgtagcggtgaaattccgtcaaaatactgttccagtacacatccagcaggtttttcaatgtatactgctcggacagctggaatttttcaatgatcttgatgttcatcgtatgatgcggaaaaagctgccgtttcagctcattttccagaaaatatactttttcttttggcaaaagtctgccgcatcctagataaatgcgcagtgagtttctctgtctcgttgtagaaacctttgaaaccgtggcatcatccagcatgccctgcagatctgtatccagttttaattgtggaaatacctcaaaaaagctttttgccatttatctattcactccaattgatgagctcctgtcgcagtgcttctaataactctgcctccggaactttctttatcacttcgccacggcggatgagcagaccttcctgtctgccgccgcagataccaagatccgcttcttttgcttcacccggtccgtttaccacgcagcccataacggctacttttatatccagtgggaactctgccaccatattttctactttatttgccagaccgatcagatcaatgctggtacgtccgcaggtcggacatgaaacaatctcaataccgcctttgcgcagtcccagtgttttcaggatcagtttggcagatttgatctcttccaccggatctccggtcagagaaacacggatcgtgtcaccgattccctgatttaagatcagtcccagaccgatagaagatttgatgtttccgctgatgatggttccagattctgtaatgcccacatgcagcggataatctgtctttttggaaatcagttcatgtgctttgacacacatcatgacatcggaagatttgatactgataaccagattgtcataaccgaaatcctcgatcatttttaccttatccagtgcactctccacgattccttctgcggtaacaccgtggtatttctccaccagttctttttccagagaaccgctgtttacaccgacacggatcggaatattccgctctctggcacagtcaactactgctttcacgcgctctgcagaaccgatattgcccggattgatacggatcttatctgcaccattttccatcgctgcaatggcaagtctataatcaaaatgtatgtccgccacaagcggaatatgaatctgttttttgatctctgccaacgcttttgccgcttccatatccggaaccgtactgcggatgatctgacatcccgcacgctccagctgcagaatctgagctaccgttgcctccacatcctgtgtctttgtatttgtcatggactgaatcgcgatgggatgcttgccaccaatgaccacatcaccgattcgtacctcttttgtacgtcttctctctgccattttcttctccttttaaaataagcggatattccaaatccttttacactacttgctcatagctaaatagttgttacttcacagtttatcagaagaaacattactttctctacttcatctcagtaaattctatcgaaacgttcttaatttgcctatggtatcagctttcggatatcattaaacataatcaggatcatcagtccaaacagacacaataatccgataaaatgcaccatgccttctttatcttcactgacgcgctttccacgaatcgcctcgatcaccagaaatacaagacgaccaccgtccagtgccggaatcggaagcaaattcatcacaccaaggtttgccgacagcagcaacgccagattcagcaaattcatccagacgtaaaatgcaccatccgacttgctcatatcgtaagtatccccgatggtttttacaattccaaccggaccggacagatcgttgacactgacctgacgggtcagaagcattttcaggcttcccactgtatactgaatccagtatttcacttcatacacactgtactgcagtgtcttgatcggaccgacttttgtatattcaccggaaccgtcaattccgtaacggtaacgtccctgttcctcatcataagtgggctgcacttctacgatatggcgctcaccatttctctcataagtaacttccacagtctcaccggcatgaaacagtgtatacatactgatttccttgaaaaaatgaatatgtttatgattcattttgatgatctcatcacctgcctgcaatcctgctgtctgagcaccatatccatcttccacctgcgctacggttggtgtggagataccgatatttccaagaatgatgactgccagcacaaaggccatgataaagttaaaaatcggtcccgccgcaacgacactgatccgcgcccagacagattttttctgaaaagaccggtcatcatcactctggctgtcctcgccctccatcatacaggcgccgccaaaaggcagcagtttaatggaatactttgtctcaccttttgtaaatcccacgatggttggtcccagtcccagagaaaactcattgacccggattccgttggcttttgccagcaggaaatgtcccagttcgtgaaacagaataatcgcactgaacagtaatatcgctatgatatactttatgatcaccctaccacctgctttctatccattcatatactgctgcctccgttgccagaatctcttccacagacggatgttcaatatatgtaatttcctccattgcagatgcgataatatcaggaatatcaagaaatgcgattctccgctccagaaacattgctactgctttctcatttgctgcattaaataccgtcggaatatttccaccgcggcgcatagcctccaacgcaaatttcagtccctcaaaggtatccatatccggtgcttcaaatgtcatctgaccaagcttgtaaaaatcaaggcgcatgccgcgtaaaaatctacgttccggataatacagtgcatactggattggaagtttcatatccggtgtaccaagctgcgcaatgatcgcaccatcctcgtactgtaccatggaatggatcacgctctgcggatgtactacaacctgaatctgatccagctctacgtcaaacagccattttgcttccattacttccagacctttgtttaccaatgttgcagaatcaatggtaattttacgtcccatcacccaattcgggtgtttcagggcatcctccagacgcacctgggaaagctgctctctggtcattccacggaacggtccgccggaagcggtcagtaaaattttgtcaatcttgtttccgtgctctttctccccattcagagactgaaagattgcactgtgttcactgtctaccggtaaaatacgaacaccacatttttttgccagcggcataataatatgtcccgcagttaccagagtctccttatttgccagtgcaatgtcttttccggcttcaatcgctgcaatcgtcgggcggatgccaagcatgccaacaatcgctgttaccagaacttctgctttttcttcacaagccactgccatcagtccgtccatgccagacagtaccggaatatcaagatcactgatacgaagtgccagttctttcgctttttcttctgtctttaccgctgccagaaccggtttgaattcacgaatctgctgctccagcaggtcaatgttatcgcctgctgataatgcggttacttttatatcctgttgtgcacgcacaacttccagtgtctgggtaccgatggaaccggtggaacccagaatcgctatatatttcattcctcttattcctttctcttgaaagttttaagttaaaattcgcacttcacatgctaaaaaatgatagtctaaatacgcattttcaaataatgtatgtgaaatgcagcacttttaaatagcaagctgtaacagattaccagtcagatagaaaatgatcggtgcagtaaaaatgacactgtcaaaacgatccagaataccaccgtgacccggaatcagttttccataatctttgatatcaaagttacgcttgatcgcggaagctgccagatcacccaccatggagatcagtgcgcctgccgcacagatacctgccatcataaaaatatatggcacatctacatgcatagaaccacggaataagaatccgtaaataagtgtcagtaatgcagctccaaccacaccgccgacagcaccttccactgattttttcgggcttaacaccggtgccatcttgtgttttccaaagagcattcccacgcagtatgcacaggtatcgcagccccaggagcacaaaaagatcaaccataccagatatcttccgccctctaaagaacgtgtctcataaatgcaggacagcataactgccacatagaacacgccgaaaaatgtagcaatgatctggttcgcatgaaatttcggatagccaaaaacaaacacgcacatacacacgatcagcaatgccatcacaaacatcataatatccgggataaaaccaaatgctacattcagataatatacaatggctgccacatagcccacgattcccggtgcacttttttcaattccaaatacacggtacagctcaaacagtccgatcagggagataattcccagtacggtcagaagcaggtatcctccgtgtataataaatagcaatgccagcagcaccagaacgataccactcaacagtcttgtcttaaacatattttttcctctcttacattcaggtatttctttaaaaatccctttttatcatcaaccacatatgcaaaacttatgctaacccaagttatacacaagctttcatttcaagaatgctccggcattcttgttgcgaggtgcgcgtcatgcaattgcatgacatacttcaactgcgcacctctgtactcctgccggaggctatatcagatgggggattggctcccatctgatatattcggctcaaattccgttacgcctttaccttaccataacgacggtcacggcttgtataagcctcaatcgctttcaccagctctgctttattgaactccggccatggagtatccgtaaaataaaactcactgtatgcatgctgccacatcagataattagacagtctctgctctccgctggtacggatcatcagatccggatccgggattcctgcagtatccagataatctgaaaaatgtgcttcatccacttcctccagtgtgatttttccttctttataatcctgcatcatctggcgcatgccgcgcagcatctcatccctgctgccgtaattaatcgcaatctgaaactgcagaccagtattttttgcggtgtcagtttccagtgtgcggatactttcctgcagatcttctgccagaccggtcttgtctccgatcacgcgcactctggtgttatttttcatcgcttttgtatagcagattttaatatatttacggaataaaaacattaatgtctttacttctgattccgggcggctccagttttctgtggaaaatgcatatactgtcagatatttgataccaagtgcatctgcatcctcacagatatccatgatcacatctgcgcctttggagtgtccgtaagtacgcggcatcccctttgatttcgcccaacgaccgtttccatccatgataatggagacatgggtcggtatcttcaactgtgaaagttccatatttttcccctttctcagaaaaggacatagcctgcgccatgtccccatctttcttatctttccgatttttcagatcagtcaatgccattcatctgtgttcgattcgattatgaatttctatgaattgacatcagcaaaatactgtattttgctattatactgtcatgatctcttttgttttctctgcaactgcagcgtcaacatcagcaatgtatttgtctgtcagtttctgaacctgagtctccagatctttgatctcgtcctcagatacatcgcctgctttacccattttctttaaagcatcgtttgcatcacgacggatgttacgaacagcaactttggcagcctcgccttttttctttacatctttggcaagatctttacgtctctcctctgtcagctccgggaataccagacgaatacattttccatcgtttgtcggattgattccaagatcggatgtcatgattgctttctcgattgcttttaccatggatgcctcccaaggctggatcatgatcatacgtgcttccggaacagatacgtttgcaacctgctggattgctgtcggtgcgccataataatctacgcggatctgatccagtacatgcggatttgcacgacctgcacggatggatgtgtactcctccagtaagttgttgtaagatttctgcatctttgtctcataaggtttgattgtctcgtttgccatattttaatcctccaaatattttctttttaccttctgatattacttatcttatatggattatacggttactttcgttccgttaaaatcgccgctgattgcttttacaatgctgttctcctcgtttaatccaaatacatacatcggcattttattttccatgctcaggatggatgccgtcagatcaacaactgccagctgtttgtcgataacttcctgaatgcttacctcatcgtaacgttttgcatccggatttgtcttcggatcactgtcatatacaccatcgattgcttttgcaagcaggataacgtctgcctcgatctcgatggcacgcagaacagttgctgtatctgtggagaaatacggatgaccggttccacctgcgaaaaatacaaccattcctttttcaaaatatttgtttgcacggtctttggaaaacagttttgtaaaggaaccgcactcgaacggtgtcagtacgtttgtcttcattcctacggaacggaagatctcagatacataaatgcagttcataacagttgcaagcataccgatctgatctgcttttgtacggtcgatggtctcgctggtacgtcctctccagaagtttcctccgccgattacgataccgacttcaattccctgatctactaactgttttacctgatttgcaacaacggtaacggttgcctcatcaaaaccaaattttttatctcctgccagcgcttctccgctcagcttcagtaaaactctcttcataagaattctgtcctttctttttatttactttcattattttgtgatcacatcacgctataatttcgctctttatcaatcacattgctatgttgactcacttaaatgcattctctcataaataacattcatcacttgtcaatcataccaacccattgactcatttgaaattattataccatacctttacatattatggtagcgaaaattactcgcagtaaacaccgccgcatctttcaatacatgcctttgccactacgttcatggcatcaatataaaagtccggattcaggctgtaattgacatttaatacagataactctgtacatgcaagaatcactgcatcacagccctgtccacgcagttcatgcaccacgttcataaactgatgacggtcacctttctcaccacgtttgatctgctcatagatcagagacataacatctttctgacgttcttctgacggatataccacttcaatgccatatttttccagtgcttttttgtacataccgcccttgaccgttccatctgtcgccataacaccgactttctttctgccccgctcagatgcgtaacgtgcagtctcttcgatcatgttgatgaattttccgtttgtcagttcctgcagacggtctgcaaaataatgacaggtgttacatggaattgcaaaatattcacatccaagctgctccataccgcggatatcttttgcaataatgtcccacagataatcctgctttccacacaaaatgcattccgtacgatccggaatcgacgcatgattataaatgagaatgtccagatgctcacggtcattgtttaccgaagtattatcgataatctttttataaaaaagcaccgtagcttctgatcccattcctcctaaaattcctaatttctttttttccatatgcttatggtttcctttccttatgcttatggttccttttctttataaaaggtaatatttttcttgcaaaaatgtatcataacacacttttccgctttcgactatatcaaatctgttttttagtgtcaactacatgcgttttctgacgaactataacataattttttccgggaaatgaacttgtataaatgacgcatctggtataaaatagtgcaggaatcacaatagaaataattggaggattatagatatggaatttaaaaaacagcccttcataccaatgctttttggcggcgacatcaatacatacagtgttgcccgtgcattttatgaagaatatcaggtaaaaacctatgtatttggaaagtttccaagcggtccaagttacaacagtaatattattgaataccatgcaaatttaaaaattgatacagacgaagtatttatgcagaccgtccgcgattttgccgctgcgcacgcagacaaaaccgtccttaccatcggttgcggcgattcctatgtagcactgtgcagccgtcataaagatgagatgccggaaaatgtcattgctccgtacatcgattttgagctgatggacagactgcagcagaaagaactgttctaccgtctctgccgtgaacacgatattgatttcccggatactcttgtattccgtcacggcatggatctggattttgaactgccgttctctttcccggtcattttaaaaccgtccaactccgttatgtattgggagcatgaattcccgacacaggaaaaagtatacaaaattgataacgacaaaaaattaaaagacacgatccgtcagatctacgatgcaggatacaccgattccctcatcattcaggatactattcctggaaatgacgaattcatgcgtgtactgacctgcttctccggaaaagacaaaaaagtaaaaatgatgtgtctcggacacgttctcttagaggaacatacaccacacggttccggtaaccatgccgtgatcatcacagaaccgcaggaagaactgatgacaaaggttaaaaacctgttagagactatcggttatgtcggattttcaaattttgatatcaaatacgatatccgtgacaaccgctacaaattctttgagatcaacacccgtcagggacgttccaactactatgtgacaggttccggtttcaacgtagcccgttattttgtcgaagagtttgtatacaacaaagacattccgtttaaaattgcaaaagacgaacacctctggatggttgtaccgaaagcagttgcccgcaaatatgtacatcaaccggaaaacaaagaaaaattaaaccgtctgatccgggaaggaaaagttgtaaatccagtatttatgaaaggcgatttcaactttaaccgctggctgcgtatggtcaagaaccacttcagccacttccgcaaatttaaaacatactaccactaaaagcagagaggaatacttatgattacttatacacagcaggattatctgaataccctgacagacgccggtcttgtgacagacagcaatctgtatggtcatgccgctgattccgttcagggattaacttacaattccaaagaagcggcatccggaaccttatttgtctgtaaaggagccgctttccgtccggaatatctggcagacgcggtttcccacggcgccactttatatgtcagcgaacagaaatttgatctgaatacagaagttccatacattttagtttctgatgtcagaaaagcaatgccgtaccttggcaaacttttttataacgatccgtccaaagatctgaacctgatcggtgtcggcggaaccaagggaaaatctaccaccgcttactatgtaaaagccatcgtggatgactatatggcaagcctcggcaaaaaagagagcgctgtcatctcttccatcgatgtttatgacggtataacaaaagtggaatcccacatcaccactccggaaaatatcgaactgatgcagcatttccgcaatgccgtagattccgggattgatttccttgaaatggaagtatccagtcaggctttaaaatatggtcgtgtggagcagatcatgtttgacgctgccatcttcctgaacatttctgaggatcatatcagtccgatcgaacatccggattttgaagattacttctcttccaagttaaaaatgttcgcacagacaaagaatgcgctgatcaatacaaactctgattattttgagcgtgttgcagaagctgcaaaagcagctccaaatgtaattaccttcggtacaaacgaaggcagtgacatttacggatatgatattgaaaaagtagaccatgaaatccacttccgtgtaaaatgtgaccgcttcgatgaggcttttgcactgaccatgccgggactctttaatgtagaaaatgctttagctgccatcgctgccgcttatgtattcaacattccggtcgagtttatgaaatccggtctgtaccgtgcacgttcctcaggaagaatggaaacttatatgtctgcagacaagaatatcatcgccgttgttgactatgcacacaacaaattaagctttgacaaactcttctcttccaccagaaaagagtatccagattacgatatcatttccattttcggctgcccgggtaaaaaagcatttatccgccgccgtgaccttggaaccatcgccggtatgtactctaaaaaagtatatctggttgctgaggatccgggtgcagaaccggtagaacagatttccaaagacattgcgcagtatgtagaggcacagcattgtccgtatgaaatgatcgaagatcgtggagaagctatccacaaagcgatcatggaagccgaaggaaaaaccattctactgatcacaggaaaaggaaatgaaacccgtcagaaatatggcaccgaatatctggattgcccgtctgatgtggaatatacgaaaaaatacttggctgagtacgatgctgctcactaagttttttactgacaataattgaataacaaacaggtagtgtaaataattcaagtcgaacgcacgtgagacttggtgcgtgattctggtcagcgaaagctgacatattcttctcagaa

SEQ ID NO: 13171 - DNA, 746 bp, Unknown
  gut microbiota DNA sequence
ttcctcgttgcttacacatatatgctttcattatttctatattatcatcagcacttcctgactcaatagccaacttttctgaagctatgtatgtttcaagcggaactccaagcaatcggtcagaaccaagttctgctttcaagcccttcctattagaataataactgacagccaaagcaggaaataaagataaatactcctgctcacaaattcgacagcctttattcaatatcgttctttcatttatcttcatactccatgaatgaccgtgcctgcacttccaccacgctctctttgcagaatttcgtgatacttctgtcggcttccatttattcttttcataatcccattcgctaagaagctgactatctgttgtcgccaaatcattatatccggcaaggacttctctctccgcacaaacagggcataccgtacctttcacacgggcattgataactgatttccactcgttaccgcatttactgcatctccaccaaacatttttcctcgactttgcatttacttcatcaggcttcaatgacaagttcttctccgaccactcagacgcaatttcagggtgtgttgtctgcaaatcgttaaaccctttcaggaatatgtacccactgcaatacgggcatttgctcccaccggaacgggtagaaataagggtgttccactctctgccgcaatccttacacttccaccaagccttacgattggcaaagaccgtaacctgagttggaagt

SEQ ID NO: 13172 - DNA, 280 bp, Unknown
  gut microbiota DNA sequence
aaccgacagaggtttctattggttctcataagaaagtgatttggagatgtgagaaaggacacgagtgggaagttgccgttaagagcagaacaataaataaaacaggttgcccgtattgctcccataataaagtgttggcaggatttaatgaccttgcaacacttctgccggatatagcagccgagtggtcggacagaaattatccgttacttccaactcaggttacggtctttgccaatcgtaaggcttggtggaagtgtaaggattgcggcagagagtg

SEQ ID NO: 13173 - DNA, 850 bp, Unknown
  gut microbiota DNA sequence
cccgagcgctcaaaaactacgatttctgcctgctcatttagtctgcgaatacgggcggcagcagtagcaccgccagccacaccgcctacgataacaactttcatatcagcgttccacctttcctgcataagcggaaattccgcctatgtttttcacattggtataacccatctgctgcaaaatagcagctgcctgacggcttcttgcgccactgagacagtgtacaaagatgggggtagctttattgttaatcatgacggttactttgtcaatggactgcaaaggaacattcttacttccggggatatgcccctgccggtattcgtcaggggtacgaacatccagcaggactgcgccatccgtaacgctatattctttgacaccctgattgatgtcagggcctttcaggaaatcgaagaatcccatctttgcacctccttacagcatggcgagaatctgagccttaggtctggcaccggtggcctgatttacgactttgccgttcttcataaccaccagagtgggaatgctcatcacaccaaactgcatagccagttcctgttcctcatccacattaattttaacaaccttgatatcggagcgctcctcggcaatttcctctaccagaggaactaccatgcggcaaggaccacaccagggagcccaaaaatccatcaggacgggcttgtccgagttcaaaacctcttgattgaaattgtttttatttacattgatagcagacatatttaagtcctcctgttttcttttttatggctttagtatatccagtagtcgttgctttttccgtgattttgtcacttatcgccggcgacggtttcaccgggccaac

SEQ ID NO: 13174 - DNA, 289 bp, Unknown
  gut microbiota DNA sequence
aggatacaaaggctgtacgagatgaaatgaatgaattattagcacaatacaggagggaaaaggaaaatgcagaaacacgataaaatggtagcactggcaaaagaaaaaagtgcggaaatgacggaaacagcaataacagctattgaaacaatgtatagaaaaaatataaaaatttcagttgctgaacttacaaaactaacaggactttccagaggttttttctataataatccgaatgtgaaacaggtcatgatggaattgaaggaaaaacaacagggaatgatattgc

SEQ ID NO: 13175 - DNA, 452 bp, Unknown
  gut microbiota DNA sequence
tatccaatacagttcattatcctttcgtgtatatcatttccgtcaaaatcatctcttctgcatcatgacaaatggtattcatcctcctagtccattccatgttgtcctgtctttttaatttctctgtaattccttgtttctccatcatctgttttactaattgttcttccctatcccttgcttctgcatcaatctgattcaaatgctcaacaagttttccttgtaacaacaatatttgatattttgcccttctgtgttcctgtaaatagcttttacgaagcatcccatatttcccatatgttggttcaatatctttaagtgccaattccggcaaataataatcaccacataacatataagtaagtccatttttctcatcgtaaatttcgttctgcataaaatattctccttttcttcctataattggtcgtacatcttcaacagtgttccct

SEQ ID NO: 13176 - DNA, 175 bp, Unknown
  gut microbiota DNA sequence
attctccttttcttcctataattggtcgtacatcttcaacagtgttccctttttcatttgactatatttcacttgtaattcttcatattttttctgtagattctcatattcgtttttcggaacactatcggataatttctgttctaaactcttaatccgtgcttcctgtgctttt

SEQ ID NO: 13177 - DNA, 2826 bp, Unknown
  gut microbiota DNA sequence
agcacttcgtgccacactacgtgcgccatgacgtaagggtaagcagtgtggttttcacacagtctggaaaaagggactctggctattttttctcgaccagcaattgttagcgggcgagaaaaaatcgcagagtcccttttcataacctatctaaaaccacacaattacccgaaaacgttttatataatataaaaccagttctcatcctgatctaaattactgatctccatggtcgtctttccaccctgcttgaactgcaattcctgtcctttaatgctgacagtcgttcctgccggaatagatttcgtaataaacgcattaccaccaatgacagaatctcttccaataaccgtctcaccgccaagaatggaagccccggaataaatcgtcacattatcctcaatggtaggatgacgttttgcatttttcagcttctgaccacctctggtagacagcgcgccaagggtaacaccctgataaatttttacattgtcaccaataatcgttgtctcaccaactacaataccggtaccatgatcgataaagaaatgttttccgatcgttgcacccggatgaatatcaattccggttatactgtgtgcatactctgtcataatacgcggaatcaacggcacagaacggataaacagctcatgtgccagacggttgatggtaatggcaaataatcccggataagccaaaatgatctcaccgtagctgtttgctgccggatctccctctaaggctgcctgcagatccccttccagatattcacggatcttcggaatctgacgcaggaaatctacggtaatctcgtaactttctttttcaatctgctcccggcattttccatccagctttggacagaacttggaaacttttgcaatctgccggctgagacgatacaacacatcctcgatcaaagttgataaatgatggtttgcatgatagcttttgtatgcacggtctctgtaataacccggataaataattttcattaatttttcaataatatcaataataacttctttatttggctgatcataaaaatcttccattttatcaatggtacgatccagctcataatcggcaaggatggaatccagaatttctttcgcttctcttccttccatatttctactcatatctgacatactgttcacctttttctttctcaatcaatttattctctatattctcggattagaaatagctttctgatttttatatcatctttttctcggaactcattttcacgtttccattattcctatatccattccagacaatcatttttataaatctgttaccggaaatccccacggtctctgaccagttcatatccgacactttccactctgcggcccaaacatccacgacattctgccgcttcctcaccggtacagatcttattatcatacagatcatactgcttgcggtttttcaccggtgacaggtttggcattacgacatttgcgccatgctgcaatcctttctctcttccgagtggatctgctgttccaagtgccgtagttgccggaagcagtacatgcggcagcatgatacgaatcactgacagtaaaaataacgtcagcggaacacttccggacggctcctctgcaaacatagtatcatgatgcggaataaacggaccgataccgaccatctgcggttccagttcttttaaaaataccagatcatccgcaagcgtctcttcggtctgttccggcgaacctaccataaatcctgcgccaacctgatagccaagttcttttaagtcatacagacactgcttgcgcactgccagactcatctcctccggatgcagttttcggtaatgtgcatcgtttgctgtctcatgccgaagcagataacgatctgcgcccgcttcccggaaacgtttataactttcataggatttttcaccaatggataatgtaatcgcacagtccggataaccggcacgaatctttttcacaatatccaccatacggtcatcgttataatacggatcttcaccgccctgcagaacaaaagtacgaaaacctaactcgtatccattctcacaacaggctaaaatctcatcctctgtcagtcgataccgttttgcattctgattgcttctgcggattccacagtaataacagtcatttttacagtaattcgtaaactcgatcagacctcttgtatacacatcagtgccatagacctcttttcggatgcagacagcttctgctgccaacagcgcatccacctgcggatcatctgccattttgatcagttccacaaattcttctctggttaaattatgttccctgattaatttctgtgctgcattcattgccttacttccccttttataaccctttttacttcatacattttcttactttaatagtcggatttttaccggattttcttcttcaacatccagtacccaaatatcaaaatgttcacttatcaatattttccaactacctgtcaacgtcttctagctatagcgttttgcaatctccgtctcaataattgttgctccaccgacaaccacatctccgtcatataaaacaactgcctgaccacaggtaatcgcacgctgcggctcatcaaatacgacgcggatcttgtccggttccggctgcgttacggtcgcccactgctcctcatggcggtaacgaacctttgctttcacgcgcatttctccttcgatatgatccacagaaatcagattcacgtcatttgccacaaattctctggaaaacagatcatcatttcttcccaagatgacccgatttttctctggatcaactgcaacaacgtacatggact

SEQ ID NO: 13178 - DNA, 12671 bp, Unknown
  gut microbiota DNA sequence
attgccttccagatctacaaaatctccctccggatacgtcttttcacgatactgctcaataaaatccgaatattttccgtttacaacaaaacagatatcctgactgtcatgctttctggcattaataaatccctgtgcctctgcgatttctctggcttctgtcttgtgcatgccacccaacgggaactgcacatgtgccaactgatcctgcgtcagagaatacagaacataactctgatctttgctcagatctacggattttttcaacaaataacgtccggtttcttcattatattcaatctgtgcataatgaccggtcaccacataatcatatgacaactcttttgcacgctggaacaatttttcaaatttcagataacggttgcagtcaatacatggattcggtgtacatccattttcataagaacatacgaatttttccatcacttcttctttgaatcggtcggaaaaattaaacacataatatggcatctcaagtgcgcgggctacacttctggcatcttccacatcgtctaaggagcagcaggtatgctctctgcatacaaccacatcctcattctgaaacagcttcatggtagcgccgatacactcatatcctttttctttcatcaaaaaagcggctacgctggaatcaacgccgccgctcattgcgattattgcttttttattcaaaggctacgtctccttttatcatactatttaaaaatccttcggatcataacaacttcaagtcaaacgcatgtaagacctggtatgtgattctggtcaacgtaagctgacatattcttctcagactcacgatactcctacacatttgccataatcctatgttatcctagtattatagtattttttactgataaaaatcaagtagtagcacatatttataccacaaattcatcatatatttcactacagctcactcatcacctgcatagtggtgcttgaaccgtaaccatatttctagcgctgttctgcttcttccacatacaacgcatgaattttatccccggcatctttcagacactccatcaaaatcggattaaacacaccgcactcgccattcaggatcatctgcattgccacctcatgcgggaacgctttcttgtatacacgttcgcttaccagcgcgtcataaacatctgccaacgcaacgatctgtgcagcgatcggaatctcgtctcctttgagtccatccggatagcccctgccgtcataacgttcatgatgccagcggcagatctgataggcaatcttgatcatcatctcattctgataaaattccagactatccagcatggacgctccgatgatcgtatgtgtcttcataacctcaaattcttcttttgtcagcttgcccggtttgttcagaatcttttcgtcaattccgatcttgccgatatcatgcagtgcagacgctgttatgatcaggttctgctgctgacgcgccgatggataacgatcggttttctgaagcagaaaatcgatcagaattcctgtcagacggttgatatgcagtacatgcagaccgctctcaccatttcgaaattctacgatctggcttaacacgctgaccagcatctgattattcttctctttttcatacatctgatccgttacaagggtgctcagacgacgctgctttgtatacagcttaatcgtattaaacacacgctgataaaccaccttcgcatcaaatggtctgctgatataatccgatactccaagttcgtaggcatgacggatatagctttccgaatcctcactggagatcataaccaccggaagctcctcaatccagtgctcacggttcatatgcgccagcacttcaaatccatccgtcttcggcatcacgatatccagtaataccaatgaaataccggttccatactgctgcatcatttccagacattccacaccgtttgatgcctccagaatacggtaatccttctccagcatatgggaaaggattgcacggttcatctccgaatcatccacgatcaggatcatctgcttgatatcctctcgggtggtattctcctcgccattctcatcataggtgatgttttccgtcacaatcatatttttctggttctttgcctgatacatcagctgatccgcacgttttaccgcactctcaatgctttcttccccggtcaggactccgccgatgctcacggactgctgaattctggaatatcccggaatggaagtctgcaccagatccgtcttgatcttctttaacttctttaaaaattccgtttccttcatatccggcaagatcagcagaaactcatcaccgccatatcggatcagcatatcgctccgtcggatattcttgcgaatgacatctgctgtcgttttcaaaaccagatctccgacttcatgcccgtaggtatcattgtaaagtttaaaatcatccagatccagcattgcaactcccgctgcaaaatttttctgttttaattcttcctcataataacggcggttgtatgcttccgtcagcacatcccggtacactttttccttgtagccaatcagcttattgaccagacgctcccgctccagcgtatccatcacactgttgtcatgcagacgcttaaacatctcgatcacatacggctcaccgtcaatctctacatatctggaaatcacaaaatagacatccgtttccagaatctccagctttgtattctgttttttcgacagaaacgcttccagagaactgcattggtcacactgatgttctttttgcaaaaaatcatgccactggcatggtaatttctgacgttccacctgctgtctctgtagttgttccatatattgtttatccagaagacgaacttcagagaaaatctctctgagacaggctaactctgcctctgcccgttctctggtcataatatcctgttgcttcatcattgcccctcatacacgttacattaattctgcaacttatctttttcttttgccagtaattatgtaactatcttaacacattcttctgataaaagatacgtcaatcgcattcaagtcgaacgcacgtgagacttggtgcgtgattctggtcagcgaaagctgacatattcttctcagaatcactgcacatccccgcggagcgtttatctcagtcgaagattgtactcccactgagaaagacttgttattacttaccacttgcagaagtgggagtcttctcgactgagataaaatacctgcatcatccgtcaaaccgcatcttttttctgtctgcggcgcaaataagaatatgcaatcagacagatcacgacagatgtcagtgatcccgccgctgtcgccagtcccatcgggaacagcgtatccgggaacattttggatgtcagataaacccccggcacacgcaccagcacgattgctgtaatattgtgaataaaagacagttccgatctaccgcaggcacaaaaatatccgctgaagctgaaatgaatgcccgcaaaaatgcaatcccagatataacctctgatatactgtgtgccaagtacaaccactgccgcgtccgtagtaaacagtcccaccaccggtgctgctgcaaactgaatgatcacagatatgatcacgccaaatcccaccgtgatcataatggaataacgcagggtctggatcgcccgctccggttttccggcaccgatattctgagctcccatcgcggagaccgtcgacaacatggaagatggcaccaggaataaaaagctgatgatcttttccacgattccaactgctgccgcatcacttaatccgcggcggtttgcaataatggtaatgacgataaatgcaacctggatcagtccgtcctgcaaagcgatcggaataccgatccgggcaatctgccccatcgcctctttttgtggaataaaatcagtctttgtcaccgtgatcattttccgtttcaggatcatgatcagtgcgatcacaacactcaatgcctgtgccagcgtcgttccaagtgccgctcctgccggtcccatctgaaatgctcccatgaacagataatccagaccgatatttgccgcacatgcgattgcaataaaatacatcgggctttttgaatccccaaatccacggaaaattgaactgatgatgttgtatgcagtaatacacggaatgccgataaagcagattgtcagataagagaccgttcctgccacagcttcttccggtgtagacataaccgctacgatcgtcttaacgaaaaacagcaatactgccatcagcacaacagaaagcaccataaataatactacggtatttccaactgttttcgatgccttttcccggtttccggcaccaactgcctgtccgatagtaaccgttgttcccattgccagtcccaccagcataactgtgatcatatgcatcacctgactgccgacagatactgctgttgtgcttgctactccatcaaactggccgacaatgaacagatccgccataccatatagtgtctgtaaaaaataagataacagatacggaagtgaaaaatataaaatattttttaacacacttcccgtcgtaagatttcgttccataaataatactgctccattctatcatttttccctgtttttcttttcagacatgcatttctattatagcgcagtttcccggcactctgtcaaatcttttttcacactataacagtcaataccgtaccataagcaacaaaaccgttcacttcctgtaattttataaagcggacatttgcaatccacttttgctgcctgcgcatgaacatcgtcgctttacaatctgcattgaaaaaaatacgaagctgtgtggtaatttttcaccacacagcctcgtattttttactgtataagcatctgatataatttttgtattataattatactttctgatgttttgctatatatagtgggaacgtatctgcccctttaatttcttttccggcagtcactaccgcatctttatccgtaatcacatattctgcttttacattctcctccacaacagtatcctgcatcagcacacagtttttcacaactgcgcctttaccgatcttgacaccacggaacaaaatacagttttcaaccgttccctcaatgacacatccatctgctgccatcatattttttacagttgcaccagcaatatatctggtcgggttatcatctcgtaattttgtataaatctgtcctcctgcgaacagtccttccagattttcatccttcagaagcttcatgttctcctcaaaaaagctatttctgtcacaaattcgtgcataatagccctcgtatttatatccatggatatgaatcttatccacttcattggataatacatcacgctccagatacgtctgtccatgcacataagcttcatttaccagatcaatcagatattctctgtcaaaacagtaaatattcataccaagattctgtacaccatcttctttgcggttgatataccattttgtaacacgaccattctccagtttgaacgtatagaacatatcctttctggaattctgcgcatttaccagtccttccggaacttcctgctctgtataggctaccgatacatctgcgccgctttctctgtgctcattgataaattttttaaaatcaaaattaacagcgatattcgtatctgcaatgatcacatatttttctttctgtttttccagataagaaagtgtatgttccaacgcctcgatacgtccgtcatacagatgcatgcctttctctgcatatggcggccaaatcgtcagaccaccgttcttacgaaccagatcccactcacgaccggaaccaagatgatccatcagagaatgatatttctcgcgaaccagtacagatacgttgttgattccactgtttaccatactggaaagtacaaaatcgatcatacgataacggcttgcaaaaggaacagagcccatcagccgctcgctgaccatttccgggacaagagaatcatagtaattcgggaaaataattcccagtgcgcttgtattagactttaccattcttcttcaccatcctttacattttctcgtaccatggcattggaaccaacggttgctccatcacccacataaacgcccggtccaatggttgcaacacctttttcttcgccttcttttacgacaccaatcttcgcattttcaccgataactgcattttcaccgatgatacagtgttctacgactgctccggatttgatcaccgttccgcccatgacaacggcatctcttacaactgctccctgtgcaactttgacaccggcaaacagtatggaatgttctacctcaccatcaattcgacatccgtctgtgatcatagagttttcaatctgtgcatgcataccaatcttatgaccggtcataccactgtttcgactgtagatcttccagtcatcttcaaacagatcgataccactgtgctgcggatccagaacttccatatttgcttcccacagagaagaaatggttcctacatccttccagtaaccactgaagcgatatgcatacatatctctgccatcccgaagtaaattcggaataatgttattaccaaaatcattttctgactccggatcagcttcatcctcgatcagatacttacgcaatacatcccagttaaaaatatagatacccatggatgccagatttgatttcggattcgccggtttctcctgaaactctgtgatcttgtcattctcatctgtaaccatcagtccaaatctggatgcttcttcccaaggcacttccataactgccacactgaactcagcgccttttttcttatgaaattcaaggaaatcgttataatcctgcttgcagatctggtctccggaaaggatgatcacgtattttggatcataccgctcaataaatgagatattctgataaatcgcattcgctgttcctttgtaccagtcagatccagatgccttctgatatggcgggagaacatgaacacctccattcaaacggtccagatcccatggctgtccatttcctatgtactcattcagtacaagcggctggtactgtgtcagaatacctaccgtatcgatacctgaattgatacaattggataacgggaaatcaataattcgatattttccaccaaacggaactgccggttttgccagtttctgtgtcagtgcatataatcgtgagccctgtccaccggcaagcagcatagcaataatttctttttccacttcatatccccctctgaaaataatatatatcccctgcttctaataaataaattagtcattgcaggtaatgcatatattatactgcacatttactaatttttaaagtaaattctcatgttttatgaatattttttacaatattttcaaacgcattttatattttttcattatattatacaaatcagcagtgtttttcttgtgttttattcctatcgtaaaaataggttttacatttggtaaaaacttcccattgtaaatcgaaaaaggaacagctgattcctcagctgctccctcatgtttcaccatatgtttatctgtaaatgatatcttctctgcccggtccgttggaaaccatagtgatcgggaatccgatctgctcctcaatgaactctacgtatttacggcagttctccggaagatcttcgtattttttgattccgcggatatcgcatttccatcccggtaatgtctttaataccggttttgctttctccagttttgcagtggtcgggaactcagtggttacctcgccatcgatctcgtaacctacacataccggaatctcatccagatatccaagtacatccagtactgtaaatgctacatctgtcgcaccctgcagacggcatccgtatttacttgccacacagtcaaaccatcccatacgtctcggtctgcctgttgtagcgccgaactcaccgccgtcgccaccgcgtcttctcagctcatcagcctcatcgccaaagatctcgctgacaaatgcacctgcgcctactgcacttgagtatgctttgcagactgtgatgatcttcttgatctcgtatggcgggatacctgcgccgattgcgccatatgctgccagcgtggaagaagatgtaaccatcggataaattccgtgatccggatcttttaatgtaccaagctgaccctctaacagaatctctttgccttctttaattgcattccacagataagtagatacatcacatacatacggctctaccatctctttgtactggtgcagagtctctaataactcatccggatcaagcagtggtttgtgatacagatgctctaatgtaacgttctttgtctcgcagacacgaacaaccttctcttttaaaagctcctcgtcgaataactcacttacctgaaaaccgatttttgcatatttatctgagtagaatggtgcaataccggattttgtagaaccgaatgatttaccacccagacgctcctcctcatactgatcgaataacacatgatatggcataaccatctgtgcacggtcagatacaagaatttttggcattggcacaccttttgctacaatgtcctggatctctttgaacagtaccggaatatttaatgcaacaccgttaccgatgatgcttgttgtatgtccataaaaacatcctgacggaagtgtgtgaagtgcaaatttaccataattgttcacgatggtatggcctgcatttgcgccaccctggaaacgaacaataatatctgcctcttttgccaacatgtcggtgattttaccttttccttcatcaccccagtttgctcctactacagcttttaccataattacagattcctccttcggcattataaaagacaggtgtaaaacctgccctttttattttccgttttactttatgattatacacgattctatacaagatgtaaaatcttttttctaatatataacatctatttataagtaaaactaatatttattcattattttatctgattgatacggttcttattttacaaaatcttctggattgatcttgtccagataaaaatatgtcatggtagcttttgcgatctcacggtcattctcatctgtgatcatgacatcatagacacacatttttttaccgatcttgatctcgcgtgactctccgatcaactttttgcagttcatcgccggacgcagataattgatatttccggataccgtagtcacatatctgccacggcttgttgctgccgcaccaccaacggtatctactaatgtgaacagtactccgccatgtgtggaaccgattggatttgcatgacgctcatccaatacgatctccgcttttgcatatccttcccggagttctaccgtctcaatcccggtatgtttgataaatcccatgtttctgatctgctttaatttctcataatctaccattatgcatccacctcgattgcttttgtcgctgtcactgccagagcacccggtccaatgtgacatgcaatacttaaggataacggattcagcacaatctcatgattcgggaatgcttcctgtacttcttttttgaactcttctgccgcttcaagatcatgggtatacgccatggaaatatgtacgccggtgccatctgcagaaccaaaacgacgctcacagtcatctttgatctgtttgatcatgatgtttttcgcctgttttacagttcttgcttttgcaaaagcatccagcttctcaccctggatctgcagaaccggtttcagtttcagcaaagtaccaagtgctgctgccgccggtgtgatacgaccaccttttttcagataatataaggtatccagcataatataaatactggactccatcttattctccatcagtttgtcgtaaatctcctgtccggatttgcctgctgctgccagttccatagcatccataacagactgacgctgtgttacggaaatacgctgattatctacaacaaatacttttccgtcgtaatcctgtgccagcatggtcgctgtggaacaggtactggaaagtccgctggacatcggaatatgaatgatctcatcatactcctcaagcagttcgtcccaaagatctgtaaaatttgttaaaacaggggtggatgtgtgaatatcagcaccttctgtcaatctctcataaaactgttcctgggtcagatcaatatcctccagaagcatttcttcattaatataaaacggcatcggcatgacgcggattccaagttcttttgcctgtgcctgagtaattccactgttactgtctgtcacaatcgctactttactcaaattttcattcctccgttttttctctctttactctcatacataattctcatcagtattacaaatagtaacacaccacaagtaaaaaaacaaccgctcgcccaaaagaaactttttcacttttccttttttcctataatatagggtttttacaccaaaaaagagttctgaccagtcaaaaaactctaatatccgatcaaaactctttttattttaattactatttatacttactggaataattcgtctccgctcttgaaaccgaacgcaggatgataatcaaattttacagctcctaccggaatctccggcccaactgccttcttgatccgtgcaattccttcgttaccaaaccctgcacacaactcaatggcaccacatccgtttgcaaccagttcctttgctgctgcttctgcctgttcataagtagaacatcctacgacatgtaacgtaagtgtctcagacgggatcactgctttctgctcctgtggattctgatccggtgctacataaataaaagctgcattaatcatgatattttcctcctcatgtttctcattcagatgcagatcatcggttttgaaatatacaatcttccgatattttgaacatctaatatcctgacaatattcacccgatgctccgttcttcttcattttaatacaggcgaaaagacttgtaaagtccacataacctactttccttccttattcccgcagatttcctccagattcagaccataccgtgccgcaatatctctggcataactgagtccatccggtgtcgtccgactgatccgataacttctgacaccctgcgccacattatccatctgtgccaccagattatcaatcttgcttcggtttcccgggtaagaattatattcctgaaccttcatcggcagatcatgaatatgtgttacaaacaaaccgcagcatccgatcacaccgattccggtcaacacctctgatgcaatatagccagcttccaaaccactggtactggaaaaagattcatccatcaaaagcatgtccgtatccgataactgttttaaaatctcactgagacgggcgcactcactctccaaacgaccttttccgtaattattctcatccgacaccggaaaatgcgtaaaaatcccggtcaccgggctcatttttgcccgatgtgccggcacaaaaagcccaagctgacacaatgcctgtgccataccgatagaatatgcaaaaatagactttccgccgtggtttggtcccgtcaccagataaaaacgaccgttttcatccagttcaaaccggttggaaacaactgttttttctacgccacgcatagcaagcatcggattgtatacctgctctaattcacacacccgatcctttaccggacaaatctgtggacgacacatttcaaatccttttgcctgcatatccagaataaacttcacacctgccgtcagaaaccgaatatcgtccagaagtgccgcaaacaccgccgtatttgccttataataattctggatcatcggttcaaaagagcgcagcggcttctcaaaaatcgtctgcagcgcacttcccatcgcataattaatcgctttctgttcttccccgtgcaatcctttctgcaacggatacagcggagtcatcatcacctgccgatccgtcagacgatgtttcatcagcttgtcaataatgcttcccgcagaaaattctttttcattgacggaaataattcctgcttccttcggtcgcaggttgtcatccagattaattccaatggtcacacttttcagatagccaaaattcttgccggtggcttccatttcccgtttcagattcagatattcttcactctttgccacactgtataccagttcccggaaatttttcatgccatccgatgcaatatccgcccccgaatctttctcaatctccgaaaatacatttgcaaacagatccaccagttcttcatacatctccaagtagcgcaccgcactcaatgccgaatccacagaaaaatcgctgctcagcacccgacgcaattcactgacattctgaatttctgacaccgaactgcaaaacgcctgatacagctttggatgcttcaccagatcttccacgatcgcctgccgatattctaacacttccggatctgtagaaaaaaacttttccaatgtcagctccgaatatccacgataccggtcattttgcagcaccaccatatcatcgatctgtaatgacgtgataaaatcataagatttcatgcgcgcctgatcggattccttatatccattcggatatagtaaacgaaattctgtatccatagtttttcttctcctctactttcttcacgaaaaacatccccaaact

SEQ ID NO: 13179 - DNA, 828 bp, Unknown
  gut microbiota DNA sequence
aacaattttaagaaatgatgggtatgaaaaaattaagattgttgagattgactaaaaaagaattagcagacaggaaaggaaaagaaaatgagaaagaagaaaagcagaaaaagattaaaaggggcaggtttgatcggcctgattgtgatagtggctttggtcatcgtgtcccttgtttatgtaagcaattattatcatgtgcaggatcggcaggcggcgctggagagcacagatgatgtaaaggtagaggaagctgagtacggctactttttcgatggaccgggcaatgatacagccctgattttttatccgggagcaaaggtggaagatttagcgtacgcaagtttgctgaaacagctggctgtggacggaattgattgttatctggtgcatatgccgggcaatctggcgtttatggggatgaatcgtgcagataaaattatggaaacttacagttatgatcactggtatctggcagggcattctctgggaggggcgatggcagccgtttatgcagataagaacagtgaaaagctggatggactgatatttttggctgcgtattccacaaaagatttgtcagacacagatctgaaagtgttgtctatttatggaagcaacgatggagttgtgaatatggataaggtgacggaaggacgaaagttgatgccgtctgtttatgaagaattctgcatccagggcggtaatcatgcgggatatggagattatggtgcgcagaaaggcgatggagaagcggatatttcggcaaagaagcagcaggaagagactgcggagaagatcgtggagttttgcgagtagagtaggtgg

SEQ ID NO: 13180 - DNA, 4444 bp, Unknown
  gut microbiota DNA sequence
gaaagacaaaagaatataaagaaagacttgcaaaaggagagtctctggacgatctgcttccggaggcatttgcaaccgttcgtgaagctgcaaaacgtgtgcttggtatggagcattaccgtgtacagctcatcggtggaatcgttcttcatcagggacgtatcgctgagatgaagactggtgaaggtaagacacttgtttccacatctccggcatatctgaatgcgttggaaggaaaaggtgttcacatcgttacagtcaacgactatctggcaaagcgtgatgctgagtggatgggaaaagtacatgagttccttggacttaccgttggcgttgttttaaatgatatggatcatgatgagcgtaagaaagcatatgagtgcgatattacttacgttaccaataatgaacttggtttcgattatctgcgtgacaacatggttatttacaaagagcagctggttcagcgtgatctgcattatgcgatcatcgatgaggttgactctgttttgatcgatgaggcacgtacaccgttaattatttccggtcagagtggcaaatccacaaagctgtacgaagcatgtgatattctggcaagacagatgaaacgtggtgaggcaagtcaggaattttccaaaatggatgccattatgggtattgagatcgaggagactggtgatttcatcgtaaatgagaaagataaagtgatcaatctgacacaggaaggtgtcgagaaggttgagaaattcttcaagatcgacaaccttgcagatgcagagaatcttgagattcagcataatattatccttgccctgcgtgcgcacaacttaatgcaccgtgatcaggattacgttgttgcagatgaccagatcctgatcgttgatgagtttaccggacgtatcatgccgggacgtcgttattctgacggtctgcatcaggcaattgaggcaaaagagcatgtaaaagtaaaacgtgagagcaagacacttgcaaccatcacattccagaacttctttaataaatataagaaaaaagccggtatgacaggtactgccctgacagaagaaaaagagttccgtgatatctatggcatggacgttatcgagattccgaccaaccgtccgatcgcacgtattgacagagaagatgctgtatataagacaaaacaggaaaaattcgaagctgttgtaaaggaagttgtgaaagcgcatgcaaccggtcagccggttctggttggtacgattaccattgagacttccgaacttttaagcagaatgttgaaaaaagaaggcattcagcacagcgtattgaatgcgaaattccatgaacttgaggcagagatcgttgctcaggccggtgtacatggtgcggttaccatcgcaaccaacatggcaggtcgtggtacggatatcaagctggatgatgaggcaaaagctgccggcggtctgaagatcatcggtacagagcgtcatgagtcccgtcgtatcgataaccagctgcgtggtcgttccggtcgacagggagatccgggtgagtcccgtttctacatttctctggaagatgacctgatgcgtctgtttggatctgagaaactgatcaacatgttcaatgccatcggtgttccttatggtgaacagattgagcataagatgctttccaacgcgattgagaaagcgcaggagaagatcgagggtaacaactttggtattcgtaaaaacctgctggagtacgatcaggttatgaacgatcagagagagatcatttacggtgagcgtcgtcgagtactggatggagaaaacatgcgcaatgccatctacaagatgatcacagaccgtgtagaaaatacagtagatcgctgtgtatcagatgaagaggataagaactgggatgttgtagaattaaatgaattactgatcccggtaattcctatgcagccgttagcagatgatgagatccagagcctgaacgcaaatgagttaaaacatatgctcaaagagcgtgcagtgaaattatacgaagcaaaagaagctgagttcccggaggcagagatgatccgtgagctggagcgtgttgttctgctgaaaactatcgaccgtaaatggatggatcacattgatgatatggagatccttcgtgaaggtatcggtctgcaggcttatggacagagagatccgctggttgagtacaaaatggcaggatttgaaatgtttgacgatatgaccgcaagcattcaggaagaaacgattcagatgctgttccatgtaaaagttgagcagaaggtagagcgtgaggaggttgccaaagtaaccggaacaaacaaagatgattccacacagagagcaccaaagacacgtgaagcgaagaaagtatatccgaatgatccgtgcccatgcggaagtggtaaaaaatacaaacagtgttgcggaagaaaagcataaatacatcgttgctttgagtggcttttatacatctgtaaatgatagacaataatagattgttttcagagtaagtgctaataatgtggcagttgtatgaactgtataaaattgcagaataatatgtgaaataggaaaatggcatctgatagttgtatcatcaggtgccatttttgtgcgaaaacacaggaagcgttacgctcacgataaattgtttttcatctgtttgacggaaagccagtgtgccatgatgcagttcggcaattttttctgcacttttcaaaccgatccggttactttcaatgtcggaatgaaccggttttaccgcgttagaaagtatgatctgacaggcgctatttctcacagaaaactgcaaagtaaccggttctgatttgtctccatattttaagatattggaaaacagattttgaaataatcgtttcagggatgtttcgtccccattaatttgcccggatatgggggcaaaggttttcaatgtctgaaatcctgcaaggtgaagaaaatccaggtgttccgtgagggtaagctgaagatccgtgagagaaatcggtgtcaaaacaggggattgcggtggttcataaaccagtgagtattcaaacatacggtcagtgagctgctggatgtcctctgttttttgcagacagcgtcggatgtattccgattgctgatccggattgcgcccaagagccagaatatccaggtaaccgtgcaaaatagtcagcggtgtgcgcaagtcgtgggacatggcggtgatgagatcctgattggcacggcggctttctgtttcctgctgtatgttggtgtacagcgtactgcgcatctggtccagttcccgtgccagaatgccaagttcatcatttcccatgggacggattggttgatgtaagtcaccaccggacatttgcaaaatgtggtcttttagaatcccgatgtcctgcactttttttcgtaaaaacaaaagtggcagcagcaacagcagaaagagagcaactccgatggaaaacaggaaccatggaatggtcagcttggagttatggaaactggaaacataaagtttgccggtttcatttttgaaatcgatatctatttcgaaataatcttcaatcccattcagtggtaccacctttgcataattactatatgtgatctgaaagatcatctgggtaaagaagttccagtttttattgtgaatgatgtcagcggtatgctgtgtgcgaaagtattcgtcatcactaccgtaaatggcaatgccggtgtaggaatccagagaatcaaaaaatgatgcgaacgcatcctgttcctgtttattgttttcggaagagggcagatcatagttttttgcacgttctgtaagatctcttttcagtgcatcccgatccagatccataccagggatatgacggacaattttccatgcacagggcatcatatgccaggtcagggagaatccgccaattgcaagcaggaaggaaagcaggatggttacaagaaactgcaggcggatccgtggaattttccagagcggatttttgtcgtggaggatagaaaaatggtttgcgtgagatagtatcttttttcggttaactttctttgtcacagcggtagccccttccccagacagttttgatcaacgttggatttttcggatcatcttcaatttttcgccgcagatttcgaatatgaaccatgatgacgttatttgctccatagtaataaggttcgttccagatggattcgtagagatgctccgtggaaaaaatctgaccctgatgcgtcagcaataagcgcaggatggaatattccgtatctgtcaaatctacaggaatctcatttttcgtaacttcctgagtctgttctttcagtatcagctgcgcatacgtgatggtggaagtctgtgtgagaactgttggttttccctgatatacctgatatctgcgaagcagggcttttgcacggcttaccagttcggcataagaaaacggttttgc

SEQ ID NO: 13181 - DNA, 1507 bp, Unknown
  gut microbiota DNA sequence
agtctcacgtgcgttcgacttgaattttaaatatttcggacataagagaaaattcctttagaaagatggggggttgacatgcaggtgctaaaaaaatatcaaaaatacagaagaaaaagcttcctgtttttctgtgtgatactgatctgttcggcatatttgtggctggtggatgccattccggataccatatccattttacagggggaagaagtggcgctggcagaaggtttgccggtgacaacgaagcttgaaactacggacggtacgataacttcttccggaaacataaacggcagcagttatgaggtttcctgccgattattcgggattattccggtaaagtgcgtgacggtgcacattgtaaaagaagcacaggtgattccctgtgggacaccgtttggaatttatatccacacggatggtgttctggtggtggatatcagcgatattgtgcaaaatggcataacagtggaaagtccggcggcgcatattttgaaatcgggtgattacattacggcagtgaatggaacgacggtatcggagaaagaagaattgcagcaggcggtagcagaaagtggtggggaagtcttgtgcctttctgtaatgcgggatggcgaatcactggagtgtgaactgcgtccggcattaaatgatacgggaaattatcagcttggtatctgggtgagggatgatctggcaggaatcgggacgctgacttatgtggaggctgcagggagattcggtgcattagggcatggaatcacggatgttgacgtggagcatctggtcagtatgcagtcagctaccgcctatcaggcgcagattctcagtatcattcgcggagagaaaggttctcccggagagctggtgggacagatttactataatcatgccaacgagattggagaaattacaaaaaatacaagaaatggaattttcggtcgattagaaggcttgccggatgttttgcaggaagcgtctgccatggagattggattcaaacaagaaatcgaaaccggtccggcacagattctggtaaccttagaagatacgcgccagctttatgatatcacgatcacagacgtggatctgaatccacaggaatccaataaaggcattgcctttcaggtgacggatgatgcgctgattgaggaaaccggaggtatcattcagggcatgagcggtgcgccgattttgcaaaatggaaaagtgatcggagcagtgacacatgtttttgtcgataatccgacgaaagggtatggcatttttatagaaacgatgctggaacaggggagcagtgaataaggtacgaaataaaaagccatataataatttatgaataacacaaaggtaaaaaagagaaagcataataaaaaaggcagaatgagatagaagagggggaatgcgtgcgaaaagtgacaaatcagtttccactccaaagcctatgtatcagctttggaagtgtacttctgatcatttttatcacgatgttttacgttactgc

SEQ ID NO: 13182 - DNA, 23242 bp, Unknown
  gut microbiota DNA sequence
gttttcgctcaatgttgcgcataacgaacagataggaaacaccggtgaacacggcagcagcgatccatgcggcaggatcaccaaaacatgccagacggaaatttaaaatcttcatggcagcgacagaaaccaccagtcgtgcaaataattctgccacaccgcccatcatcggcagaaaaccgtaaccgcagccctgcatggtattgcggaaaatgaaaatcgtgctcagcggaataaagaacatagaacacatgtacgcataagtctgcgcccacggaagcattgttgccatatccacatcaccggagaaaaacaggtgcagggatggttttaacagggaacacatcagtgcagcgactgcaacggcatagatcagcgcgatccagagtgcggtttttacacctgctttgattcgtttgatatcgccgtagccaaagttttgaccactgtaggtcgccatggtctgtcccatggcgatcattccctgcatcagcagactttgcagttttccggtagcggtaaaagcagcaactgctgtggaaccaaacaggttgatggcagactgcatgatcatggttccggaagatgtgatggcaaactgtaatgccatcggaatgcctgctgccagctgatttttcgtatcaatacgtgataatttccactggttacgctgtggcttcagatccgggatcttacaccagatgtagattgcacaaagtaccgcagaaatagcctgagctaagttggttgcccatgcagcaccggacacacccatatggagccggatgatgaaaaacagatccaaaataacatttaagcaggcagaaaataccagaaaaaacagcggtactttactgttcccgactgcccgcagatacgcagacagcaggttgtaaaaaatatttgccacaatgccggcagtaatgatcataatataggaataagcatcatcaaaaatatttttcggcgtgttcataaccgtcagcagcagcttcatcagaaacaggcaggaaaaagtcagcagcaacgtaaagaatatggataaaaatatgccgtttgcaaccgcacgtttgacaccgttttcgtctttggcaccatatcgctgcgagatcaatatggaaaaaccggcggtaattccctgggaaaagccggtgagcaggaacatgatcgttccggtagagccaacggcagccagtgcatcggcaccgacataacgtccaacaataatagtatctaccatgttgtaaagctgctgaaacacatttccaatgatcagcggaatggtaaatttcaggatgaccgggagtggtcgtccttttgtcatatctaattgcatgtcaaaatctccttaatatagtaaatagtatgtcgtaaatttccaaatgtctatgatacttttttacaagatatatgttatgaaaaaatcagtgtattcttgcaatcttaaaaaattccgccccctattatatcgcatttattgagaatttcaatatagaatttgcattgataggaaaaaacttttgtgcaaaaatggggatgtttgttataataaacataacaactgttttatggaacaaaatccggaaattatgataaggagtggatggtaatatgggagaaaaaattacgttttgccggggcggaggctgcacggcaaagcttggtgcgggcattttaagccgggtgctggagcgactgccgaagggaccggaagatccgaaccttctgattggatatgacagcaaggatgacgcggcagtttataaagtcagtgatgacattgcgattgtacagaccctggatttttttccgccgatggtggaagatccgtatacttttggaaaaattgcggcgacaaatgccctcagtgacatttatgccatgggcggcgaagtaaaaacggcgttaaatatcgtctgtttcccggaacagatggatctgaatattttaggagagatcatgcgcggcggttctgagaaagtgatcgaagccggtggaacgctggcaggaggacattccatcaatgatacggatgtgaaatacggtctgtccgtaaccggagtggtgcatccggataagatttatccgaataacggcggcaatccaggagataagctgatcctgaccaaaaaacttggtgtcggcattatctgtactgctaatcgtgtacaggaggcatccgaagatgcaatggcagcggcaatcgaatctatgacaaccttaaataaatatgcgtctctgatctgccggaagtatgacattcatgcctgcacagatgtcacaggattcagctttttgggacatctgcatgagatgatggatggcagattaagctgccggatcgatggaagtgctgttccggtatttccggaagcattagactatgcggatgaatttttgctgacagcagcgggacagcggaaccgaaatcatgttcaggaacatgtgaaatttgtcaatgtgccgtttgccatggaagaagtcttatatgatccgcagacttccggtggcttgttggtgtctgtttcccgtgaacaggcagaggcgctgcagcaggaattgcaggaagcaggtctgtccgcggcaattgtcggtgaagtgcttgaaaaaagcgagacagagattactgtgacgatgtaggggtatcctgtaataacagaagctgaaaaataatgaaaaattgtaactcagaatagaaaatatgtgaaacaaagaagaaaagatagtgtagaataacctatgaaaaatgagtcaaagaaaaaggcttaagaaaatcaggaggaaaatgaaatgatcaaagtagatgcaatgggcgatacctgcccgatcccggtagtaaaaacaaaaaatgccatcaaagagttaggtggcagcggagaagtacagacactggtagacaatgagatcgcagttcagaatctgaccaagatggcaaaccagaaaggctatggtgtcagatctcagaaactgggagaagatcagtatgaagttattatgacaatttctgtggacggagaagcaccacaggcaacagaagaagcagaggaaaaaacggtttgctatccggatgcacgaaagaaaaataccgtagttgtattatcatcatctactatgggaaacggagatgatgaactgggtgctattttaatgaagggatttatctatgcattaagccagcaggaagaacttccgactactattttgatgtacaatggcggcgccaaaatttcctgtgaggaatctccgtcactggaagatctgaaatctttagaagcacagggcgtggagatccttacctgtggtacttgcctgaaccattatggtttaacagataaattgaaagtcggtgaagtcacaaatatgtatgtgatcgctgagaagatgacacaggcagatctgatcgtaaaaccataaaaacagttagtatcgcgaaagtaattactgttcaaatgtttccataactgctatactgaaaacattgtgaaatgggaggattagttgttatggaaattatgcagatactttttaaacagattttcctgatgttcatctatatgatgattggattcactctttataaaaagaagatgatcacaaagcagggaagtaaggaactggcaacactgttactgtacgtgattttgccgatggcgatcatcaagccgtttatgatagaatttgattacgacaagctggttggtcttggaaaatcttttgtgatagcagtcgtagcactggcattatccatgctggttgcaaaactgattttttggaaaaaacatccgatggaaaacttctgtgcagcgttttccaatgccggttttatcggaattccgctgacacagatggcacttggagaagaagccgttttttatatcgcgatctttgttgcgttattgactgtattacagtggacgtatggtgttatgatcatcaccggagataaaagtgtcgtttctccgaagaaaattgtgacaaatccgatcgttattgcggttgttatcggaattatcctgtttttaattccggtgcaggttccaccgatcgcaacgacagcagtcagctcaattgcagtgctgaacgcgccggttgccatgatcgtacttggtgtatatctggcacagacaaaactgacagagctttttaccacaaaaatcgtatatgtggcaacggttgttcgtctggttgtaatcccgatgctgacgattgcggtattatcgctgttcccgtccagttttcaggatgtacgtctggcaattctgatctctgcatccgcaccgattggaaccaatgtggcgatttttgcacagttaaatggtatggattacaccgaagcagtgaagaatatctgctttagtacgttgttgtcgattcttgcagtaccgctgatcattggatttgcaaattttgtatggttataaaatgggtatgatcatagaagttgaacatgaaataaaaagaaaaataaagaaatcccgtctgattggaagagtgagcagctataaaaatttgctcatttccagaacagacgggattttttgtacaaaggtattagtttttggtaaattgtaagctaacaaagatctgtaataatctctgataagaacatagtgtatcttaactcctgaaatacgaaatgttattttataatgttattgttattctgtatagcggataatctttgccggatttccaacaacaaccgcgttgtccggaacatcctttgtcacaacagagccagcacctacaaccacgttattaccgatggtgacacccggaagaacgacacagtttccgccaaaccacacattgtcaccgatggtgatcggttttccatagacatagttggcaactctggtcttggaatccatcgggtggttgacggtatacagacaggtctgtggacccatcagacagttatcgccgatggtgatcggagccacatccagcattacacactggaaatttgcaaaaaagttcttgccgacatggatatgaaatccgtagtcacagtggaaaggcggtttgataaaaatatcatcatcgcagtcaccaaataattcttttaaaatagaaagacgaagctccggttcatcctctgtggtagcattaaagcggtctgccagccgacgggcatgtttcttcagttcaccgatcttttcgtcactgttccagaacatttcaccggcttccattttttcaaattctgtacggttatcttttttcatttccatgataagactcctttttataaattttgcgttatagtatttaaattgtttttctgatgtaaaaaaatcgttgtcatgcagaaatttcaaatctgtttacgacatatttgcgtattcaagtacattccgtaatgtgaaaaacattagtctgcacggcgttttcgaagtgactgtaccggaatctgagccagtacgacagcaacaaaaatcaacaggcagccaagtaattcccttccacttaagtgctcatgcaggagtacccaaccgcccagaacggaaaatactgattccagactcatcagcagagaagcaaccgtcgggttcagacctttctgaccaatgacctgcagggtataggcaactccggaggagagaataccggtatacaaaagtgcgatcagtgccgtcggttctgcaaattgtgccagcatcgccggaacatttgcaaaggaatgctgcaaatccacgaaaaatgccgggatcagggaaacaatacctgccaccagaaactgtgtgcaggatagtttgattccatccaccatcggggaaaaatgatccacacagaggatatgtaaggaaaaaccaagtgcacaaagcagcaggagcagatctggaaattctaacgtaaaagagccattcatacataaaagatacagtccgatcagtgtaagaactgttccaatccagatattccatccacattttttcccgagaaacagtccgagtaacggtacgataatgatatagcaggtggtcagaaaacccgcttttccggcagtggaaccgtaaaacagtgccagctgctgcagcgtacttgcgataccgagaataaatccacaggagagtcctcccatcagcagggcgcggcggtttgccggttttgcctcatttgaacttgttgcattttttttattcataagaaaaatcaccggacataagacagcggcacccagcagaaagcggatgccgttgaatgtataaggaccgattgattttccaccttcgctctgtgcgacaaaagcaattccccagataaatgctgcaagtaccagcaggagagaattacgtttttgtaatggtttcattatctcataatcccttcattttcagtttttgtcatacttcgtatattttgtatgcattacaggataacacttattcgcatacatgttccagtccctgtgccatgatcgttgcgacatgatcatcggcaagagagtagtagatggtttttccatcccggcgaaattttaccagtgcggactgcttgagaatccgcagctgatgagaaatcgcactctgtgtcatggacagcgaatctgcaatgtcctgcacacataattcctgcttggagagaattgccagaatgcgtattctggttggatctccaaacactttaaacagatcagcaagctgatataacgtttcatcattgctggaatcatccatatttgatatacccattatttcttccctccaaattgaaattattttaacatactgttcttattctaacggaaaatgaaaaacaagtcaaattttattccgtaattttatccggtaatgatcaggatttaatcttgatgtaaagtgcacggatggagttcagtacacagatcatagcaacaccagtgtccgcgaaaactgccatccacatgtttgcatgtccggtcagaccaaggatcataacggcaatcttgataaccagtgcaaatacaacgttctggattgcgatccggttggttgcacgggagatcaggatggactgtggaattgcttccgtagatgaagtcataaatacgacatctgctgcttcgatggcagcgtcagcaccacttcccattgctgctccgacatcggcacctgccagaaccggagcatcattgataccatcaccgacaaacataacggaaccatatttgctgcggatttttccaagttcgtttaattttccttccggaagaagtttcgcatgtacttcgtcaattccggtagcagcagcaactgcatctgcaccggactgggaatctcctgtcagcattacggagtgcagaccgagttttttcaactgaccgatagcggaaacagcatcagatttgatcgtatcggaaataaccatatatccggcgaatacaccgtttactgccataaatacttctgcaccgtaagatgcatcggaaagatccggcatagcaatctgatatttagccattaatttatgattaccgcataaaacagtgccatgactggtttctgcaacaattccgtgtcctgcgatctcagaaagttttgcaggttcttcgatgttgagtcctttttctttggcagcggttacaatgctgactgcgatcggatgtgtggaatgatgttcgcatccggcacagagtgcaagcagttcatcttcagacagatcgccgacagatacggttttctgtaatttaaagttaccttctgtgatggttcctgttttatccataacaacagcgccaagtttgcttaaggattccatagaaagaccacctttgaacaggatgccttttttggaaccggcgccgataccggagaagaatgccagcggtacacttaataccagagcacaaggacaactcattactaagaaggaaattgcggtgtaaatccagtaattccagtttccacttactagggacggaattacggcaacaagtacagcggcaataacgacgcaaggagtgtatacttttgcaaatctggtaataaaacggtcaagtttcggtttgcttgcggcagcgttctccatagattccagaatacgggaaaccatagactcagataacggtttttctacacgcatttttaactgaccggaagtattgacacaaccggaagtgatctcatcaccagcagatacaccaaccggaaccggctcaccggtgatcggagaggtatccagacggctttcaccttcaatgacgacaccgtccaacgggattctgtcacctggacggatcagcaggatatcaccaacgtttgcatcttcggcaggaatgacagttgtgtcattgccggatacaaggtttacaacttccggacgcatatcaacggcatccatgatctgtccacggctgcgctcaacagctttatcctcaaaaaattcaccgatacgatagaagagcataacaccaactgcctccgggaaatcgcggattgcaaaagcagcaagtgttgcaacacccatcaggaagttttcgtcaaatacctgaccgtgggaaatgttttttgcagcttttaccagaatttctccaccaaggattacatatgcaatcgcaaaaacaataaaggtagcgaatgtgttgtcaatagtgtggtttaaaataacaccgatggcaaaaagaatcgcacctgaaataatgcagccaagttcttttttgtcatcgccttcttcctcatgggaatgaccttcggcagaagcctgttttttcgctttttccagttcatcacgggcaacaacttttacttctgattcaatagaagcgcagattttctgaacttccggtaaaaaattgtccggatcttttgctgaaagacgtaactgtttggttgtataagtaatggtagcagcagttacacccggaagattgttaattttttcctccattttagcggcacagtgcgcgcagccaagattctgcaggatgtagattttgctgtttccgatatgaacacgctccacatgatgtacttcttcatggtggtgatggtgatcatggtcatgacagccgcaatcgcagtcatcatcgtcatcgtcacagcagccacagtcacaatgatcgtcatcgtgatggtggtgatgatggtgttcatggtgatgatgatggtgctcatgctcctcatgctcatgatgatgttcgtgttcttcatgatcgtggtcgtgttcgcagcaaccgcaatcacagtcatcctcatgctcatgaacagatgcagtattttcgagttcattcatatcgtcatgtaatgtatctttcataatgacctccctaaattattgttgaacatgtgattatttattcatatgagtattaaatcatatgatctactacttgtcaatagtgaaatggatttatacaatgtaaaaattgcaaagaaattattcctatagtaacatatataattatattatataagatgatttggaatctgtcttgtattgacaattctcgacaaaaaaatgtcgtatctaatctttataatgtatttgttcgcaaaaaatatcattaggaggtaagtatggaaaagctaaatgtcggaattgcagatgataatgaactgattgtaagtctgctgtcagatattgtggcacaggatgaagaattgcgagtggttggaactgcgcggaatggagaagaagcatatcagatgataaaaacaaaacagccggatgtggtattattggatatcattatgccagaaatggacgggcttgctgttatggacaagatcaaaagagataaaaccatcaaaaagagccctgagtttatcatgataagcgcgatcggaaaagagggtatcacagaagatgcgtttcagatgggagcatcttactacataatgaaacctttcgcgaaagatgtggtcgtaaacagaataaaaatgatcaaacatcgtgagaagcggaaaagttttcagatacgaaaagcagttccttatgaaagtcaggaacaactgatgaaacgaaatctggaaagcctggttacggatatgattcatgagatcggcattccagcacatataaaaggatatcagtatttacgcgacgcgatcattatgtctgtaaatgatatcgaaatgttaaattccattacaaagattttgtatccaacaatcgctaagaaatatcagaccacagccagcagagtggagcgtgcgattcgacacgccattgaagtgtcctggagccgtggaaaaatggataccattgatgcgctgtttggatatacgatcaacaatggcaaaggaaaaccgacaaattcagagtttattgcattgatcgctgacaaaattcgtctggaaaacagttaaaaagagacggaaacgggaaaaaccgataaaattggttggtgaggtccggtaagtgtgctataatgtttttaaaatatgacctacaatgaggattgggggaacaggatgaaaaaaatattatttgcatcatcagaggcggtaccgtttatcaaaaccggcggtcttgctgatgtcgtaggatctttgccaaaatattttccaaagaaagagtatgatgtgcgtgtcgtggttccaaaatacatgtgtatggacacgaagtataccgaaaaaatgaaacttgttacagaatgtcaggttcagttaaactggcgtacacagtatgcgggtgtgtatgaactgcaggaggacggcgttactttttattttattgataatgagtattattttgcaggacctgcaccatacggtcagatttatcaggatgcggagaaattcggatatttttccaaggcagtactgacgatcctgccggaaatcggtttccagccggatattattcattgtcacgactggcagaccggtctgatcccggtatttttagaggcacagtttcgacagaatgagttttaccgctacatgcgtacagtatacaccattcataatatgaagtttcagggacgctggtatgtggatgccatccgcgatgtgaccggactggacagttcttactttaccatggacaagctggaaagttatggaaatgccaatctgttaaaaggcggtgttgtgtattctgattatattacaaccgtcagtgagacttatgccaaggagattcagtctaccgaaggcggcgagggactggatggactgatgcgggcaaaatcttttgtactctctggtattgtaaacggactggattacaaagtttttgatccgaagacagatccggcgatcgcacagcattacaaaggaaatgttacttcttataagaaagcaaacaaacttgcgctgcaaaaagaggtcggtctggagcagacaaatgataaattcctgatcggaatggtttcacgtctgacagatcagaagggctttgatctggtggattacatgatggatgagatccttggggacgagcgtatccagatcatagtacttggaaccggagagcagcgatatgaagatatgttccgctattttgcacagaaatatccgggacgggtttctgcaaatatctgctattcagaagattttgcacaccgtatttatgcaggttgcgatgcatttctgatgccgtcactgtttgaaccgtgcggactcagtcagctgatgagcatgcgttacggaacagtaccgatggttcgtgaaaccggcggtctgaaagataccgtagaggcatataatgagtttgaacataccggaaatggattcagtttccataattataatgcacatgaaatgctgtatatgatccgttatgccgcaaaaatctattttggttatccaaaagagtgggaagaaatcatcaagcgtggcatggcaatggattattcctggagtgcttctgcaagcaagtatgctgaaatctatgagggactttataaacggagtgaagaagaccgtcagcgcgatcacaaatggcagcaggagtatgaagaacgtgagcagaaacgtctggaggcagaacttcgtgtaaaattaatgatggaagctgaactggcagagcgtgaagctgcactcaaaaaagcagaagaggaagctgcattaaaagaggcagagaaagaagctgcacagaaagctgcatcaaaagagggagagaaaaaagttgcacagaaagctgcttcaaaggagacagagcaggaagccacactgaaaactgctgagaaagaagcagcagaaaagcagactggcaaaaagaaaacttctgcatcaaaaaaacagtctgcaaagacaacaaaaacaggaacaacatcatctgcaaagaaaacaacaacgcagaaaaccagcaaaaagtaatttttgcaatattctgctgtaaatgaattttttacacattcggcggagtcaggaaatgaaagcttataaaaatacgcagaaaaatatgtcatgcgttgcatgaggcgtatcctgcaacaagaatgttaatggattcttgaattttcctgttccgccggattgtgtatattatgattatgtgagttggaaaatccacttacaactatgatgttataaaatggaaagatggatcatagattacatcgttatttcgttcttgcggcgggagtagtagtaagcatgtgtggagagaatttcatcgtccataagttgagaatcattcacttcgcgcaccatatcagacagttctccgtagcagtcattctccagcgtcggaacaagaatgacctcatggatactgcttgggagaatatagaaatcagtctgtgattcttcagaaaaatgctttaacagatctttgtagagcagacatgtagcaccaaacaggttcgtttcgtttgtgagtacgaacattggatagggagatggtctggacacggttggatcaggatgcgtgagccgtccggataattcataaatgacatcattcatatcatacagtttttccggcaaaatcttctgagtattgtctttggcgatctgaaacaattctgtcgttgtgatattccagttctttaaatgggaatgatggatcaggattgttgcattgccggtcgtaaaatccatggagatcagacaataaaatacaattgccaaatccagaaaacggatatgaggaaccttttccaaaagttctttgtttcgctcataatggatcagcttcatggcaattttgtcccggatattgtcaaaatccgtgaaaaaagacggatcaatcttttgggaaggcttatgtcggtgataatcgctgagcagggactgataaacatcattaaaactgatgccgtggttataagaatcatagtaataattcagataaagtgtcggtgaaatattacagtcgttttccataatcgtaagtccgtcaaggacaatgccattatttttggaaacctgctggatcgagatgcgttttggatcgggaatatcgtgctccaaacgctccatgatgactgtctgaaaagtgttatattgcatattaagttgaaaaagaaaagacgatcagatgtttactgtgggctaaagataacacagctttttctaaaaggcaagatggcatatctgccaaaatacagggtgtccacagaccgttaaaaattccctaaaatggcagaaactgcgtaactacgggaaaaagtcgattggcacatttgtacaaaaatgggattttttgaaaaattagaaaaaattcgaaatggcatgaagtgtgacagaagaacagaatttctcaaaaaaattctcaaaaagtttataaaaatatgaaaaaaggcttgcaatgaaattgaaaatctaatataattctttgtgcatgcttcgatggctcagttggtagagcaacgcattcgtaatgcgtgggtcgagggttcgagtccctttcgaagcttgtgaaaatcccggtttttcaaccgggattttttgtttgatagattccggtatgaatggtacttgcgcggacttgtgtttttctatatactgaaaacagtaagtgatgcaggacagggatttataaagagggaggaagcaaaaaatggcagtaaaaattaatggaatcaatcactgtgcgatcagtgttgcagatattgaggagacgattcagtggtattcagacgtatttggatttaccgtagtcaatcgatctgaaattccgggagcaggaatcaaagtagcgcatttacagggtgtaggatttttgctggaggtatttgaggctcctggagcaaatccattgccagaggaccgcagagtaccgaacagagatctgatgacacacggaaacaaacatatgtcttttggtgttccggacggaagaaaagcgaaggaagaactggaagcgatgagcgtggagatcgctatggtagcggaagtagatgacacctatggcgtgtttatccgtgacaatacaggaaacctgatcgagatttttgaggaatccggtgacgtggtatttaatcagcataaaaatcagcagtaaggatgcgtgaaactatgggatcaaaaatcagaagaatgattgaccgggcaagtgagcttctggagctggcagtcaatattatcattattattgcagtaatcgtggcggttatttccctgtggaaaccgtttatggaatttgtgcagaaccgcgaatctgcacatgcttttttggattttttaggatatgtgttaaacgttctgatcggtattgagtttttcaagatgctttgcaaaccggatgtggataccgttctggaagttgtaatgtttgtcattgtccgtcatatggtggtacttgaaacaagctcggtggaaaatctgctgaccattgtcggtatggcgattatttttgcaattaaaaaattcctgaaagaaccgaaaaaagagaagttgaaaacggtttcggaggatgagtctgaaagagtaagagggtataatgaacaattacaaaacagacaaaactgaaatctgtcacgattggcaggaaaatttaatagcattctcaaaagaacatgaattcccagcggaagcggtagaattactttcaaattcattagaattgattatcaaaaatgaacatttgtatcatgtgtttactgaatgggaacaaaaatactgggaaaatcctgatttggattatgtgttacttcagaaaatattagaagattttgatggagaagaaggtatttcgaaatatacttttgatttattatttatgatcggaatcagcagacgaacatgggaactttatcagaagcggggaatcagcagggagatttttcatgattctatggcagatatgcactggaagttgttggagtgtcatcaaatgtatgacatttggggaacgtttgtgatgcattggtttccatggtggttccagttaaaacgttttgcactgggaaggcttcaatttgaattgattaaatttgatgacgagtatgagaaagatggtctgatattacataaagacagtccggtgataaatgtgcacattccatcttgtggaaaattggattacacagaagttcaaaaatcctatgaaaaagctgctgagttttatcgtacagaatttatggagcatccgttggtgtttgtatgtgaatcatggttattgttcccggcaaataaagaaattttaccggaacagtccaacattcgcagatttttgtcagattatgacgtgtatcgtaccagagaaaacaataatgatctgtggcggatttattatggcgcggagcagaatgattttgaaaatctgccagagaataccggattggagcgggcatataaaaaatggctgctgagtggtcatatggcagggcaatcatggggcgtgtatcgatatgaaaaggaaatgtgatatatccaaaataggatcttgtgatagctggtgaatttttcgccagcttttccagtttttgtgatatttcagtgtgcgcgattgttttattagtgaaagagatatctctggaacaaacagataaacagaagtaagtggggagtgcagatgaaagaaataaatgagaatcgtgtactggaatgttaccagaagtataaggacactgttttcaagctggcatattcgtattgcaaaagcgtgacgcaggcagaggatgtttttcaggatgtatttgaaaaatttatgcagaaagcaccggatttttcggacgaatatcatgaaaaagcatggtttattcgggtaacgatcaatgcatgtaaaaatgtgttgaagctgaaatggaataaagagcgtgtgcagtatgaggattatatgacgccggaaaaagtttccgaagaaccggaatatgaactgcttcgtcaggcggtgctggcacttccggaaaaataccggttaccgattcacctatattattatgaagaatattctgtgcgggaaatcgcagagattcttcagagaaaggaatctgccgtacagacacagcttcagcgcggaagagagaaaattcgcagatcgctgacagagaaaggagtatcctatgaaactgaatcatgaatcctatgaaaaagcattttcaaatatcacattagatgatcgtatcggtatggaattagtatcaaatgcgaaggtcaaacgattgcgtaaaaagaaaaaaattacgtcacaggtagcagcagctattatctgcctggtgttggcaggaggagcaggaaccggaatctgttatgcacagacaggaacagatccaattcacttttttgcaatgatgtttcagcatgcttctgtggaagccgtttatcaggtcgcagatggttttgtagaaagtgatcagagcttgacggatggaaatgtgcgggttacattggattcttatttttatgataaggaaaaaggcattatcatatcgaatgtgacgttttctacaatcgatggttctgatttttataccaaggacgaaatggatgcttacagagcaaaaggtgaagatacagatgatgaaattttaagatcaatgatagtaggagattttggtgttgattctggttcttctgccaatacagggaatgatgcgattatgatagaaaacggtcacacgttccattattatgcgattattactgatatgaatggaagaaaaaatgcatccgatcagctggtgattcgtggaaataataagacaggcgtgcttggtacatttaaactggagccaaccggagatatcaaagtggttgatctgaatgtagaaaaaaatacggcatgtgatacggctcagattaccggcggctatctgaaaatttgctggaacacggatgctacagatgatgtgtcaacagaatctttggaacagcttccattttcaaaggtagaggttaccatgaaagacggcatgatctatcgttatcagaaactagattctgcatggatgaaagatggggatcataccatggataaagaagaacaggtctattacgcagaagaagagggcattacaaaaatctttagtggctctattatgatggataatgataataatcagagcgactggctgatgaaatttccagattttatcaatgttgatgacattgtttcggtgacacttgatggacaggaaatcatgaaataaaaaactgacagttagtcccgcacaacagtaaagaacagtaaaagacagtaaaagacagtaaaacgctgtatccggaacagtatctggatacagcgttttcacgtttgccaatatagcgattttgagatagtttaaactacatcttcttcagataccatttctccaaccacacaatcagctggtacaatcccatagcaatcagacagagtatcacaatcccgagaattacccagtccagcttcatgatctgactgccataaatgatcatatatcccaaaccgcgacgggaagagataaattcaccgatgacaacaccgaccagacaaagtccgatatccactttcataatggaaaacagatttggaatgttggacggaaatacgacttttgttaaaacagcttgccggtttcctcccaatgtctcaatcagtttcatctgattgggatcaacggttaaaaatccctgataaagacttaaaatcgaaccaaaaattgctacagacattccagtgacgatgatggttttataattgccacctaaccatacgatcagcagtggtgcaagggcagattttggcagactgttcagcacaaccatatatggttccgacacatcggagaccgatttttttgcccagagcaaaactgcaatcagaatggtaaaaagaatgaccagcacaaaactgatcatggtttccaacagtgtgatgctgacatgctgccagatggttccttccatcagcatttgaataaaacaggtgacaagacgtttcggggaactgaaaataaagtcattgatccaggacagatctgctgccagctcccagagaacgagaaacagtacaaaaataaaaatgcgtaaaaagtgtatttttcgtttgtattgctgttgttgatacaggaaggtttcctgcgtggtttcaggacgtttcatggtgcagctccttccagataagattgaaataggttttaaaatcatcatgatcccggcgttccatcggtgtcagatccgtaggaaatgcgacagatacgatcctttggatgcgtccgggacgggcagtaaggatgatgacgcgatccgccatactgacagcttctgccagatcatgtgtgaccagaatggcagtctttttctccttgcggataatggaaccaatatcgttgctgactgacaggcgtgtctgataatccagtgcggaaaacggttcgtctaaaagcagtaattccggttttaatacaagggtgcgaaccagagcggctcgttgccgcataccgccggagagctggcttggtttcgactgggagaatttttccagaccatattgtttcagaagctgctttgcataagcacggctttcttcggtcagttcatggcggatttccagaccaagcagtacatttttccagatgctgcgccattccagcagataatcctgctgcagcatatatccgatgtggcgccggctgtccgcagtcagcggcgtaccattcaaaagcaatgtgccggattctggtgtgagcatgcctgccagcagatttaaaagtgtggatttgccacatccgctgggaccgacgatggcaacaaaatcaccggaattgacggtaaacgtaatatcagataaagcaggggtttccccctgcatcgtatgatatgcataagacagatgttgaatttcaaacaacgaatgcatgagagtcctccttatcagttttaatgagcctatattagatgggagatgactcccacctctataggtggtgagaaacaagctagtatcagtggtgggagccaatcccccatctgatatagcctccggcaggagtacagaggtgcgcagttgaagtatgtcatgcaattgcatgacgcgcacctcgcaacaagaatgccggagcattcttgaaataatgcaagtcaaatatgtgagactttatgtgtgattctgatcagtgcaagttggtgaaaaattctcagaatcatggtatattttcgtaaaatgtttctttcagtcgaagattgggataaactggatatagtatagagtatgtaaaaataacggtggttgctattgtaaaaccgccgcgaatcgtataaaataagtaagttatgaagcagaattaccaaaaagaactggaaaagaaaattcaaaaactgcagacagagcaaaaagtaccaacgctgttattacacgcctgctgtgcaccttgcagcagttatgtactggagtatctggcagaatatttccacatcacagtatttttttacaatccgaatattacggaggcagcagaataccacaaacgtgtggaagaagaaaaacgcttgattcgggaacttccggtgaaatatccggtgtcctttattgagggtgcttatgaaccggagcggtttgtggcagaagtaaaaggtctggagcaggttccagaaggcggtgcacgttgtgaaaaatgttttgcgctgcgtctgtcagagactgcaaagctggcacaggaaaaggcattcgattattttaccacgtcactgactatcagtccgttgaaaaatgcagcactgctcaatgaggcgggagaagcggcggcagcggaatactgtcatggaacgactgtttttttgaattctgactttaagaagaaaaacggatataagcgatccgtggaattgtcggaaatctatggtctgtaccggcaggattactgtggctgcgtgtattccaaactgcagcgggaacaggaaaaaagagcaaaagcacaggaagaagctgaacatgcagcgaaataatatttcacaaaatctcagtctgaaataatattctcattgagaacctacgagatgaagaaatcctgtgtgcaagataaggaaaatgaaggaggaacaacgagatggcacaattatggggaggtcgtttcacaaaggaaacggacaaactggtttataattttaacgcatcaatttcgtttgatcagaaattttacaaacaggatattcagggcagcatcgcacacgtctgcatgcttggaaaacagggcattctgaccaaacaggagatgcaggatatcgtaaaaacactggatgagatctgcaaagatgtagaatccggaaaactgaaaatcactgacgaatatgaggatattcacagttttgtggaggcaaatctgatcgaccgcctgggagataccggtaaaaaattacatactggacgaagcagaaatgatcaggttgcattagatatgcgtctgtatacacgtctggaagtactctacacagatgaactggtacgagatctgttgcaggaactgttaaaaatcatggaggagaataccgagaccattatgccgggatttacacatcttcagaaagcacagccggttactttagcacatcatgttggcgcatattttgagatgttcaaacgtgacagaagccgtctgcatgacatttatgagcgtatgaattactgcccgttaggagcaggtgcactggcaggaacgacttatccgttagacagagaatataccgcatccttacttggttttgcaggtccgaccttaaacagcatggattccgtatctgaccgtgattatgtcattgaatttttatccgcattatctacgatcatgatgcatctgagccgtttctgcgaggaaatcatcatctggaattctaacgaatatcagttcgtggaaatcgatgacgcatacagcaccggaagcagcatcatgccacagaagaaaaatccggatatcgctgagctggtacgtggaaaaacaggtcgtgtttacggcgcgttgatgtctattctgacaacgatgaaaggcattccgctggcatataacaaagatatgcaggaagataaagaactgacatttgatgcgattgatacagtcaaaggctgtctggctctgttcaccggaatgatcgcaaccatgaaatttaacaaagaagtgatgagcaagagtgcccgtcatggatttaccaatgcgacagatgccgctgattatctggtaaatcacggagttccgttccgtgatgcacatggaatcgtaggacgtattgtactgtattgcatcgacaaaggtattgccattgatgacatgtctctggaagagttaaaagccatcagtccggtatttgaagaggatatttacgatgcaatttccatggatacctgtgtcaacaaacgtctgaccattggtgcgccgagcaaagaggccatgactcaggtgattgcgattgaaaaagaatatctggcacatgactggctggaagatatcgagattttacaggaaaccaagtaaagaaataaaagaaagacttgcatttttccggaaattgttataatatagcacaagaaaaagacatctgttcgcggtaaacggacaaataagaaaagatgtatatctaaatacgatcgcaatggaggatgtaaaaatgagtgaaaaattaaaagtcggaatattaggcggaacaggaatggtaggtcagagatttatttctctgctggagaaccatccgtggtttgaggtaacaaccatcgcagcaagcccgcgttcagctggaaagagatatgaggacgccattggcgatcgttggaaaatgacaactccgatgccggaagcagtaaaagacatcgttgtaatgaacgttaacgaagtagagaaagttgcttctgaagtagatttcgtattcagtgcagttgatatgtcaaaagacgagatcagagctatcgaggaagcatatgcaaaaactgagacaccggttgtttcaaacaacagcgcacatcgttggacaccggatgtaccgatggtagttccggagatcaacccacagcacatggacgttatcaaatatcagaaaaaacgtcttggtacaaagcgtggatttatcgcagtaaaaccaaactgctccatacagtcttatgcaccggtactgacagcttggaaagagttcgagccgtatgaggttgttgcaacaacttatcaggcaatttccggagctggtaaaacattcaaagactggccggagatggtagaaaacattatcccatacatcggtggtgaggaagaaaaatctgagaaagagccgctgcgtctctggggtgagatcgatgaggagaaaggcgagattgttcctgcaacttcaccggtaatcacatgccagtgtatccgtgttccggtattaaacggacatacagcagcagttttcgtaaaattccgtaagaacccgacaaaagagcagctcatcgagaaattagagcagttcagcggtgttccgcaggagttaaatcttccgagtgcaccaaaacagtttatccgttatatgcaggaagatgaccgtccacaggttcaacttgatgttgattatgaaaacggtatgggtatcaacgtaggtcgtctgcgtgaggacactgtatatgactggaagttcgtaggactttcccacaatacggttcgtggtgcagcaggtggagcggttctctgtgcagaacttctgaaggcacagggatatattacaaaaaaataattatgtgctgataaaaaatacatagttaagaaaaggatgagttttccgctgaaattggaaggctcatcttttttgaaattatacttataaaagtctggatggaaataatataatgacaaaaccatacaagtttatctcagtcgagaagattcccacttctgcaagtggtgagtaataacaagtctttttcagtgggagtacaatctccgactgagataaacgctccgcgaggatgtgcagtgattctgagaagaatatgt

SEQ ID NO: 13183 - DNA, 14426 bp, Unknown
  gut microbiota DNA sequence
agcgttcgacttgaataagttttttacagaaaaagcatagaaaaaataatgaatctgtgagaaaatatgtggcagataagcaaagaaatttcaggaggcaaaagagatgagagaaaaccttaactgggcggtacttggaacaggtgtgattgcaaatgaaatggcgcaggcgctgcagaaaatgggaaaatccctgtatgcagttggaaaccgtactcatcagaaggcggtagattttgcagaaaaatatggtgtaggtaaagtatatgatcagatcgatgatatgtttgaggatgaaaatgtcgatattatttatattaccagtccacataacacgcattatgcctttatgaaaaaagcattacagcatggaaaacatcttttagtggaaaaatccattacattaaacagcagagaactggatcagatgatcgcactggcacaggaaaagaatttaattctggcagaagcgatgaccatctggcatatgccgatttataaaaaattgtggaatatcataaaagatggaacactaggaaaagtccagatcataacaatgaattttggcagtttcaaggaatatgatatgaagaatcgctttttcaatctgaatctggcaggaggagcaatgcttgatattggtgtctatgcactttcgattgtccgtagttttatggatgagactccgaccgatacattaagtcagtggaaaccatccccgacaggttccgatgaacaggcgactgttttactgcagaattcacaggggcagatggcaacagtagcattatccatgcattcaaaacagccaaaacgcgccatgattagttgtgaaaaaggatatattgaaattatggagtacccacgcgctgataaagcagttatcgtagacgccgaaaccggggaacggacagaaatcgcagagggtgagaatgctaatgcactgtattatgaaatgctggatatggagcaggcagttcgcagtggtaatgcagatggaatgcatctggaatataccaaagatgtcatggacattatgacaaaacttcggagagactggggcatgaaatacccggaagagaactgggattagatttttgctgaaaaaggagataacataaatatgaaaatcgtagtattaaacggaagtccacgtaaaggtggaaatacagaaattatgacgcaggcatttacaaaaggtgctgagaaaaaagggcatgaagtagtcaacttacctgttggtaccatgaaaatccgtggatgtatggcgtgtgagtactgtttctctcataatggagaatgtgcacagaaagacgatatgacacaggtgtatgcagaattgaaagatgcggatatggttgtatttgcatctccgatttactggttcgatatcactgcacagttaaaagcagtcatcgatcgtttgtatgtgggggcaacagcaggatttcattttcataaaacagcgttgttgttagatgccggtgcagatcatgtatttgatgctgcaatcgaacagtatcgtgcaacagctgcttatgtgaagtgggagaactgtggaatcattactgttccaaatatggaaagcaaaggcagcatgagtacctgtccgaagctgacagaggtagaagcattgggagagtctttataatgcagaaatacagacatattgtgcagtattatgaaacagataaaatggggattacacatcattcaaattatatccgttggatggaagaagccagaattgattttctcagacagattggatgggactatgcaaaactggagtcaataggcattatatctccggttacagcagtaaactgcaaatataaaaaaagcacaacctttgaagatgttattgacattgacgtcatagtagaagaattcaaagaagtaaaattaaaattgcaatatactatgacaaatgagcagggagaaattgtatgtcagggatattcagaacatggatttatcaatccggaaggcaagttgattcggttaaaaagagaatatccgaacttttatcatgcattgagtgaactggcagagtaagaaatggagggatgaaacgatgaaagcacataaatggtggagcattgcggcattattttgtatgattatggcaatttattcaggtcataaaataattcataaggcaaagtagaatttaaaaaaatggaaaacataaagaagatatgtgtaatatgtaaactggggagcttagagcaagaacctaaaattgtcactggcggtctgctgcataaaatgtattgtgttgaaactaatcaagggaaatatgcaataaaagtattaaattctaatgttatgaataagccagatgccttggaaaaacttgaacaggcagaacgtattgcatatagattaaaaaatgaaaatgatatttctgcaatttgtgtaaaatctgtggatgaaaaaatgatttttgaagtgaatcatgcatattatgaaatttttgaatggtttgacggaaaatcagttttttatccagatataacagctgctcattgtgcaaaagtcggggagcaattaggaaaaatccatgcttcaaatatttgcgtggaaggattgtatccggaaaatacagtgcgttgtaaatatgaatggaagtatcttttatctgccttgaaaaaagatgttgaagtgtattcgctttttcaggaaaatgttttacagttggagcaatgggattgtgatgtggttgaaaatgccgcaaaactgaaaagtaatcagataataagtcatcgagatttagatcctaaaaatattatgtggaaaaacgatgttccatatattattgactgggaagctgctggttatataaatccatatgaggaactgatacaggtactaaactattggattgttgatgaaaatcagaattgtaataaggaaaagtttgatgcattgatgaatgcatatcgttcatggatagatgtaaagtacgaatattggaatgagatattcctatgtggatgcgatgctatgttgggctggttagcatataatattcaggttttgatagaagcacagaatccgattgtggaaaatgcagcaagggaacagataacgaaaacattatttgagttaaagatgtatgataaacagcagatgatattgaaaaactggattttacaatatctataaaattttaatatatgctatcttaagaggagaaggatatggcattaaatttacatgatgaaaagaacaaatggttggactgggcgattgaaatccaaagtctagcgcaagcggggatgacctatggacatgacgtatatgatatggagcgttatgaacgtttacgggaaatttcagcagaaatgttatcttacaaaacagatattccagtagaaaaagtaaaagacttattctgtaatgaaactggctatcagacacctaaggttgataccagagcagcaattttcgaggatggaaaaatcttattagtgcatgaaaaaaacggaacctggtcgttaccgggcggctggtgtgatgttaaccaatcggtagcggaaaatacgatcaaagagacattagaagaagctggtttacatgtaaaagcagaccgtatgatcgctgttcaggatcgaaataaacataatttgccgatatatgtttatggtgtggtcaagatttttatccagtgttctgtaattgacggggcttttgtttcaaatattgaaacgacagagacaaaatattttgcaaaagacgaaataccggaaaatctggcaaatgaaaaaacaaccaaagaacagatactaatgtgttttgatgcgtatgaagcgaaacactggaaagttttgtttgactaaaaagtaatttatgataacttggaggaatgacatgaaatgcaaaagaacggttctgccattacttggaactgcatttgaacctggcagactggcagacacgctaaatgaatttgaggatgaagaactggcagaaattgcacaggcagaagcctattttttttcagcacaggcagaagcctgtgtgaaaattgtagaaaaatatctgaacagcgaggatgtgatccttcgtatgtcggcggatatgctttatacatttgcaaacctgacgctgggtgatgcgatggcagcgcagatggcgcgggaagatgtacatatctgcctgaaaaaagcattagaggacgaaatcgatctggagacacaggcatcttgtttgtttgcattatatgtcattagtgtgctgattcatattccaccggaaaaagaaatgccgttgttaagcgattatttgcgttatcttccagaaggtcagcgtctgtttgctatgaatctgttggcgcatggtgcctatctgaatcaggaatatgcaaaaggacagggcatggcacaaactgcaatgatgatggcagaaaaaatgtatccgattccatttatttatctgaattgtgtcaatgccatgtgtcagatcaatcagaaagatcaggaaggagccagagagtctgtgattcgagcatgggagattgcaagacaggataaacttctggagccgttcattgagcatcatggattgctgcaaggagttttagaagtctgggtaaaacagcgggaaccgtatgtatataaaaaaatgatggatggagtcattgcttttagccgtggatggatgaaaattcacaatccggagatgcaaaaagcagtgacggatctgttgactccggtggagttttctatcgcgatgcttgcttgccgtgactggacaaatcaggagattgcagaacatatgggactttcagtcaatacggtaaaacattacgtttctacgattctggaaaaattacagattgataagcgtgacaagatcaaggaatttgtaaatcagtaatgaaaagtcaaagaataaagtgtcaattttcagaaaacagaagataataatttatgcctgtttcaatgtttgctgaaataggcacttttttgtgccaaaacgggcatgtaaaaacaacgaatagtttgataaaatataaccaacgagatggctgctcagtaaaatacctaaaacagtaataattttttacatataatgatatataccttgcgaacagatacagatgagcagtcatcagaaatactttatatgaacgcagaataagcattcccccgattgaagtgtgtagagcactaagtggtgggtaagcgggatgcttatgtcagtgggagttaaaagctcccactgacaggtcacaaagcgactgcgttcctgagcaagtagtgaaagcggattgtaaatgtccgctttacttataagaaacatagtcttttgctaaatggcagaaggctttttttcgtttccaaatcatatcaggtttattgctgaattatagcagaaacaaaatcgttgaaacaggatgatatgttgcggagcaatttttcaaaaaagaaaagcaagtttttggatgaaaaataaataggaagcatggaactaaaatgatataatagacacagaaacaaagtaaaaaacaaattactcagtttacaaatcttgatgaaaataaatatgagaaaaggaattttgaatggaaaaatacagtattaacggagtatctttactcaaaaatgaaaaagcaatttttccaatgatgggggagtttcatttttccagatgcccggaaccggaatgggaagaagaaatcaggaaaatgagagcctgtggcatggatatcatagcaacctatgttttctggattcatcatgaggaagaagaaggtgtctttgattttacaggacagcgcaatctgcattattttttggaattgtgcgagaaatggcagatgcatgtgtggcttcgtattggaccgtgggcacatggagaagcacgaaatggcggtttcccggactggctgctgaaaaaaggatataaactgcgcagcgatgatccggattacctggcattggtggaacgtttctggaagaaaatttataaagaagtggaaggaacacattgcattcttggtattcaggttgaaaatgaatatggtcatgtgggtggtttacgaggtgctgtcggggagcaacatatgcggacgctaacaaaactggcaaaaatgattggttttgaagcaccttattggacagcgaccggatggggcggtgcggtacttggtgatctgacaccggttatgggcggttattgtgatgccccatgggatgcttctttaaaacagcttccgccaaacaagaattatctgttttcaacggtgcgaaatgatggaaatatcggcagtgattatgcaccggggatggaattgtcatttgataaagatgcttatccgtatctgaccgcagaacttggtggcggtgtgcaggtgacacatcatcgcagaccacgggtgacagcggaagatattggagcaatgtcagtatgcaaacttggaagtggttgtaacctgttgggctattatatgtatcatggtggaacaaatccgaaaggaaaactcagtagcttacaggaatcgacggcggtgggttccttttgcgatgtccctgaactttcctatgattttcaggcaccgatccgggaatatggtcagatttcagagacagcaaaagaattgaaacttctttccatgtttgcacatgattatggggaggcattttgtaatatgcagccacagtttgcgggggatgactgtgagagtacttcagttcatatcggagattttcaggatgcagaagatttatctgaatttcgcatgattacgcgcagaagcggtgatcgtggctatctgtttgtaaacaattatcagcgtggttatgagatggcagagcataaagatgtgatgctgcgtgttcagacagcagatggagaaataagtttcccaaaacaggatattaaaaatggagcttacttcttttatccgtttaattttccgctgtcagatgacgtgacattacgttggattaatcagacaccattatgtaatatcaaccagaaactatggtttttctatggaaatgaaaaaatgcagtatgaggcagatgaaaaactgtctagccaagtgcttatcagtatggatcgaatctgggcaaaatatgcatggcgcatgaaaaaatatccaaatatattgtttttcagtgcgttacctattttggaaacagaaaatgggatagaggtaatttgtcgcagtgatcgtgcacagaaaaactgctggataatcatggatacgactgtggaagatgctaaaacgtggattgacaatgggtggaaaaaatcagatatcattccggatttcttacatgtggaaggtgatgcatccacaatttgcgtgctgagtcatgatctgacggcagcagacaatcagattgtcgcgtcatttacacatacagatgtaaataactgcattatacggaaagaaaaaaatgtttttcacagagcagaaaaaacagatttttccgaggcagaagcatgtgcgattgacgatactggcaaagattatcaggaatatgtgattcgaatttcctatgacaaagcatatgatgcagtaaaagaaaatatcttccttcagattgatttccaggcagatcaggcagaactttatctgaatggcgagaaaattgcggatcagtatttcattggtgatgtctgggaagtcagtctgaaacgatttgattttccaacggaattgatactacggttgtatccactggaggaagatgataagatatatctggaaacgcagctggattatgtaaatggaagatgttgcagtttaaaggatatccgttgcgtgtatgagtataaagaaaagttgtaatagttgaaggagaaatgttgtatggaacagcaaaataataaagaacacctgcatattttatggacaaatgcagatgtgactacagcaaaattgatggtgatgatgtatgccagaaatgctatgaaaaatggatggtggaaagaggtaacggtcattgtatggggtgctaccgtaaaattactggcagaaaatgaagaattacaggaagaattaaaacgtgcagaatcctttggcgtgaaattcaccggatgcatcgcctgtgcggaagaattaaatctggtagataaaatgaaagaaattggtctggatctgtacaaatggggaccatcattgacggaattgattaaatcaggagcaccgcttcttacgatctgacaatacctggcgatatgtctgctattttgttataaagtatatagcgtgagcggattgtggatatctgcctgctttttagagaatgtcctctgcctgaattgcgataagcaatgagcaggggacgtttgtctgtaaatctgccccttggaaaacatcagcatttttgttataatgcaactactggatttttgaaagacgggtgaaatagatggaagaatatttaaaagatatatcagatggaaagttatatagcagcaacgatatggtaaaagtaggctgtcatgactgcaatggctgttccgcttgttgttgtgatatgggtgaatcgattttgctggatccgatggatgtctggcgtctggaacggaaccttggacagagttttgaacaactgcttgcaggtgcgatcgatctgcatgtggaagatggtctgatccttccgaatctgaaaatggcatcatccgcgacaggaccaaaatgttcttttttaaatgaagaaggcagatgcagtatccatgcatttagaccggggatttgccgtctgtttcctctggggcgaaattatgatggggaaaatctgagctattttctgctgacagatgcctgtccggcaaaaaataaatcaaagatgaaagtaagtaagtggcttgaaatggatggaatgaaggattatgagcgatttttagtaaaatggcatgcgctcaccaaatctcttcgtcagaccatgcaaaattgtgatgaagaggaagcaaaacggaaaaatatgctgtttcttcaaatgttttattttactcctgtacagcaggagaatttttatgatggtttctacgaacggcttgaacagtttgaacgcagataagcattcccccgcttcaagtgcgcggagcactaagtggcgggtgaggggggatgcttatgtcagtgggagttgaaagctctcactgacagatcgcgaagcggattgcgaatgtccgctttatctcagtcgagaagactcccacttctgcaagtggtgagtaataacaagcctttctcagtgggagtacaatctccgactgagataaacgctccgcgaggatgtgcagtgattctgagaagaatatgtcagctttcgctgaccagaatcacgcaccaagtctcacgtgcgttcgacttgaatcgtaaaaacaagcgttaataaggagtttgaatgggaaaatctttatacatagcagaaaaaccaagtgtggcccgtgaatttgccagggcactgaaggaagatatgcgtaccttcgatggctatcaggaatcagaaaatgcagtcattacctggtgtgtaggacatctggtaactatgagttatccggaagcctatgatatgaaattcaaaaaatggagtctgtcgaccttaccgtttattccggaaacatttaaatatgaagtgattccaggggtgagtaagcagtttaaaattgtatcgaacttgttgaaccgttcggatgtagataccatttacgtctgtactgactccggacgggaaggagagtacatctaccgtctggtggaacagatggcaggagtgaaaggcaaagaccgccgtcgagtatggattgattctcagacggaagaagaaattttacgcgggatccatgaagcaaaagatttgtcagaatatgataatttatcggaatctgcatatctgcgagccaaagaggattatctgatgggaatcaatttttcaagattgctgacattaaaatatggcaatacattggctggttttctaaatcagaaatatacggtcatttccgtcggacgtgttatgacctgtgtgctcggcatggtagtgcgacgtgaacgggaaatccgtgagtttgtaaaaacgccgttttatcgtgtattaaacagtatggaatttgaaggcctgaccattgaaggcgaatggcgcgcagttcccggatcaaaatattttgggacaccgaaactttataaggaaaacggttttcgggaaaagaaagatgcacaggaattgatcaactggatgaaaagcctggaaccacaggaagcagcagtcatgtccgtggagcgcaaacaggaaaagaaaaatccacctttactgtacaatctggcagaacttcagaatgattgttcaaaactgtttaagatcagtccggatgagactttacgtgtagtacaggaactgtatgagaaaaaaatggtgacctatccgcgtaccgatgcccgtgtactttccagtgctgtggcaaaggagatttcaaagaatatttccggattaaaagggatcaatatggtgcgtccgtttgcagaagaaattcttgagaaagaaagctacaaacagattgcgaagacacgttatgtcaacgataaaatgatcacagaccattatgcaattattccgactggtcagggacttggagctatgcgaggtttaaatccggtttcactgaaagtatatgagacgattgtacgtcgtttcctggcaattttttacgaaccggctatttataaaaaagtgagtctgacaatggggatggagacagagcgtttttttgcttcctttaaggtgttagctgatcctgggtatctgaaggtgatggaatattccttccggaagaaaaagacagaagatacaaccagtcaaaatgatgcagattccaatgaaaagagcggagatgcacatttactggagcagatcgcaaaaatcaaaaaaggtatgacacttcctgtaaatggttatgccatcaaggagggagagacttctccgccaaaacgttacaattccggttccatgatccttgcaatggaaaatgccggacagttgattgaagatgaggagttacgcgctcagattaaaggttccggtatcggcacaagtgcgacccgtgcggagattttgaagaaattggtgaacaacaaatacctcagtctgaataaaaagacacagatcattacaccgaccttacagggagagctgatttatgataccgtatcggcatctatcaagtcattgctgaatcccgaactgacggcaagctgggaaaaaggcctgaattatgtggcggaaggtacgatcaccccagaggaatatatgacaaaactgacacactttattcagagtcgtacaagtggtgtactgggacttcgaaaccagtatatcataaaggattcctttgaacgggtggcgccattctataaaaaatcgcgctaagaatgttttgtgagtaaaaagatcattacaggtgtaggtgtatcacgattatccacaactgatatatgatcaacttggatttataataaaggcaaagatcgattcataaaaaaatagacagtgtagaggtgcagtgatcctgagatgaatatgtcagtttacgctgaccagaatcacgcaccaagtctcacgtgcgttcgactttaaatagtaaaatagaactctgacttatgtgacagatatgttgcacaggtcagggttctatttgtattggcagggttgcaaaaagctatttttaccaacacggataattcaggaaaaaaggactggaaaaagaatggaaaacgtggcacaataagagtgatgaaaaacatagtatgaaaggaatacgaatataaaatggaacagtgtaagatcacaaatatgtatgatttaaatgaaacaattgcaaaagaatatatggagacggcagagtatccgtgggaacttttggacggactttccgattatatcaaaaaactgggtgccactctggatccggagaaatatgagaaacgcggcgaagatgtatgggtagcaaaaaatgctaacgttgcaccgacagcttttcttggaagtccgctgatcatcgatgaggaagcagaagtccgccactgtgcatttatccgtggttcagctattgttggaaaaggtgcagttgtaggaaattctacggaattaaagaatgtgattctgtttaacaaagttcaggttccacattacaattatgtgggcgattccattcttggatacaaagcacatatgggtgctggttccatcacttcaaacgtaaaatccgacaaaacattagttgtagtacgtgatggcaaagaagaaattgctaccggcagaaagaaattcggcgcaatgcttggcaataacgttgaagtaggatgcaattctgtactaaatccgggaacagtcatctgcccggagagcaatgtatatccgttatctgcagtccgtggcgtggtaccggcacattctatttacaaaaaccgcaatgagattgtagaaaaacagtaattagcagagacttatttgtgctattttcgatacaaacaaaattttgtaaaaaaaatgtcagaaagtactttacgaatggcaaaaaatgtgtcaaaatacataaggatgttaaaaaaataacaaagtaatcctgtgcagaaaaccacagttgaaatacgacagaagataaatcatgttttctacgaaaagcaatagaggataggtataaggtatgggatctctttcaaaaaacattcatacatagaaaggagttttacaatgatttattccaaagaagtagaattgatgtgcccggttgcaaaaggcgcaaaacatgaacctgctccaatcccggaagagggaaaatgggttcactccaaaaaaattgaagatatttccggttttacacacggtgtaggctggtgtgctccacagcagggtgcatgtaagctgactctgaatgtaaaagacggtatcatcgaggaggctttgatcgagacaatcggatgttccggtatgactcattccgcagcgatggcagcagaaattttacagggaaaaacaattttagaggcattaaatacagatcttgtctgtgatgcgatcaatacagcaatgagagagctgttcttacagattgtatatggtagaactcagagtgctttttctgatgatggtctggcaatcggtgccggtcttgaggatcttggtaaaggacttcgttctcaggttggtacaatgtacgcaacaaaagaaaaaggtgttcgttatctggaaatggcagaaggctatgtaacaggcattgctctggatgaggataatgaggtaatcggatatcagttcgtaagccttggcaaaatgactgactttatcaaaaatggcgatgatccgaatactgcatgggagaaagcaaaaggtcagtacggccgtgtagctgatgcagcaaaaatcatcgatccgagaaaggagtaatggacaatggctttatttgaatcatatgaaagaagaattgaccagatcaattctgttttaaatagttatggaattgcttctatcgaagaagcagagaaaattacaaaagatgctggtctggatgtatacgatcaggtaaagaaaatccagccaatctgttttgaaaatgcatgctgggcttatacagtaggtgcagcgattgcaatcaaaaaaggatgccgcaaagcttctgaggcagctgcagcaatcggagaaggtcttcaggctttctgtatcccgggttctgtagcagatcatcgtaaagtaggtcttggacatggtaaccttggtaaaatgcttctggaagaggagacagagtgcttctgcttcttagctggtcatgagtccttcgcagcagcagaaggtgccattggtatcgctgagaaagcaaacaaagtacgtcagaaaccgttacgtgttattctcaacggtcttggaaaagatgcagctcagattatttcccgtatcaacggctttacatttgtagagacaaaatatgactacaaagaagcaaaactgaacgttgtatatgagaaagcatactccaaaggacttcgtgcttccgtaaaatgttacggtgctgatgatgttcaggaaggtgttgcaatcatgcatcatgagaacgttggtgtatctatcacaggtaactccaccaacccgacacgtttccagcatccggtagcaggtacatacaaaaaagagtgtatcgagcagggtaaaaaatacttctcagtagcatccggcggtggtacaggacgtacacttcatccggataacatgggtgcaggtcctgcttcttatggtatgacagatacaatgggacgtatgcattctgatgcacagttcgcaggttcttcttccgtaccggctcacgtagagatgatgggcttaatcggtatgggtaataacccaatggttggtgctacagtagcagttgccgtttccgtagaagaagctgctaaggctggtaagttctaa

SEQ ID NO: 13184 - DNA, 7859 bp, Unknown
  gut microbiota DNA sequence
ataccagaggtgatggaaaacgggtcagaaattcatttggtgcaatttatacaacggattttgcatcacatatttttatgatcacgatgtctgcgttttatttgctgaaggacaaactgaagacatggcattttattcttggagcggttgtgggagtattggtttactggttttgcaatacacgtctggatataggctgtctgtttcttatgctggtctgtttttattgcatcagccagagatatgttgcaaacggtagaaatattttcagtacaggaaaagcaaagaaggctttaccttacagcatgccaattgcagcaggatttatgtttgttgtatcctatttttacagttctggaaatcctattttcctggcattagacagttttatgtcaactagattgaaattggggcataagggattgatgaaatatggaatgacattatttggacagtcgataaaaatggttggaaatggtgggactacaaagatatcggcttcccaatatttctttatagactgttcgtacctgtatatttttctgcgatatggagtgttttttttactgatcacattggcggtatacatgatgtgctgcaaaaagtttcaaaatgatccgtattttatagtggttatcattctgatatctattaattgtatgattgcgcatcatatcatagaattaacgtacaatccatttgcactggcattatttgcaacggcaccgcatctggaacaaagatactgtaggagtaataataataaatggtcaagattaaatctgttaaagtaaattttataatgaatatgattctcacggcatctacattcatttttccgctgatcacattgccgtatatcacgcgtgtgctttcggtagaaggtgttggtaaggtaaacgtagctacttcgattgctcagtatttttctatggtagcgatgcttggcgtgccaacttatggtattcgtgcatgtgcacaggtaagagatgacagagagaagctgaccaaaacagtacaggagattctattgctgaatctccttatttctgtttttgtgtatgctgcttattttgtggcaatatggaaagtgccgaagatacacaatgatgctgctttatactggatcatgagttctacgattatttttaatgtaattggtgtggaatggctgtataaaggtttggagcagtatacttatattacagtgcggtcgattatctttaaagcaatcggtctggtgctgatgttcctgtttgtcagacatcagggagattacgttatctatggagcaatcagcattgtggctacggttggatctaatttcctgaattttattaatctgagaaagtatgttaatctgcgaccggtaggtcattatgatttaaaacaccatttcaaagaagtaatgattttctttgcaatggcagcagcaacgacaatttatacgaatctggataacgttatgcttggtttcctgaaaaatgaaacgcaggcaggctattatggaacatccataaaaattaaaggattactggtaagttttgttacagctttgagtactgtattgctgccaagggtttcttattatattgagcgtggaatgaaagaggaattcaaacgggtgagcagaaaagcattacattttgtggtgctgcttgcgctaccggtgacggtatattttattttgtattccagggagtctatctttttgctggcctccaaaacatatgaaaattctattataccaatgcagatcattatgcctacagtacttctgatcggcctgacaaatgttttaggattgcagatcatggtgccgatcggaaaagaaaaaatggtattttattctgtacttgccggaggaattgcagattttgttgcaaatatgatttttattccaacaatgtcggcagctggtgctgcgcttggaacactgatcgcagagactgttgttctgattgttcagctcattgtattgcgtgactggatcagggatttgttttcagaagtacaatgggtaaaagcatgtgtatctaccgcggtagcaggagttgcctgttatggagtaaaagcactgaatttatcaaattttatagccctagtaatatcggtatgtgtttttggagcagtatatgcggtattacttttgattatgcgggaaccgttattccttgaggtattacaggatgtattgcatgggaaagtgaaacgtggaaaggcagagaaagatggagaataacattgtcatttcttttattataccggcacataattcagaaaagtttctgaaaagatgtgtggaaagtgtagtaaaagaggaaaagcaaccaaaagataacaacctggctgaagtcataattatagagaatggttcttccgatcatacaaaacagattggaacagctttggctgaaaagtatgagaatgtttttctgatctgttctgaaaaaggtgtttcgaatgcaagaaatgctggagtaaaagctgcacatggagaatggatttttttcctggatgcagatgactatcttccagcaggaactttgcagaaattattggatacggtaaatagcggaaaagcggcagatctgtatattttcagttatgaaaaaggaaatgcgatcgtaaatgttgcaactggagaaaatgcagacggttatgaaggaaccggggtacgggaatgccttgcaggaatgctcaggaacccgacacgctgcatggctgtctggggtaaattgttccggcatagtattattcagcaatcttcattagattttaataaaaaattaagcctggctgaagacagtgatttcctgattcggtatataataaaatgtggcaggatcattttttcacaggaatcctgttatcattattctacggatgcaggttctgcaatgcggacatatgacgggaagaagacggaaggatacctgttatctctgcagacaacacagaatgcgataccagagaatgaccaacagttatatcaggcttatcaggtgtatattttaatgcatctgaatataatgatggtcagagaagtattttccgcgggaaacagagtggctttttcagaaaaggtgaaggcattgaagaagcttctgcgggaggaaatatttcagaaagcattgcaggctgtaccggtagcttcctgcagatctgcgcgtatgatgccaatattgcttttaaaatttcagcaatattatttgtgtggaaaagtgtatgaactgcgtgcaaagcagaatgaaaaaaaagaaatgcggacagaggattaggttgatggaagagaactactatgtggatgtaaatatgcaaaggaatggtaaaacgaaagcgcagattcatgcggcatcaccaaaaaatgcaattattctggccgccggatatggtatgcggatggttccaatcaatacagaagtgagcaaaggacttctagagattcacggggaaccactaatcgaaaggttgatccggcagcttcatgaagcggaaatatacgatatatatatcgtagttggatttatgaaagaaagatatgaatatctgattgatgaatatcgggtggagttgatcgtaaatccggaatatacaacgaaaaataacctgtattcactgaaatgtgcagaaaaatatatttcaaatacgtatattgttccatgtgatatctggtgtgaacataatctgttccgaaaacaggaattatactcctggtacatggtaaataattctttaaaaccagacagctgtgtcttagtaaatcaaaatatggaactgaatctgatatcagagacagatgccggaaatggtatgattggtatttcttatttgacaggaaaggaagcgcagctggtaaaacaacggataaaagagatgtgcagtacatcctgttatacgagtgcattctgggaagaaacgctgtatgaaaaaagaaaaatgatcgtgccggccagagtagtagatgaagcagatgtagtagaaattaatacatttgaacagttacgggagttggacagcggttgtgatcagttaaaaacagatgcgattcagattattgaagaagtgttccaggtgtcgcaaaaggatataaagaatattacggttctgaaaaagggaatgaccaaccggtcatttttatttgaatgcaaagagaaaaagtatattatgcgaatccccggtgaggggacagataaactgatcaacagacgtgaggaagcagaagtttatcagaagatagcagattatcatatatgtgaccgggtaatttatatgaatccggagaacggatataaaattacagaatatatgaattctgtcagaaactgcgatgcagagcagatggaagatgtgaagaaatgtatgaaaaagttgcgcgagtttcatgaattaaagctgaaggtcaatcacgaatttgatttgtttgaacatattcaattttatgagcaattatgggagggaagcccttccacttttaaagattatgcggagacgaaaaggaaagtattttcgctgaaatcgtatgtggaacagtattgtgggcagaaagtactgacacatattgacgctgttccggataatttcctgttttgggagaaaaatccggaagaaactgacattaggctgattgactgggaatatgcagcaatgcaggatccgcatgtggatattgcgatgttttgcatttatgctatgtataacagaacacatattgatcagacaatcgatgcttattttacagaggggtgtgcagaaaacatccgtataaaaatttatgcatatatagcgatatgtggtttattgtggagcaactggtgcgaatataagcgaagtcttggtgttgaatttggagaatattcgctacggcaatacagatatgcaaaagagtattatgcgattgtagagactgagagaagaaaagtggagatataggaacatgtataaagtagaaagagcaatcattatggctgcgggaaaaggaacccgaatgagaccggtaacgctgcatacaccaaagccattggtaaaagtaaatggaaagagaatgatcgacagtgtaattgaagcgctgcataaaaatggaatatctgaaatttatattgtagttggatatctgaaagatcaatttgagatattgcccaaagaatatgaaaacgtgaagctcattgaaaatccattttatgacacctgtaataatatttcatcattatatgtggcaagagattatatagaaaatgccattatattggatggagaccagatcatttaccatgagaaaattctggccccggaatttgatagatccggatacaatgcagtttggacagatgacgagacagaggaatggctgatgacggtggaaaaagggattgttacttcatgtagcagaaccggtggaaaaggcggatggcagctgtattctgtatcaagatggaacgaagcagatggaaagcgtctgaaacatcacctggaactggaatttaatgagaaatataaccgacagatttactgggatgatgtggtaatgttttgtcatgcggacgagtatgaactgggtattcgtccgatgaatgcagatgatgtaattgaaatcgataatctggaggaactgatagcattagatggatcatataaagatatgtgatgaaatgcaggggaggagaaatgaagaagaaaatagactggatggtcacgttagtgccatttattataattgttggtattgcagtgattttgtttatatggccgagagaatccaatgatgtaatacatcagataagattttttcttggagatacactgggtagctattatttgatcattggcttaggcgttttattgatatctgtttatctggcgttttcaaagtatggaaatatcgtactgggcgaacctgatgaaaaaccgaaatattcattttttgtatggggaagtatgatgttcacctgtggactggcagcggatatattattttattcctttgctgaatggatcatgtatgcaacaaatccgcatatagcggaccttggaccagtgcatgaatgggcaggggtatttcctttgttccactggagtttcattccatgggcgttttatctggtgcttgcggttgcatttggttttatgcttcatgtaagaaagcgaaagcgtcagagatattcagaggcatgccgcccggttatcggaaaacatgcggatggtctgctgggacgtgtaatagatatgtttgcgctgtttgccttgctggcaggaacagcgacaacattcagcgttgcaactccactgctggcaggaattgcaatgcggttatttcatattcatgtcagccgaacggtcgtgacgattatcattttgctgattacatgtgctgtttatacttatgcagtgttacatggctttaaaggaatcagctttctggcaaaattatgtatttatctgttttttggattactggttgttgtgcttgtgtttggcggtcagggacgtttcattattgaaaacggaattcagtctcttggaaaaatggtacagaacttcattggattagcgacctacacagaccctgtcagggcaaatcattttccacaggactggaccatttattattgggcatactggatggtatggtgtgttgctgctccgttttttattggcaatatttcaaagggaagaacgataaaacagacaatacttggaggatacgtttttggtgttggctcaacaattgtaagctttatcgtgctgggcaattattctctgggattgcaggtagcaggaagagtagattttattgctcactttaaggcaaacggagatttgtatgatttgatccttaatattatacagacaatgccttgtgcaccttttattctgattctcacttttgtatgtatgattgcattctatgcaacatcctttgattctatagcgtataccgcagcatgctatagctataaagaacttggagaaaatgaacatccgcacacattaattacattattatggtgtgttctgttgatcgtgttaccgatcgcacttgttttttcagaaagttctatgggaaatattcagtcgatcagtattatttcggcgtttccgattggaatcatcatgattctgatgatatggagcttttttaaagatgcaaaaaagtatatcagcaaaagtgatacaaaatagttacagtgacttaataaaaaattaaaaataaaaaggtacagaaaaagatggtttgagtatataatatacttgtataaaaatggtcaaatctatcataatgataaaaataggaaatgcagacagattattttaggagtaaaagaaaatgtacagagttcttgtatttggaatgacagaaaatcccggtggtgtggaaagtgtgatcatgaactattaccggtgtattgataaaacaaaaatacaatttgactttctttgtaattttcatgaagatgcggcgtatgaggacgaactgaccgccatgggcggtaacgtttttcatattacagcccgcagtgagaattatggaaaatataaaaaggaattaaaagcattttttaaagattcacagggaacatacgatgcgatctgggtaaatgtctgtagtctggctaatattgattatttgattatggcaaaaaaatatggcatcccacggagaattattcacagtcataattcacagaatatggacagtaaactgcgtggcatgttgcatgaaagaaataaaaaacgcattgataaatttgcaaccgatttttggacatgctctgaggatgctgcaaaatggttttatgaaaaacgtctgcttccgaaagttgtgatgattcgaaattctatctcagtggaacgtatggctt

SEQ ID NO: 13185 - DNA, 163 bp, Unknown
  gut microbiota DNA sequence
gtcaagcggatattcgcaatccgcttcgctacttgctcataaccgaataactgctccgcagtttatcagaaggagcttgcactcctcctgatacaagcaagtccccacccactgcttattgcttttcgcaattgaagcaggggacttacttgattcggttaaa

SEQ ID NO: 13186 - DNA, 3278 bp, Unknown
  gut microbiota DNA sequence
actcccactgagaaatacttgttactactcaccacttgcagaagtgggagtctcaactcagactgagataaaaaataactccaagaggataattgtaaaattttcgttgtgaccgctgcatccagcccgtccgcaagagtgtgtctgaacccgctggttttgcgggtgagttcacggaagcggacggaaataagcgatgctgtggtcacagaaaatttttcatatccttttggagttattttttatttgttccttaaacgacaaacaagagttttcttaaatagcttccagagcctgcgccagatctgcgatcagatcctctttgtcctcgagtccacaggacatacgcaccagtcctgccgggattccagccgcctcaagctgttcgtctgtcatctgacgatgtgtggaagttgccggatttaaacagcaggttcttgcatctgccacatgtgtctcgatggcagctaatttcagatgtttcataaatgtttctgccgctgcacggccgccttctaattcgaaagatacgacaccgcatccacccttcggcatatatttctgtgccagatcatagtatttatcgcccggaagtccgctgtatgtaacgttgactacctttggatgatttgccaaaaattctgctactgcctgtccgttttctacatgacgcggcatacgaacatgcagggattccagaccaaggttcagataaaatgcatgctgcggagactggatgcttccaaggtcacgcattaactgtgcggtacattttgtgataaatgcaccaccctgaccaaatttttctgcataagtaattccgtgataggaatcatccggtgtgcagagtcccgggaatttatctgcatgtgccatccagtcaaagtttccggaatcaacgattgctccacctactgctgcgccatgtccatccatgtattttgtcgtagaatgggttacgatgtctgcgccccactcaaacgggcggcagtttaccggtgtcgggaatgtattgtccacgatcagcggtacaccatgtgcatgtgctgcttttgcaaatttttcaatatccagaacggtcagtgcagggtttgcgatggtctcaccaaataccgctcttgtattctcctgaaatgctgcattgagttcttcttctgtacaatctggtgctacgaatgttgctgtaatacccattttacgcatggttacttcaatcaggttgaaagttccaccgtaaatggcagaagatgccacgatatggcttccgcactcgcatacattaaataatgcaaaaaagtttgctgcctgtccggaggatgtcagcattgccgctgtaccgccttccatctctgcgatctttgctgctaccagatcattggtcggattctgcagacgggtatagaaatatccggaatcctccagatcgaataatctacccattgcctcgcttgtctcataacggaaggttgtggactgaacgattggaatctgtctcggctctccatttcccggacgatatcctccctgtacacacttcgtatctaatctgtaatcactcattttttccttctccttttcctaatcttctgccctttataacagaagaaaacgttttcataaatacattttatatacggatacagttttatgtcaacaaaaaaatacagcttgcactgctattacacagacaaactgtactttttcaaacttactcactccgcttattcatcgtcagaatcggaaccagatgattatataccaaaaatgtgatcaccacactgatcatcgccttaataaacgtaaacggcatattaaatacgatcagactctgcaggatgctttttacccctgggaaaattgcctgatatgctgccagaatcgtatctgccggcatgaaattataatataccggatatacaacgaaataattggatacaatactgacaaccgccatcaggactgcgccaagaatggctccgccacaggcactctttttcgatttctttttcttatacaataaacctgccggcagaataaataccgcatttaaaataaaattagaaagttctccgacaccgccagtagatgtcaccgtcagatgtaacagatttttgatcagtgcaataataatgccgcccaccggacctactgccaaactgccgatcaacgccgggaaatcagacagatccatcttgataaacaccggcatcaacggaacactgaactccataaacatcaaaatatacgcaatggcagataaaacacctacaattgccattttgggaatatttgattttattggttttttcgcttttgttgccatactttatgaacctctttctctatcgttttttcttttttgaccgaaaatgactgataaacacggacgcggtaaacagaatcgccagaaaatagccgatggctcccagtgccggaattccaagtaatttcggtttcatatcggtggtgcagataatactggaactgatcagaagcgccatgatcaaaaatcccatgaccaaccgccgcaccagcgcattcagcatcaccgtcagatcatccgtcgcgtgcagatccagattgatactggtctgtccctgcatatagcttcgtaacagatctgatatataagatggtatcttgatgcctttctgtaatgcctgccagatttcttttccactcatgcgaagttcctttttcagatcaaaatcagacagtttatttcctgacattcgtacagatgcaacttgaaccacattgatgtccggcgcaatctcagcgatcactccctcaatagttgtcagaccacgcaccagcatcgtcaaactgtgtggcattgataccctgttttctttcataatatcgatcagatcctgcatcagcgttcccatattcagaccgccgaaatttgcagaaccgtatttggcaagccagtcaccaatatccgaatacagcagcttctgatttggtttgtcgtgaaattctcccaaggataatacggcttccacgatcagactgacatcatgcgttgccacgcctttaatgaccttggtcaacagagcctgatcccgctgggaaaaacgccccatcattcccatatcaatccagacgatcttgccacctcgaatacgcagattgcccggatgtggatctgcatggaaaaatccatcctccatgatctgctttacataattatctgccatcttggttccgatctcatccagatcatagccagctgccaataatttgtccttttcgtccacaccaattccttcaat

SEQ ID NO: 13187 - DNA, 9358 bp, Unknown
  gut microbiota DNA sequence
cattggactggtcacaaatgccacgtctttattcaaacgtgcaaattcttccatgtttgccgcttctgcaaggaaattcatttcttcctgtgcaaccacccacatctcatccagaacctgattcatatctaccagacctgccatattaatcggcggcatcagttttacggcacgatgcaaaaatgcaatatcccgggacatggtttcataaattccctgacgctgcaccttgaccactactgtctcaccggttttgagttttgccttatgcacctgagcaatggaagcggaaccaatcggtgtttcttcaaagtctgcaaatacttcgttaagcgctgttccataagcgtgttcgatcacctcttgcacttccgaaaaaggcatcggtgttacttcggaacgcagacgcataaattcatcacagattttctttgggaaaatatccgaacgcatagacataatctgacccagcttaatataagttgggccaagatcttccagaatcaggcgtaacttttccggagttacgcccctggcaatttgatgtttgtgaatgactgatataatttcccgcaatcgggttccattcgtatctttttcactcataatttcaatttctttcaatctgttttcattgtgccttccttttttccttctgtttggaaagcacgattccttttaagtcacacacaggagacttaacacctgattccagtcaatgaaaattaatagtttcttcttagaatcacgatatcttctactcttctgctgcttcctcttttgtctcttctgctttttcttctgtagcttttgcttccatgtttgcaattgcagcttttaatgcctcgatctgctccggagtcattccttttaatacatcagcaggatcctgctcatcttttttgaatgtctgttttacattatgctttaattcttcattcaagacttttccctgctctacggtcagctcacctttttttaccagatcatccagaatctcttttgatttctcagcagtcgtagctgctgcaccgatacctgccaataagatttttttcatgctgtcactgattttttccataataaagttctcctttctcatgtcaggaagaatctcaccgcctatagagacgggagtcgtctcacatctgatatatgttcagtatacactacttaaagttattttgcaccacaatttttcttcacaaaaatgtgttacagctcactcatcatatgcattcagataatgatcatgcctgcatcaaaaattgcccggatacataataatgaaaagaatgtctttttatgaaccaaaactcggtccagtgttctatttttgcatctcatatccataatgcgcaaaataaaagccaagttttgcattgatcttgtcccgaagttccggtgtcagctcaaatttattcttctgataattcttctggctttccagatatgcgtcaaaatacggttttgcctcctcgaacccatcaatgccaagatgatcgtagatctgtttgacatatccttccggatctttgcagaaatcttcatatttgatatcaatataatcctccggcggcatggcatccagctcacggaatgcttttttataaatgcgctcgaacagatcaatggtcacatcttcgatcacctgatgagacgccggctcatttaagcagaacagccccatttccttggtaaacatattgatggtggacatgacaacggtatacggattgcggtaaatattgataaattttgctcccggataacattttttcaaagcaccgatcctgcatgtattttccgggcttttcagcagaagctgtttgcccccgtacagatacgtcacttttttcaaaatgtagtcatacaccttgcgccattcctgctgccttttctcatcctgctcgtcaataaaagcagtctcaatgtatttgacaccttttccgccatccggaaataccagcatgtgactgatcgcctgggtagaaatcgttgcctgcgcaaatacttcctccatcggaagatccagcgtatattccagattatccatcggacgcgcgccctgcagcagcttcttctgtgcttttgccagaatccctttcataaaaatacagttgctgaaagtcacagtacgaaccggatcaaaccatccaaactgcggatctctggtcagcagattttgcaaaaatgttgttccagaacgccagtaacccacaatgtatactggatcttttttgatttttgtccgtttgatcggcacataaaagaccagccattccaaaaatgccggaactgccagaaccgacgacactgccgtgatcagccgcgcctgtgctttattttccgcggtgatcgggttgctttttttcaaacgtaaccagttgtccagtcgacatcccatcagattgtgggacagatttatcttttttcccatggtatctcacacttgcctttctgccagtttcccctaaattcccatttgactcattatttttactaatcttacgaaataaacgtaggaaactcttataaaattaaaaagtatctttaaaacctatttctactgttttatcaaaatacaataaacaatacacagctgtctatatcttccatatatcggaaggaacttaatcccggacagaattttgcaattccatattcttccacaaaatactgcatcgcctgctcatacagatccgtacttgcgaacttcacctgtaccatattttcgccattctgataagcctgtgcaaaaatcgctccgatcgtttccggattccattccgtaatataccgcccctcgtgcacatagtaattatctgcggtcgcggtacactccggcagactgatccgttcatccgcggtatgggactgcatgatatccgccgtggaagcaccaaaataattgtaatcaatatacttggataccacattttccttctgttcatcctgacgggacagatactgagagtttccccatgtagtatcaatataatagtagtccccgtccagctttgccagattccatgcatgcggtccgtcgctgacatttccaagcactgttgtacaggaaatccccagtttttccaacaggtactgcgttgcatacgcatatccctgacaaatggtttcatgattcaaaaacacactaataatgttctggttgtcagcagaatcatccacataatctacttccgtgatcaatttttcaaacacatacagtgccttatcatagtccgttccatccgtcggcgcatctgccagcatccggtctgcttcctcatcgatctgcttctgcgtctttttctgttcttctttgctcatgctgtattccggcgtcaccatgattgctgtgatctcatcgccacggttataggtcacataggaaaactgtttcagccagaacaggttacagtaatcacagcgcactgccagatatgccagttccatttcatcgacatccgtcgtcgcgatctgcaccttttcttcccggtgcatgatagcgtacaaaatctcatcatagacaagtttcgtattgtccggcagcgtgttgtaagcatatttatcctgtgataccgtctttacctccaacggattgtttcccgtgacaattttttccatacgatctgccacttcatcagcatttttcccacatccggtcaagccagacactaaaaccatcaggaatagaaaaatcggcaaacatttccatcctgtttttttcatttttttcactcaaatatacccgctctttctaaatcggtaattacattttgattgcttttttctaatttcaattttataatatttgtaataggaacgacaacacaatttccattcccaatgtgtatcatccggattactacaaatccaaaagataatgataccataatccacattttttgttaacaggagattctgcatgattgcattaaaaataaccgatattggcacctttatcaacaaattactaaaagaaggcatgtgcgatcactttcttttgcaggaagcagtcattacacaggcggcaacctttacgattgacggttcccttcaggcagattatttcgattctgaagaaacggaaaaccttcaattgcaggatctgtcctatgtgccattttccctgatgcgtccgcattgtctgaaactgatgcagggcaaaaagaaacctctttattttaaatttgtgtttcttctctctccggcaaatcagttaaacacggtggaacgcgcaggtacttcctttttaccggaagatgtcagtggcatgtatctgcatttcacttataaaaacgaaaccctgacctgcaccacaggaatctcctaccggaaattttctctggataagacgctggatcaggaatgggatcgcttagttcccgtctttcttcgtaaaaatggtattgcggcagaacctgtctgaaaggactgccgcattttttcttttccttatcatcttactgttcctcagagtgtccatacaagctgtaagacatctttttatctcaaatatttgttatcacatctgattatcccacatacttgttattcacatctgagtttcgctctgcgctaacactgctttccgatctcgcgcagcatcagcactgccattccgataaatacacaaaaatccgcaatgttaaaaatcaattttttcaaaaatggaatcggaactttaaactgtacgtaatccgtcacatatccatgccgaaaacgttccagcaaattggcaagcccaccgccaaggatcagtgccagaccagcctttaaagcactttttcctttcaatgtcattgcaagcagaaacatgatcgtaagaatacttacaacaccgataccgatgcctttgacaagctgtggctttttctccagcgtattatttgccattccttcgttatggtatttgcgcagacgaatcggaagtctgcccacctcccggttttcatttgttgaaaaatttttattcacccgacggcgaacaaaaaattctgccgcacagatcgccacaatgattcccacataaatcatacccgtatctctcctttcttatgccggtttccttatttattctctagtcatctcagatctaatacaattctttttccagacggcggtatacttcccgaaatggcagatgctgctctctggcaattgccgctacactctcatattccaatgtcggtacttcgccgtttttctttttcatggtttttaccgccacatcacccagagaagtctgctctgttgattttctgcgctgtaagatcgtgcgctgcatcagtgcacggcgaatgccgatggtcgttgtctcctcaaaaataatgtcttctaaacgctcccgatcctccggacggcacaaaacagtcaacatatatgctgggcggttcttcttcatataaatcggaagatagcaggcatccaaagcaccattttccatcagacgctccattgtgtagccaagcacttcaccgccgcaatcatcaatgttacactccagtttccagatttcatttggtgtcgttgtgtctgtgcagacaatgtcctctgctaactcaatttccgggatatgatccagtttttcaactcgctcaagatgagacatcagattatcttcagcggtttcggtttccggcaacggctcatcttcaatcatttttgtttctggcaatggctcttcttcaggcattttcgtttccggcaacgactcatcttcaatttctttcatttccgacagtgaatcttctgtttctaccgaactctcattatttaattcttccggacacccttcttctccttcttctaaagtatcatcttgtgactcttctgcctgaatttcatccggttccttttctggtgcaacctgactgataatgctttcctctaaaaactccaggtcatcgtcccagtcagaattttgctctggtgctttcgtaacactttctgtattttcttcttcagaaactggggattcttgcaaaatatgttcctgctcagcttctttttctggaaaatcggcttctatatttttctctatctcttctttctccggaaaattagcttctatatttttctctacagcttccttttccgaaaaatcagccattccactcttctctgcatttccgtcttcaagcaccatgatccgcagcacgccattgcttccatccgatgcagtaccacgaccggttccgatcttgctgacatggtactcctccggcagatgatccgaagtacggcatgccgccagaaaagcagctccttccggtgtcacccatgcactatcgcgttccatacggtgcattgcgatctcagcccccatcagaatatataacgtttccggcaacggtaccgacaccggttcatgatcaatataaatttgtccatatccatcgtacacgatcggacaaatgatcgtatctgcttccagacgttccatacaaatagacgctgccagcatagcaatcacttcatcataatctttttcctgaaattctacatgtgcaatattcactctctgcactgctgcctttgcatgaagccagatgtcatatgcacgctgaaacaactcctctgctccctctggaagtgcaaaatctttgatttttcttggcagtttgcgaatcatcgccgcctttacctctgccgagcagtccagtgtaagcagctggtctactgtcgctttcgcctgtgtctgttccggcatcagatttaacaatgcctcaaccatcattttcgcactcagtccttcatagcattgtatgtatattgtctttcccatttatctttcctccggttctcaaatctttccctcccgtggaggtggaaaacatctcttatctctgaaatttctccactgatatcctcttgttattccttacctatagcggtgggagttatctcatatctgatgtatcctgttaagatacagtataaaataaaaatgagaaaaataccattgctttctttttgctcacatcttctttttcgttttctataaattctgtttttaagctaaagattacatttttatccaatacaatctttctttccaggatcttatgataattcattttggttttatcatactgcaatttcaccagttatcatgcagtctcacaacaaattttaccctgattactttttagtcatatgaattatgcacaatttatttttcaaaatttgtgaatcattgtgaacacttgcgtctacacatttgctattataataactgtaaaaaccccaatacattataagttttttgctacccccatagtaaaaaataccttctccttagaggacagccgttcggatttggctgtctttttattttacaatttttcagaacacaaagaatcctttttacagttattgaaaaggacttcagtaaagcggtcattcactgcttgctcatgaacgccgtcactttacttattctgtatttatcttttgcgaatgtacatatcttctaatttccccgcaaacggctcaacgcctgatatacttccagcactccatacccatataccggattgggatacgtccggtcctcatcccgcaccgctccgcggatcagcagatttttcagatctgtcgtattcagatacaacatattattttccacaattccccattgaaaaagctgagcgcaggcaccggcagtcagcgcagcactgatacttgtaccgctgcgaagttcatagcggtcccgaagcacaggtcccagtacatttactcccggcgcgacaatatctggtttcaccgcatccagactggaaaatcctctgccggaatccgggtcaatgcttcctccgattgcctgatacgctccggtggtgatcgccacccgcgacattcccggcatagtgaccgtcgtgttcggatcagatctcaggaaaaatacttctccactcaacagttgcgacaacggaagccagcagaatatatttccactcagcacaaaatctgcctgcaattccaccgtccagattccactgagcggttgttcaaaccgcagcatgatctgctgcatgctgtttctggttcccacaatggcatattctgccgttaattttgttttttcaaacaaaaatacatattcctgccgttctcccggacgtaccacagtcttcgggaaccgttctccggtaggcgatacgatcgacagttcataaatctccggaaccatcgtccagatttccatctgaaatcctgcaagattactgccaacggacagttcaatactctcaaccgcgccctcttccattccccttttttgataatgccgccgctgatttgccgcatttcctgctgccacaacaactgcccgctgccgtcttcgtccaaactcatcacactggatcgccagcggttcatccccgacatgatttccaagtccgctccccatgccaatacataataccaacggcattcgccgctcatatgcaaaacggttcagccagctgattcccatcatcagatcattttcctgataacattcctgtccctgtggaataaaataataatcccgcagatatggtttcgcctgtttgcattttacaactgcaatctgagccagcggtgctgctcccgaaaaatctgccgtgccatctgtgcttccacatgctacccccgccagaaatgtaccatgtccattttcgtcctgttccggcacaatctcccgcggtcgttctgaccggagtgcttcattaatctgttcctctccataaaatgccccgtaaaccatcccattcggcggtgttccatcttccgccgtctgatcccagataccgacaatccgtgtggtcccatcctcattttggaaagccggatgttcatacgtaattcccgtatcaacaaatccgatcaaaacgccctgtccctgcagatccagtgctgatggattctgtaaacgcaaaatcccgctgacttccagcgctatcatatccatcggcaccagacaatgcgggatcgtcagatacggataatccaccagattcaactccggtgcccgctccctgctgtaaaatccaatgtcatacgtattgtccacctgtaagatgcattccggatctcccagtggatacccaccgatataatcaatgatcaggtcgtaataatcattcgaataaatcacctttttgcagatattatcgtccatatttttctcagaaagcttttatctataagttatgcgaagaaaaacctttttgtttcttctaaacacctctgtcatctgcccaagaatatatcccccactgactatgattgttgtacaagtcaagcggatattcgcaatccgcttcgctacttgctcataaccgaataactgctccgcagtttatcagaa

SEQ ID NO: 13188 - DNA, 7152 bp, Unknown
  gut microbiota DNA sequence
agactcattctgcgacaagcgattagcggttgcagaaggagtctctgatttcgcccttcataatagtttagccaatatccacaaaaaagaatgaattgaatgcaaaatttgaaaaaattacctgtaacacatgaatttgattcctacaggtaaatttttttataaagaaatacaaagtgaaattgtgcgaaacaaaacaaaataaacagataattaaaataatttagagacaataatgtgataaaaaataagttatctaattatctgacaacttaagaaaaaaagtgggtttacatttgcccgaaaaagcgatatagtatatccaatcaatcagtttgcgttgaatacagataaaaaagagtatttaacagattacagaaagactaactaaggtattgtaaaaactgaaaatgtctgcagaaaggaagatgttatgaaacttcatatgaacgagagcaacgccaaggctgtcggcatgtacgatccaaggttcgagcatgacaactgcggtattggtgctgtggtaaacattaaaggtgtgaaaacacatcagacggttgagaacgcattaaaaattgttgaaaacttaaaacatagagctggcaaagacgccgaaggaaaaactggtgatggagtaggtattctgttacagatatctcacagattcttctccaaaaccatgaaatcctccggcgtctttttaggtgaagaaagagattacggaattggtatgtttttcttcccacaggacgagttaaagcgcaatcaggcaaagaagatgtttgaagtcatcatagaaaaagagggtctggagctgctggcatggcgtgaagtgccgactgatccgactgtcattggacagaaagccgtagactgcatgccatacattatgcaggcattcatcaaacgtccggatgacgtggaaaaaggtctggactttgaccgccgtctgtatgtggcacgccgcgtttttgaacagtctaacgacaatacctatgtagtatctctgtcaagcagaacgatcgtttacaaaggaatgttcctcgtaaacgagctgcgtctgtttttcaaagatctgcaggatccggattatgaatctgccattgcaatggttcattccagattctccacaaataccaatccgagctgggagcgagcacatccgaaccgctttatggtacataatggtgagatcaatacgatcaagggtaactccgataagatgctggcccgcgaggagaccatggagtctgaacatctgaaaggtcagttatccaaggtgcttccggtggtcaatacatccggctccgattccgcaatgcttgataatacactggagttccttgtaatgagtggtatggaacttccgctggcagttatgatcactattccggagccgtgggcaaacaaccatttgatgagtcagaagaaaaaagatttttaccagtattatgcaacgatgatggagccatgggatggtcctgcatccatcgtattcagtgacggagatatcatgggagctgtccttgaccgcaatggtctgcgtccgtcccgttattacattacagatgatgattatctgattcttgcatctgaagtaggtgtgctggatgtagatccgacaaaggttgttacaaaagaccgtctgcgtccgggcaaaatgcttttggttgataccgtcaaagggcgtgtcatcgatgatgatgagctgaaagaatcttatgcgggcaaacgtccttatggacagtggctggatgaatacctggtagaattgaaagatctgaaaattccgaatgtgcgtgtaccgcgttacaccggcgatgatctgcaccgcatccagaaagcttttggttattcttatgagtctgtaaagacagtcatgcttccgatggcaaaaaccggtgcggaatccacagcagccatgggtattgatacaccgctggctgtattatccgatgatcatcagccgctgtttaactatttcaaacagctgtttgcacaggttacaaacccgccaatcgatgctatccgtgaggagattgtcacatccacaacagtttatgttggtgaagatggaaacattctggaggaagagccgaaaaactgtcaggtactgaaaatcaaaaatccgatcttgacaaatactgaccttctgaaaatcaaacatatgaaaaaggaaggcttcaaagttggcgttgttccgattatttattataaaaacacaagtctggagaaagccattgaccgcctgtttgttgaggcagaccgtgcatatcgtgacggcacaaacatcctgatcctgtccgaccgtggcgtggatgagaaccatgtggcaattccgtcacttctggcagtttctgcaatgcagcaacatctgatccagacaaagaaaagaactgcagtggcaatgatcctggagagtggtgagccgcgtgagatccaccattttgcaacactgcttggttatggtgcctgtgccatcaacccatatctggcgcagaatacgattgagcagctggtagatgatcatctgcttgacaaagattattatgctgcgatcaatgattacaactctgcagtattacatggaattgtaaaaattgcttccaagatgggtatttctacaattcagtcctatcagggatccaagattttcgaagccatcggtattgatcgaagcgttattgataaatattttacagatactgtcagcagaatcggtggcatcacgatttctgatattgaaaatgatgtaaatgagctgcattccatggcatttgatccgcttggattacagacggagctgacactggacagcaaaggacatcacaagatgcgcagcggagcacagaaacatctgtacaatccacagacgatccatctgctgcaggagtccacaaaacgtggggattatgatttatttaaagagtatacaaagctggtcaacaatgagaccgacattatgaatattcgtggaacgcttgatttcaaatatccgaagtcaggtattccaatcgatgaagtggagagcgttgactccatcgtgacaagatttaaaacaggtgcgatgtcctacggttctatttcacaggaagcgcatgagacacttgccatcgccatgaaccggttacatggtaaatccaattccggtgaaggtggtgagagcctggaacgactggatacggagcggtgctctgctatcaaacaggttgcttccggacgatttggtgtaaccagccgttaccttgtcagcgcgcaggaaattcagatcaaaatggcacagggcgcaaaaccgggagaaggtggacatttaccgggtaaaaaagtatatccgtggattgcaaaaacaagactttccacaccgggtgtaagtctgatctcaccgccgcctcatcacgatatttactccatcgaggatttggaacagctgatctttgacctgaaaaatgcaaacacaagagcacgaatttctgtaaaactggtatcagaagcaggtgtcggaactgtcgcagccggtgttgcaaaagccggtgcacaagttatcttgatttctggttatgacggaggaaccggtgctgcaccgagaagttccatccacaatgcaggacttccttgggagcttggtctcgctgagacgcatcagacactgatcatgaacggcctgagaaataaagtccgcattgagacagacggaaaactcatgagtggtcgtgatgttgctgtagcggcaatgcttggtgcagaggaattcggttttgctacagctccactggtaacgatgggatgcgtcatgatgcgtgtctgcaacctggatacatgtccggttggtatcgctacacagaatccggaactgagaaaacgttttgccggaaaaccggaatatgttatgaatttcatgcgttttatcgctcaggagcttcgcgaatatatggcaaaacttggtgtccgcacggtagatgagctggttggacgttctgatctgctgaaagtacgtgacaacttaaccggtcacgctgcaaaactggatctgaagaacattctggagaatccgtttgcaaactcaaaggataaagtaatctttgatccgaaaaaagtatacgatttcgaactgcagaaaacagccgatgagaaagtgctgttaaaacagatgaaaacggcacttgagcagaaacagaaacgaagcattgaaatcaatgtttctaatatcaaccgttcctttggtaccatttttggttctgagattacaagaaaatacaaagatacactggaagatgatacttacgtggtaaaatgtaacggagccggtggacagagtttcggagccttcattccgaacggcctgacactggagctggaaggtgacagcaatgattacttcggaaaaggactttccggtggaaaactggtcgtatatccgccgaaaggcatcaaataccgtcaggatgaaaacattgtcatcggtaacgtagcactttacggtgcaaccagcggaaaagcatttatcaacggtgtggcaggagagcgttttgcagtcagaaactccggtgcaattgcagtcgttgagggtgtcggtgatcatggatgtgagtatatgaccggcggacgcgtagttgttatcggaaaaacaggcaagaacttcgcagcaggtatgagcggcggtgtcgcatatgtactggatgaggacaacgatctgtatacaagaaccaataaagaaatggtatttaccgaggaattgaccaacaaatacgatgtacaggaattgaaagaactgattcaggaacatgtcgctttgaccaattccgtaaaaggaaaagaaattctggataacttcggagaatatctgccgaaattcaaaaaagtcgttccatatgattatcatcatatgctgacaaccatcgtacagatggaggaaaagggctacaacgtagagcaggctcagattgaagcattttatgcaaatcttgaggctcaggcatagaaattttacatgagaagacttcacttctataaaaatatagttttacggaagtgaagcccttatggtgaattatgatgaatttcggtaaaacaggaggattaaaatgggaaaaccaacaggatttatggaatatgaccgagaggtaagcaaagcggttgaaccgaaagaaagaatcaaaaattttgatgaattccacatccacctctcaaagaaaaaacaggagattcagggatcacgctgcatggcatgcggcgttcccttctgtcagtcaggtatgacactcatgggcatgaccagcggctgcccactgcacaatctggtgccggagtggaatgacctgatctatatgggaacatgggagcaggcttacgagcgtctgcacaaaaccaacaacttcccggaatttacatcccgcgtctgcccggcactgtgtgaggctgcatgtacctgcggtctgcatgatgatccggtcaccgtgcgggacaatgagtacggaattattgaacatgcatatgaaaaaggttatgcgaaggcaaatccgccaaaagtgcgtacagggaaaaaagtggctgtcatcggatccggcccggctggtctggccgtagcagaccagttaaaccgcagaggccatcgggtaaccgtatatgagcgcgatgaccgtgtgggtggactgctgatgtatggcattccgaatatgaaactggaaaaacacatcatcgaccgcaaaatcaatgtgatgaccgaagaaggcatcaactttgtcaccggagtgaatgtgggaaaagacgaaaaagcagcaaaacttatgaaagagtatgatgctgtggtacttgcctgcggtgccaaaaatccgcgtgatatcaatgcaccgggcagagatgcaaaaggtatttattttgcagtggatttcctgtcacagaccacaaagagtttgctcgattctgatctgaaagataaaaaatttgtctctgcaaagggcaaaaaagttgtgatcatcggtggtggtgacaccggaaatgactgtgtgggaacaagcatccgtcatggagcagtatccgtaacacagcttgagatgatgccgaaagctccggatcagcgtgctgcgaacaatccgtggccggaatggccaaaaatctgcaagacagattacggtcaggaagaagccattgccgtattcggacatgatccgcgaatctatcagacaacggtaaaagagtttctgaaagataaaaacggcaatctgacaggtctgatcactgtaaaactggaggcgaaaaaagatgagaaaaccggtcgcatgaacatggttccggtggaaggcagtgagcagaaactggatgcagatctggtacttatcgcagcaggatttctcggtacagagaaatatgtggcagatgcctttggagtgaaattaaacgcgagaacaaacgtagaaaccgaagaaggccgttacaagacgaatgtgaaaaaagtctttaccgcaggcgatatgcacagaggacagtcactggttgtatgggcaatccgtgagggacgcgaagcagccagagaagtagatgagagcctgatgggatattcttatctttcggtacaatagttttattaaacgaatgaattccttttatccctatactggcaaaaaagaaaaaatattagaatcatacttagtggcgaaggaaaatagaatataggtacacttaataaaggggattgttcttgatttgttatcattgatgaacaatccctctttatatcatattaaaaccttattcctctaaaccttattctttgtattttcgtataataatcatataacttataaacaataaaacagctgcgctggtccaggcacaaatttccgcataaaaaattccgtcttcaccgatcagttttggtaacaataatgcaacactgacacgcatcacaaattctgcaatgccactggcgaggggaatcagggtattacccagaccctgaatcgccgaacgatatacatacagcagatacagtacccatagaaaaattgccataataaacaagtatttatatgcaatgtctaacacctgtcggatctgttccggttcgccggatacaaacagtgacaatatattgcgtccgaataacaccatcacacctgagatcacaacagaagtaagcaatgccatataagttcc

SEQ ID NO: 13189 - DNA, 2117 bp, Unknown
  gut microbiota DNA sequence
tcgcaaccgttcctaaaccgccggtcgcgccaagtgtctttgccatttctttattgccactttccatataacgcactggattttccatagcagcgatcagagtgccttccgtaaatcgtgccggtggctttgtcttaccttctgtaaggcggatattggagatagaaaattcctgccctttttgcatcacaggaagattctggcgttttaactcctcctcttcctcatcttcggactgattttcataaaccgctttccatcccatatgcagcgaacgggttcctctggcataaaaatgttcccctgccacttctccggtcaatacagattcttcgtattcatacgccggatacataactgccaggaatctgcgcactaccatgtcgtagatttttcgctcttcattgctcatatggatataatttggtgcctgctccgtcggaatgatggcatggtggtcgctgacttttgcatcattgacaaatgcaggtttcttcggcagttcccgtcggatcagcggagctgcaaactcccggtaagcgcctgcattgatggcctgcagacgctctttgatcgttcccatgacatctgcggtcagataacgggaatccgttcgcggataagtcaagactttatgattttcatacaaccgctgcatgatattcagtgtttcttttgcagaaaatccaaatctctgattggcttcccgctgtaactgtgtcagatcgtataactgcggtgcgccctgctttttcacttttgtatccacttttatgatctgaagtttctttccagacagtttcttctggatattctctatccgttccttctgaaaactacgataactgccgcttttttcatctttccaggtaaataccacaccctctgtctgtaattgcagcccatagtatgattttggaacaaatttccgaatttcttcttcccgctttgcaatcatggctagggtcggtgtctgcacacggccgcaggacaactgcgcattgtatttgcaggtcaatgctctggtggcatttaatcccaccagccagtctgcctccgcacggcagactgccgcatggtacagattatcgtattcttttgcgcttttcagatgctcaaatccctgacggattgccttatctgttacagaagaaatccaaagacgtttgcatggcttatgattgtccgcttttttcaaaatccagcgggcaaccaactctccctctcggccagcatcggtggcaatgacgatatccgatacatccttacggtagatctgtcgttttactgcctgatattgcttcccagtctgcttgatgacctcaatatccattttccccggaagcatcggaagatcttccattttccagtctttgtattttttatcgtaatgctccggatctgccagcgtaaccaaatggcctaatccccaggttacaatatactgactgccttccaaagctccgtcaattttctttccacactttaaaactctgccgatatcccgcccaacggaaggtttttcggcaatgactaatgtttttcccatattcttgctaattctctttctactttttgttctattccttcagcctttgtaaaacggacatttaagaattattctgtgaacaatttgccgcatcaatggccaataccagtaacaatgccggaatttcatgcttcggatcatcaaactcgatggcataggtgtcgccccaactcagaatctttttatgtacgtgaacgactgcgctgcacgcttcatacacatcgtaatcccagcccatgaaatcaccttctgcacgccatcccatgaaatccacatcatattttgggcggaataaagcaaatctctgctcgatgtgtcccatcaactgtccgttccattcgatttcaaaagtcggaagtaagcagaatagtttctgtttgataaatccaatttcattatgcgccgcatcgtatacatgcaggcggtgtcctaatgagataagttcattttttacaaaatacttctgatttccctgttcatcgtagatatcatatgtatctgaccaggaaaatacacgttgttgaattaataattgcatatgtactccttttttttataacaaactggt

SEQ ID NO: 13190 - DNA, 1400 bp, Unknown
  gut microbiota DNA sequence
gcagttgaagtatgtcatgcaattgcatgacgcgcacctcgcaacaagaatgccggagcattcttgaatattaataaaaaggggatcaatttagtgaatgcaggttcgccatagcttaaaactatgacaaacctgcattttcatgtattatacaaaaccgatcttcaaacttataataaagaccatcaagtgcaacgaaaataaaaatcatgagtttggaggaaataacgatgagcaatgtacagacaccgtttcgatatgattatgtgggaagtttcctgcgtccggaaaaattaaaacaggcgagaagacagtttgatgagggaaaaatcccatatgcagagttgaaagtagtagaggatgaagctatcacagaactgatcgggaagatcaaagagcttggctatcatgtgatcacagacggagagttccgccgtgcaacctggcatctggattttatgtggggatttgacggaatcggacatgtaccgaccaaaaccggtctgccattccacggagaggcggcgatgatcgatgatacctacctcactggaaaagttggtttatccggtgaacatccatttgtagaccatttccgttttgtaaaacagtttgaggatgagaagacaattgcaaaacagaccattccgtctccggcacagtttttggcacagtttaccatgccgtttaaccgtgaggagacagagaaatattatgattcagacgaagaactggtaaatgatatcgttgcaggttatggcaaagtgatcgatgatctgtatgcagcaggctgccgcaatgtgcagctggatgattgtacctgggggatgtttgcagataagacaggtcatttaatgtatggcacgacacaggaaggattgaaagaaatccagaaagtgtacaaagacatcaataaccgtgtcattgcaaatgcaccgaaagatcttgtaatcaatacgcacgtatgccgcggcaatttccactccacctatgcaagcagcggcgcttatgatccggtggcagaaatcctttttggtgaggaaaatgcaaatgcctattatctggagtttgatgatgagcgttccggcggttttgcaccgttagcaaaagtatccggtgtgaaaaaagtggttcttggactgattactacaaaatcaccgaaacttgagtgcaaagaagaagttattgaccgaatctatgaggcggcaaaatacattccgctggagagattgtatctgagtccgcagtgcggatttgcttcctgtgagattggtaataaactgacagaagaagaacagtgggcgaaattgaaattagtaaaagagatcgcagaagaagtctggggctaagaagaaagtaaaaaagtgatttgctatatcagatgggagccaatcccccat

SEQ ID NO: 13191 - DNA, 9434 bp, Unknown
  gut microbiota DNA sequence
aagagttctccaaaggagaactttcctataaagcaagaaagtgtgctaacacacacttacgcgaataaaattattaatagcacatctttcttgctcgcgccgaacacgattgcgaagcaataatttcttctcgtgtgagtgtgcatcgtctgcacgaagtgcttttatttgataggaaattcatgtaatttcctatcaaataacaaaaaagtcgctgacattcttttttaagagtgtcaacgactttttttcacgtactttctatcttaagatttctcagcattctatcagcattttccaaactcagcattttttattacattgaaagctttccgatttcttttgcatattctaacagttccctgtttgcttcattcaatggtccaaatgcctccatcggcaaagtacaaatgcaggtttcacactgctccatccacttttttgcttcctcaatctgcgccttttctatcggataaaacgctttctgtgaaaccacctctacggccagcgctctggcagtcggatattccagatcatttttctgcaaaatacctgccacaaaaggcacattttcccgctgcagacgattatatgccgcaataccgcttccgcccccgccgatgacaaacaccttcggctccgatttggctccctgcaaaaagacctctcctgtcaccgggtcaaatgccgtctctgtcacaccgtacaactgctgtacataatcccctgaaaaaatctcctccggcgtaccaatgcggtcgatatgatctcccttcacacaggcaatggtatctgacaccttctgcgccagatccagctcatgtaacgacataatgatcgccagattctgctctctggcaagcatccggatatttgccagaatatccagcttaaatcccatatccagataagacgtcggctcatccagcagcaggatatcggtatcctgacagatcgcacgggcaagcatcagacgctgccgctgaccgtcactcattttccgaaaatcctgatcctgcacatcctgcgcatgcaccagtgcaatggcttcgtctactttttcccagtcctctttggataaaatgccaaatctgccggtgtaaggatagcgcccggaagccaccacatcccgtcccgtcagaagctccgtctgcaggcgttccgtcataaccatagagagacttttcgaaacatcgctgtcccgcatgttattcatggattcctgtcccagatagatcgttccgccaatgcgtttcaactgccgggtaatggtttttaaaatagtagattttccggcaccgtttggtccgatcagtgtcagtacctgcccggaaacaacttttaaatttacatctttgatcagtggtgttttatcatatcctaccacaagattttccgttctcagctccatcatctgttcctctgctttctcagcattgctgcaataaccaccggtaccagaaatactgccgttacggaactgatactgatttccgtcggtgcaaataccgtccgggcaattccgtcacaaaacagcgtcaccaccgcgccacacaggaaacatcccggtatcataataatcggttttgccgtttttgtgatcagttttaccagatgcggcaccgcgattcccacaaaagagattggtccggcaaaagcggttacacaggcggataacatactggaaagcaaaatcagaccaatccgtaacgcttttacatttacacccatatttctggcataagattctccaagctgatatgctccgattggttttgccagaaaaaaggtaaccaccatcgtaacagccacaatccacagaatcatccgcacattgtcccaggtcattcccgaaaaacttccctgagaccagttgtgcagatttacaatattcgaatcatctgcaaaggtcacacagaaatccgtgatagcggagcagatatatccgatcataataccgcacacaaccaacaacgacattttcgatacccgaaaggagatcagcagaacaaaccccatggcgatcagtgatcccacaaaagctgctgccaccattccggcagaacttaacgtaatgcttcgctgcaggcagacgatcatggtcagtgccaccaccagttttgcaccggaagaaattccaagtacatacggaccggcgatcggattctgaaagaaactctgcagcaaaaatccggataccgataaagccccgccaagtaaaatcgctgccacaatacgcggaaggcggattttccagatgacctgatacaaggtggaatcgctgccttttccgaaaatctccggcagatcagacagggaaagttctaccgttcccacacccacattccacaagaataatccgatcagggcacatattaaaatgataaaagatatagtataccgttttttcacgcttcgttcctcacaaaatcttattgaatatgcttcagaaaatgataatccgtatcatcacttccgatcagaaccttattcagatcctcaataaagtcacaggtcatgcttgtctgctgataaaagttacttccagtggtatacacctgtccggattttaccgctttaaaatcggcaaacaggctgttttttgcgatcagttcgtctacagatgtcagttctccctcaatggttccgttatagatcaggatatccgcatctttctctgctacatagaaatcttccatctgcattttcatcgtagacaaagcattgtcttcttccggtagataaccgttcagggaatagttaccgcctgccagctcgatcatggaagatacataatcgttcggtttgcgtactgtaatagttccatcggaagataccgcaaaaaatgccaccgacaaaccggtattttctttttccagaattggctggatacgctctgcctgctctttgaaaaattcatttgcctgctgctcccggttaaataacacaccaaacagacggatccattccagacgtccaaggggatgtttttcatagctggaacgttcaatcatgaccgggatcccaagctcttccagtttttcctttacttccggattatgggtgatcatggtattttcaatggcaaactgacagttattgctcaaaagcagctcataatccggtgcactgtatttacccgcataagtcaaagtgcctgctttcatggcatctgcagcctcctgcacgtaccagtctttttccttggttccggtaaaggaaatgtgggaaagcgctcccgctttgctcaccagatccatcaccgcgctggaaaccagatacacgtcatttaacggctgctgcaacaccacaatattcgatggcacatccgtcggaaccgatgctcctttcggaacaagcaaaaaacgaccgccatccacgatcgttaccagtttatatgctccatattgttctacgctgaactgatcggcgtatgaaagattcatacgcccctcactgttcagatcattgaaacttacttccgtcgggaaagaaaatgtcaatgtataatcgatctcatgcggtgtgctcatagctgtagtatcgcctaccacatccatctcacaaggcacgccatcaattgggaaagtaaaggtagaattaccaccttcattttcattcaaatatttttccccgtctacgatcatgtaatcgtaatgggtactgctccagacgatggttgccgtcgcctgaccatctgtcacagtcacagttgccggggaatccacggtcgctctgccagtgccgccactcagctccacatttacactgtaagtaccgtcttccagaacattcgcatccgcatcttcctctttgttgtctgtcgctgcactgtctgctttttctgcatccgcactaacttctgtggttgaagacgcacctgcatctgtcgtatttttctgaccacatcctgccagcatgccagcgcctaaaaccatagataaaataactgctgctattctttttttcatacgctatccttactctgcgttctgaacatcagaaacgcttactttgtgatcgtaccaagttccttttgttccaaggattgccagatcaaactcctgatccagtgcttctaccggtacatcaaatgcgtatacttcttcgcttgttccatcactgtaagtaacttcctcagatgtcggctgtaacagctctgcgccgtcttttgctgcatcctctgcagttccaacatacagatttacgatttttttggaaaccagtctgatgtgcatggtcattttgccatcttttactgttaatgtgccacatccctcatctgcctcatttacatggaacatgctgctgtctgtgttaaattttgcggtataagtaccatcttccagcgcagatgttgctgtaactgcgtcactagcttttacggcatcacccagagattcaatggcagcttttgtgtgtgctacatagatctgctggatttccggaatctcaccaagacctgcaatctgtgtatctactttgtcaaaatatccggctgctttaaacaggctcttccaggaatcgccgtcatcacctgccatatcgttgtttgcatgatctcctgcaacaaccattaacggtcttaagattacatttttatatcctgctgcatgtacttcttcgattacctgctcatgagcagtctcttccggctcaccctctacggttccgataaatacattatcgtatccaaggtctttcatctgagaagccatctggctgtagctgattttcgctgtatgggaagtaccatgtcccataaatacaaatgctgtgctgtcttcttttgctgcccctaaggaatcatatccggctgtctttactgcctctgctgtgatatcctctgctacagctgctttatcttcattgacaactgtggcatccgcaccaacttcgccaagtaatggctctgctacggtagctgtctcaaatttgtctttgtaattatccagagtttctactaactcatcatactctgctccatgcattaaatgtgtcggctgtaccaccagattttttacaccgttatcaacggctctctgtaaagcctgatctacattgtcgattttttcaccatctcttgcctgaacatggttgatgatgatctgtgcagtaaatgcacgtcttacagaccagtccggatatgcagtctgaagtgctttctcaataccgccgatatctgctacacggctgtcattgaaagatgtaccaaaacttactaccagaagttcgttttcaccaattccgtcctcatttaacggatcgtctttggaagcgtctccggtatctctgccgaaataatccggatctgcattttcaccttctaccagtgccttctgtgcatcggtcagtttatcccatgcttcttttgctgctgcacactgctcatctgttttgtctgtacgctcctgtacatagatggcatcgatcagagccgctactttgtctgctgcttcctgatctgtctctgtctcactctgcgcgcttgttgtgtttgtgtctgcattcttgtttccgcatccgccaagcaatccgactgccatggtgaatactgccattaaggctacaattctctttttcatgtttattctctcctcgtataatgaaaataagtgatttcttccacagggtacggtatccacccggaaataaaatcatttccaccaaaacaaaactccgcttaagattctcaagcggagtaaatgtcattcaaaggaattcaaaactgacttccaaaacagtacgaccaattactcgtgatcatgggattcaccctgtaccagacaaatggcaggtttcctggctgaaagatcatcatacagattctgccttcccaatgcacttgcatcagtgacaaatcatcgaatccatactcccttatcacagtgacgagatcgtacaggaatcacacctgtttcccttttaaccgttccacgcctccaatttacaacataacctgtcgtaaagctgcatcgctacttatttttccaaatctgtttcagcagtttttcagaaacggacagcaccaattatctttctctatgaaattgtacttatactatcacatctgaaaaacagatacaaccctttttccataatgtacgctcagaattcatcgttttcgaaagactccgagagtacatcatattctgcttttacatgtgtatctcagaaaaaggaattccttcttctctcagtacttctgcctccatctccctgcaggtaaaaagaaaaatctgattctcctgcctggcaagccagcgtaacgtctgacgcagacgctccgtatcataacctgcaaaagcctcatccagcaaaaacggcaacgcttcttctttcgctaacagttttcctgctgccatacgataggcaaaatatgcctgctgcttcgttccctgactgtaggcttccggcgcacggctcttttgatgttccgacaatacgatgccctgttcttcggaaacctgaagctgcccatgtgcatttccggtaatctgtgataaaatctccgacatttcccgattcagcacatgctccagcgtttttgacattccagatgccagtcgctgcatcgtatccgctgccagcgcaagcgcctgaatatcctgatctgctgccttctcctgcgccgtctgaaactgcagttcctgcagctgttctgtcagatttgcagcttccacttctttttcctgtatctgaccaatgatctgatccccggaaccttcctgccttgcctcctgcatctgaagtgcttttttctgctcctgaaaggtttctatctgctgttccaatgcagatttcttctgttgaaacgacgcaagctgctttgcaatcttttggtatacctcctcatcaccgtatgctactcctgcatcttcctctgctgcttctgtttccgcttcctgaactttcttttgtctgccatatgccaaaataagtcctgccagaatgaaagcaatacagatcacattcaaaatcggtgctattttttgaaatccatccaaagacgcccttaaaatcggagccagaatcaaaccggcaacgcccagtaacaaaagcggagaaaagcctgcacgatgttctgacttttgctgctgccgctgctccttttctttctttaaatgctttcgcccggtatttaactgcacctgtcgaaccactttctgcaattcctgttcccgccggcagacggtacgatattccgaaagcaccggctctgccgcctgttttagctgctttacctgttcctgcacattctgttttcgcgttccctgtttctcctgctgtgctttcagggcagctatatccgcttccatcatctgttgttttacttccagttgtcggatatccgccagtcgctgctgttccagctcctttttctgtttttctttgcttttccgcttctgttccagattctgcaatgcctttgataatgaaaaatcaccgcttccggtctgcgccagattgctgcgctcatcctccagaagcaccccaagctcgcgtcccggtactgattgttcctgaccgatacaaaaggtattttcgtaagcaccggcgctgacatttccaagcagcatatccagatctccgcattccaccgaaagttcttctccgtcacgaatgtttaccagacgtgtacttttttctttataataaaaattgcgttccagaagaaactgctgttccccggtctcaaaaaccatggaaccggcaaaatacgccggcgcatcccagggttcatattttttataagtatccagcgtttttcgaacccggcttttctccaacccatacatcatcgccttcagaaactgcattaaggtactttttccagattcgttcggaccatagatgatattgatctgcggggaaaaacgatactgctccttttccagtttgccaaatttttgaatctctgcctgtctgatgatcatcctatcttctcccgcccttcttctgcggtatccatcattgcctgaacgccgtaatacaatgcttttttccgtaattccagattcgggcattgctccatcacttcgatatatttttgcagtaacgtgccgtcgtatttctgttttaacaggtcaaactgataatccggttctgtctcatccaccacgcgcactacacgctccatcttcgcgatttcatccaatggcagctctgtctctgcatcacgatatccgcgcaaaataacatgtgagatctgatacggcttccgactctgcaattcctgccgcaccagttctgacaccgcataggcagacggttccggtgtcacattgatttcctgctgaatgtattcacattttttgatcggataaaaagaaacggatgtgccacgttctgtcagttcccccatccagaatccgtgtggaccgaaatcattacagtctgtgggttccagagaacccgccatcaccacttttcccggaatcagttgcgccactttgtgaatatgaccgaaagccgcatagtcaaatccagcttctgcgatgtcatttgcacgaaatggatgatgtctgtcatcgccgccgtgtccaagcaggatctgaaaatttctccgcctgtgatctacctgtcctgaatctgcgaatcgctcaaatgctcctgttccacgcatgaatggcacatcatactctgcctctcgatgatttttcaccgtattcgcattctgcaacactttttgcaaaatatctctatgatataccgctctggtatcttcctgattccaaaaactgcatccccatacagtggtgtgaatccgctccagagaaacggctgacagatcccgcgttccaataaaatgtacattctccggccattcaaagctgcgataataagacttcggatgcagataatcatggtttcccgcgatcaatacgatttccgtatccgagatttctgcaaaccatgccgcaatctcttttaattcccgctttaacggctgccggtgaaacaaatctcccgcgatcaaaagcagatctgcctgctgtctgcgcgcctgctcgatcataaaacgaaaactgttccagatgtcccggctgcgtgtctcactccagggcattcctgcgtccggtgtgacgcccagatgcacatctgcgatatgtataaatttcataaaatagttatctccttaaaaacgtctgtaagaccacaccaaatgtttgttcgtattttatactaacacaaagagcacatcttttgttataaaacaatttaaaaataacactgtttttctttttttaaggaaattcttgtttgtcgtttagggaacaagtttgaaaaaactccaatgcaggcacgaccgatttcctatcttcgctgcgccgcttatctccgaccgcttccgcgaactcgccaacagcaaaaacagctgttgcctcaaacacactcccgcggtcgggctatgctcgctccgataacggaaa

SEQ ID NO: 13192 - DNA, 10814 bp, Unknown
  gut microbiota DNA sequence
tcccactgagaaatacttgttactactcaccacttgcagaagtgggagtctcaactcagactgagatgaatctattttctgaaatgcttcttttttcttcgttctcttgttctactattttgtctgggtatcaaactgggcttcttccccgtcttccacttccaccacgactttatttggcaggcacacgatggtctccccgttggaagaaattgcatgctgatttacacagagtttgtccggacaatccgcagagatcatatctgcttttccattttcgatcacaagggtatttgtcaccgttccttctgcgttttttatctcgattttctgcgctttttctcctgtcgtatgcaggtcataagtgccgtacacgcttccgtctaccgttactttgacctgtccgccgggtgtactttgcattttctgaaacacaaaatacccgatcaccgctgccacaaagataatgaccagtaataaaatctcttttttaccgacttttttgtccatgcttatgccctgcttccaatataatagaaacctttacattcatccagacgcaccggaatgatctgtccgatcagttcctttcctccagggaaatgtaccacactgttgttgccaagtcgtccggtgagcagactgtcatcctgatggttgacactctctaccagtacatcctgcacctgaccggtcaggcgtgcagatttttctgctgcaatctcctgtacttcttttaacagacggtcaaaacgtacttttaccacgtcttccggcacctgatcttccatttttgctgccggtgtaccggtacgtttggaataaatgaacgtaaatgcgctgtcgtaacgcactttgcgcactacatccatagtctcctcaaaatcttcctcggtctcacccgggaatccgacaatgatatccgtggtcagtgcaatatccggaattgctgcacgtattttatccaccagcgtcagatactgctccttgtcataatgacggttcataatttttaacagacgactgctgccggactgcaatggtaaatgcagatgtctgcagattttctttgattttgccattacttcgatcagttcatcggaaagatccttcggatgagaagtcatgaaacggatacgctccagtccttcgatctgctcgatttgctccaaaagctgtgcaaaagtgatcggctgatccaggttctttccataggaattcacgttctgtcccagaagcataacttccacaacaccatctgccacaaagttctcaatctcacggatgatctcccgcggctctctgcttcgctcccgtcctcttacatatggaacgatacaataactacagaaattgttgcagccaaacatgatattgacaccgctcttgaaacggaatttacgttcgtttggaagctgctctacgatctggtctgtattttcccatacatccaccaccatctttttattctcgatggaatgcaccagaagttccgcaaatttgaaaatattatgtgtgccaaaaatcaggtctacaaaacggtagctctgtttgatcttttctactactttttcttcctgcatcatacagccgcagagtgcgatcatcatatgtggatttttcttcttatatccgtgcaggtagccaagacgtccgtatactttattgtttgcattttcacggacggtacatgtattgtaaataacaaaatctgcatcctcggactcggactcctgatagccgatggcatttaagataccacataatttttcggaatctcgggcattcatctgacatccgaatgtattgacgcagaacgtcatctttctgcctgtttctttctccatctgtgccaccagcatacgtgcctttgcgatgaaataatactgacgcaacggctcctctgacggcggatccagtgtcaagtcgatctgattaataaaatgttctatttgcatatatttttccttatctattcgtatttttcacgcaagaacaaatgttccatcaccgtgaactgaataagtataacacaccttgctttcttttttcaatagtaatacacatgtacggatctgtgcattgctgccagtaccgcctgcagccgcttgatcacattctgacgtaccgaaatttcaaaaggcaattcttttgttgtataatctttattgatagcttttccgataaacaaatttaccgtcgtacagttttccatcagatagcatgccagacgggtagcaccgttatcccggctcagttcatcaaaaaattcttcggatacatcatcctgctgatagcgctccagcagttcgattgttttatttaaggtaagaacaccttccgttaccagatcgataccctcgatttttgctgttggcggaatttccggatcaagcacaccgacagaagtgatcagacgccgaccaagctctcttgccacaatctggcttgtgataccgccagacacgatcttgatgccttcctgcttcataaaatcctgtaccatgcgggcatcatcttttttctccaatggtggtcccgtcaggatattcacaatctgctcctccgtgatccgtgccacagcaatggtcgtatcatcactgcatacgccaccgtaaagatccgcacaggcacggttcatctgttccgctaactgcgccgctgtcctggtttttgccgcgctggattcacaacaccctgccagcgcattccagtcccatcggtaattcatgatatctccggttccacaatacagacatccgtcactcatgatcgccagtgcatctccgggtaacgtctgaaaacgacattcccggattttctttccttcgatctttcgataggaaaaaggcagcgcttttaccttgccctgtcgcaccagaatacactccggattatcatactccaccacataaatttctccggtataatacacctggataatgctgaatgtcgaataagccacaccattcaccgaagaaagcggcagtgttttcgcaatggttgcaactacctcatcaatgctcatatcattgtacatcatagttgcaataatcttcgacgtcagagttgctaaaatatttgcccggataccacttcccataccgtcagccagaatcaggattctggaatcttctttgtccacaatctctactttgtctccacacagttcttctccgtagtggttcagacttttgtatgccatatcgattgcaatcggtttcatgttccagccccctttctagctctccagcagcgtatcacgcagcttagtcagaattgccttcgtttccgctgtcgtttctccaagcagaccggcaatctcctgtgccgtcgtcatctgtttttcaataacggactgcgccatttttaccgtattgagcttctgctccagcatctgttctgcccatttttcctctgccgatacatcctcaatgatcgccagtacacggtcggaggcaggaatgtatacaattgtttccaacacggtcatatgatacgtatcccatttacgttttacacgcagtttattttcatgggtacgatatacttcctcaaaatccaccgtatcgatcagttcgtataaatacattttcagtgcttcctgacgggtggtatggaacacttcttctgccctgcggttaaattctttgatccgcatctctttgtcaaaaataaagatcaggttcggtgttgtctccataacgacatttgcctgggaacgggcattttcataggatcggatcagacacatggctgcttccgcttttccctgatagatcgcaatggctttttcccgacaggtcatataaccacaggcgccacagttaaactctgtcgtactgttccgttttccaatggtctttaaaatagcctgaatttcagcctccgtcggcatcttatccactacctgccgcggtatataagtccgctccagttcatctttcggcaaagtaatatatgccggaggtgctgcaagcagcgcattattttcaatacgcatcgtcgccttaaaacggaatcctcgccgcttgtctacccctggtccattcacgcagccacctgcacacagatttaattccacaaaacagtgactgatgtagccacgtttcatactgtgcaggaactctctgcagctcttgatactgctgaccgtcaattttttataagtccccggtgcgccacagacatccaccgcacggatgatgccgtttgtaatcggatagagctgattgaccatcggatcctgattggcaaaaggacgggactggcaatgttttagttcaattccttcctcctccagccacctttgtaactcattaaactcaatgaccgcatccacacatccacgggttctggcatctgcttccgcctccatctttttcgccacacaaggtccaataaaaaccactttcgtatgctgtcccatgcggtctttgatccagcgaccatgggcgatcatcggagaaaccaccggtgccagatacgggatcagcatcggataatgtttttccaccagataaacgatcgctgggcagcttgtcacaatgatattgtccatctgcccttccttcatcagacgcacatactcacgggttatgatagcagccccctctgccgtctcacgcacctgggaaaagccaagtttcatcaacgcatccacaatctgtcccggatcttcataatccatcagtccctgataagacggatccagggaaacaaccacattttctttcttttgcaacatactttttacataagaaaggtcactctcaaaagtttttgcctcctgcgggcagatttccatacagtgtccacagtagatgcacatatccgtgacaatctgtgcctgcccgtttttgatccgaatcgccttgacatcacagtttctcagacatttataacaatgtgcgcagttcgcatcctgaaaattaatcacattcatatccctatcctcctctattgatcttattttaccattaatcccccttcaaatgaagtatcagaaaaactattttttatagcaaaaaggaacgtaccatcctttggatcgtacattcctttctctacatttgcctgtttacactgatattaatcctgcaactcctgaatcatcttccaaagtgcctctgcactgttgaaattttccggttttacatacgctgccggtatcacgatatcaaactcatcactaatgtcactgataatttgcaggatatcaaaagagtctaaaatatgatcatccaccagtgccttttcattttcaaaatctacatcctctttaatatcctttaacaattccaataattcttccatgttacaaatctccttttcttatatattcattgtatttatagtacttgtttctatcgcatctcttactaatgtaagggaaccactctcatcttttaaataaacctttggcatggttcgactcaagaacagataaatcccctctgtcacagaatatgctccgacattttcaaaagccagcgtatcgccaatttccagatgttcaaattccacttctctgcagagaatatccgatgttgtacacagacttccgcagagacaccaggttttcttatccactgtaccatcctgcaccattgcatttttataatgttttataatcggtgtcttcatgcccatcatctgtcccaaataagtcagatggttcattcctccatccacaatacaataatgtgcgtttcccactgtttttaaatctgcaacgtttgtataatacgttccacattccgctgtgaaaaaacgtcccatctcaatggtcaattctactttttgtgccacttcatttaagatatctttcaactcttttacaggaaataaagtatccgaaaaatcatcatctgcaaaataaggaactgcaaaccccggtccatattccagtttttttaattccagtccgaaacggtttcggatctcctcaaataattccaacagcatctgaagttcttttatctttcttttcgcccgtttccgctgtgtcccgacaaaataatgaattcctgtaatatttaaacttttgtatctggtttccctgtgctgcaatatatcaaatagatcctcttttgccatgccaaactgagaaccggcattcaggcgaaggatcacttctgctttctgatctgaatctgctgcttcaaacacttgctggatcagatctgcatgacggatcgattccgctgtaaatattcctactccgtactcataggcttctctgatatccgtaatccccttattaacaccggaataaatgattctggatccatctacgcccagttttttacaaatagcaagttcacccggactgcagacttccagtttatccacacacgtcaacatggttgtcaccaaaaatggatttgccttcatggaataacaaagtgacactgtttctccgacaatctctctgatctgtgcagcccgtttttgtaaaactgccgtatcaaatacaaacgcaggtgtattactttttaaaatgtcttgcatgtaacccctcctcgtatagctttcttaattgatttctgtcaatctttccgttcttggtcatcggcatctctgtaagttgcagcgccgtatttggtatcatataaggcggcagtatgccacgtaatgtttttatcagctgtcttttttcgcatgtccccgtgtaaaaaagcagcaaacgttccttttctgtctcataaatacagcaggatctggtgattccatccacggcattcgctgccacctcaatttctccaagttcaattctatgccccagatgtttgatctggaaatcttttctggaaatatatacaagatttccctgtgcatcatattttgccagatcaccggttctgtaaatccgttcatcgtatcgatggtttaatggattctgcacaaagacctgtgccgttttatccggtgcattataatagccaagcgccagctctgagctgctgacacagatttctccggcttttcctgcttccgtcacttgctgatctgtctcatccaaaaggaataccgtttcatttggaaaagcttttccaataggaatcacatcggtcagttcatattcgcgttttggatcaagcacataatacgtacagttacaggtgacttcagttggtccgtacagatttacgaacatcgcctgaggcagatattttttccataccctgtaatgttttatcggaagtacttctccgctaaaaagaacttttcgaaccgtatccggtgtacgataagcaaacccattcatgacagatacaaagcacatggcgctgaccgcccaggtaagcaccgtcattttactgtctgccatataatccatcaaagtagtaggatcactaaaatattctcttggaatgatctgtactttcgcaccagtcaaaagaccggtataaatatcttttaccgatacatcaaaatcaaacggcgcctgatttcctataatgtcttccttcgtgacagcaaaagtatctgcatagatccggataaaatccatcaccgctctgtgacttactgcaacaccttttggcaaaccggtgcttccactggtaaaattaatatacaaaggttttcgatccgtatgttccgttcggatctgtctcaaaagattctgatcgatcgttgcttcatccaggcacttctctgccagcaaaattgtcgttttcggcacatccccggctattgcatccagacactttttcattttctccagattttcttcctttgtaacgattacttccggctgcagcacggttatgatctgctgcagtctcgcctccggctggcgcagatctaacaggcaatatgggcagccggcatataccgctccaaacataatacttaaggtaacacagcttttttccatataaattgctaccggagcagtccctgtcatccattttctcagataagttccgcccttctgcgcatacatttttaactgagtaaaggaatattcttctttcggatctgcaactgcaattttttctccagactgtgcttccatatgctccagccattctaatacattcgtcattttgtttcctctttacatttaattttgattgtttgtatttgcattgtcatatcccggaaggtaagcagcaacgatatctttgacagattccatataggcatcctcatcataaaaatattgtgacacatcctcgcctgcatcacggctaaatacaaatttcgaaaaagccttgcaaaaaacttctgaccccgttttatttaggtgttcaaaatttgacagatactccggacagatggcaaacaattccggttttaccaaattgaaatcataataatcggcaccgtacttactgcatatcccactgattttctggttgatcgcaaaatactcttccgcaccatatgctgcaatatcataaggtgctttcggtgtattcacaaccataaaatctacaccattttcctggcacagtttacacatctcctctaattcttcatacgccttatcagagctttttccggaataagccttttttgtattatttacagcggctgtattataatcaaagacaccacctgcgtatgcatatccctttccgacatactccatataccctgccacttttttcgaacttgcattcgcatctttgctttcccgtttgattttcagattttctgaaatcgcctttcgtttccaatcaacactgttataagtccatggaaaaaaatatgtcagtgatgcttctgcattaaagttttcactgtccgtcacaaacctccagtccaaccgcagtttttccaaaggagaacatccatactttcttgcccttgcaaaagtggctctcgcatttgcattttgtatcagttccagagacgggattccaaatacaagaacagccctttttatctttttttcctgaatcgctgccgttaatgcctctttggtctgatccaacggctgccccggtgttcccatattaaaagaactccacccggtagcttcatctataatatagggattgaacgtcatctgtgaaaaagaagaacctaaatatacggtatctattttttctgttttgcggaagtccttccacatgacctcacttggaccatttgctttcacaagaagataactcagcagcaaatttatcactatgaacaggaaaacaaatacaatcacttttatacccttaataattcgcatacataaaacctcctgctccaaccgcaaaattaaacgatgccaaaaccaggaaaatcatcaaaaaataaatcagccagcgaagtaccagcggtcgttcatctaacaatgtaattgcatcctttcctttctcttttacaacactgtcggcaaatacaataaccagagccacgattgctatgatatacgctttctttggcacttctttaaaagttggttccaaaattccgtataattctcccatacgaaaatgaattatcgtgtttttcatgcacataaaacagtctttgatattgtagatccggtcaaaataccatccgatatttactatgataaacgtccggataatccgaaatacatgaaatgccttactctttacatttatgtgcagtctttctgccatttttgcaaacaaaggtgcacagatatctgaaactgcaattacaataccattgtaaagaccccagaagataaagtgccactgggcgccatgccagatacctacaaggaaaaataccagaatattcgcaatggatgccggaagtacacggccgaaatgaacgttcagatgctttttcgcccattttccgaatttctgcataggagcagtcagcgcaaatggataaaatacataatctctcatccatgcaccaagcgaaatatgccatcttctccagaaatctcccagtgaaacagaaaaatacggctgtctgaagtttggcatcatttcaattccaaacaattccgccacacccataacgatatcaattccaccagaaaaatccgcatactgttgtgcagaatatagtaatattgcaaacacaatggcagaccccggtgttttctccgtaggcgcatccagaatatttgcaattccgtgaaccagcagatttgcgattgcatacttttttaataatccaaacagaattaataccaatgcccgcttacagcgatgccactccagagcatgtctgccatacagctgctctttcatctgatcatatctgttgatcggtccctggatcagttgtggaaaaaacgaaacaaacagcagaaaacgaaacggattcttttcggcttcatacttttcaaaataaatatccaccagataaccaatggaaataaacatataaaaagagataccaagcggtatcagaaacccctcaaacagaggatgcagatatttcaatactgccagcattccaaaattaatcacaatgattgtccagagaataattttgcgctttcgatcaaatgctgcttttatttcctttcttctggctctgtctatgcttttatcttttcggatctcctgatatttttcagaaaaatgcatcaaccatatgccacccgcaaacacgctgaatccggtgattgccataaaaatcagattcgcaatgcctgaataagcataaaatgccatgctgaataaaagcaggcaaatccattgttttttccgaaatacggtgtaatacagtataaataaaacagttacaaataaactaaatgcaacagaaaacaaattcataaacaaaatactccttaaacaattcctctgaacattttaccacagatgccatattccatgttttaattctttcttaggaatacagaatat

SEQ ID NO: 13193 - DNA, 218 bp, Unknown
  gut microbiota DNA sequence
taaaatgacctcagaagaaacaaaacacacttcagacggaggaaaataccatggcaaacggtgattacggctatttcggcaaaggcgacacgggctatgcccagtacatgacggctttcaaccgcaactttggcggttcgtttggcggcggtggcggtgggaaccacaacaatggcggcggcgggggagatggcagcggctgcggctgcctcatcgct

SEQ ID NO: 13194 - DNA, 313 bp, Unknown
  gut microbiota DNA sequence
atcttcagccgatacaatacgttccggcatgaaatcaatgtactgttttgtcatattctcacttgaatgtcctagataatctcgtaccccttgtatagaaaccccatttccgtacattgaagttgcaaggttatgtctgtaatcgtgtgctctaaagatataatctccgcaggcaatcccacgaaccttacactcccgaatcatctgatttgaaaatgtctgtccattaaatgcaccaccctttttatttttgaataaatactccccattttttattccgtactttttttcataatcgttcaccagtccaacc

SEQ ID NO: 13195 - DNA, 13773 bp, Unknown
  gut microbiota DNA sequence
gcgcagttgaagtatgtcatgcaattgcatgacgcgcacctcgcaacaagaatgccggagcattcttgaatcatgaattacaaaagagtcatataagatacggagaagagggaaattacaatggaactgaagatggagcttagtcagaagcagattttgtcacaacacatggtccagtcgatggagattcttcaaatgagcgctcaggaactggaaggttatatagagaaacttgcattggaaaatccggtgatcgaactggcagagaccagtccgataaaagcagatacccaacaggaggatctgcagcgtaagctggattggctggagtctaccgatttgcagaaccgcgtgtattatcagcaggaacggtctgacgaaaatatggaagcaaactggcatgacagcagacagtccgaagaaaatctggaagaatatctgcatgcacagcttttattggcagattacacagatctggaacgggcgattgtggattatctggtctgttctttagattccaaaggctattttgtgggggatattgcacaggtcgcagatcatttttcagtatctgaagaagtagttgaggaaatgttgcaggagatccaggaactggatccggcaggcgtcggcgccagaaatcttcaggaatgtctgttgcttcaggtggaacggatcaaggactattccgatgtgacggttgagatcattaagaattatatggaagaagttgccaaaaatcatctgccaaacattgcgaaaaagcttcaggtttctctggaggaagtacaggatgcctgtgaggagatccgcaaactgaatccaaagccgggcagctctttcagtgaccgtgaacagcttcgttatatcagtccggatgcggttgtggtaaaactggaagatcagtttgaaatattgattaatgaatatcagtatccgggattttccatcagtggctattatcaggcgatgatggagagtaccaccgatgaggaagcaaaaaaatatctgaaagataaagtacagcaggcacagtgggtatctaactgcatttcacagcgttcctccactttatcccgtgttatgcatctgctggtagcaaaacagaatgattttttcatgtatggacccggacataagcgcccgatgcgtctggtagatctggcagaagaattgaatctccatgaatctaccatcagccgtgccatgaggggcaaatatctgcaatgttcctggggcgtgtttccgctgaactatttcctgacttctgttgcagtaaagagcagctgcggaaatgaaggggacgaaaagacaccggagcagatgaaagctatgatccaggagatcgtagacggtgagaataagaaaaaaccgtacagcgatcagacaatcagtgaccagcttgcggcaaaaggaattaaactgtcccgccgtacggtcaataaatatcgtaccgagatgggaatcccggataagagtggtcgaaaagagtacatttagtcataaaggagaaggaatgacactgcaagagttttttacagaaaatccgcggatcgcaattgcgttttccggaggaacagattctgcctacttagcttatatggcaaaaaaatatgcaaaagaaatgatagcgatttatgtatccacagcatttcaaccggcatttgaacgggaggatgccattcgcttctgcaaggagtatgatattccgttgacgattttggaacgggatgtattaagtcaggaggcggttgtacagaatccgtcaaatcgctgctattattgcaaaacagttatttttaccgagattcagaagaaagcactggaacttggatttacctgtctggcagatggaacaaatgcgtccgatgatgcagacgacagaccggggatgaaagcgttgcaggaactgaaagtactgtcaccgcttcgtatttgcgggatcacaaaaccggcacttcgggatgaatccgaaaaacttggattatttactgcacggaaaccggcgtacgcctgtctggcaacccgtattccttccggtacacggatcagggcaaaacagcttcaggatgtagaacaggcagagaccgcactgacagctatgggatttacagattttcgtgtgcgccatccggaaggctatgcaaagcttcaggtaaaaccggagcagctttcccttgtaatggaaaaacgagaggagattctgaccgttttggaaccgattttcggaactgtctgtctggatctgaaaacgagataatgcgtcgcaaacccgcataaacactggacttgaccaacggtcgagtcctttttttgaccgaaaagattgacgggtgcggggattgctgttataactgggaacacagacagcgctgcagaaatcgaaaggagcaaaatctgaaatggaaaaaagagaaaatttcggaagatatataaaagaaaaacgaaaagaagccgggctctcacagaaagagctggcaaagcagttatttgtatcagaatcagcagtcagcaaatgggagagaggattatcctatccggatatgacactggtcaccagtttgtgtgagatcttacatgtgtcagaacatgaacttctgaccgccagcgatgacatgcatcagcgtgagattgaggaacagtcccgtggatatctgagaattttaaaaggctatacatggattacttacatctgctatctggcagttttgatcccatgttttatcggaaaccttgtgacagaacatcgcctgtcctggttctttattgtggttggcggtcttgccatgatattttcctttatcaatgtgccggtgatgaccaaaacaagacgcgcagaaaaatgcttctggtgcttttatggatcactcatttacatgctgtgtgtctgccggatcgtgttaggcggcgattggctgattatgtctctgttaggtatcagctttggcttgcttagcgtatttttgcctatcattctatgtagctggaaatctaactggccgattttacatcataaaggactgatctgtcttgggattgatacggtattagcctatctgatggtatttttcggttgcctgttctatgtgaaaggcgtgacaggtgccattatcgctcagaacctgtgggtattgacaatttttgtaatacttgcatggctaatctttgtggtattccgatatatcagatgcagtcgtttaatgaaaacgagtattacagttgcactttgtggcgtatggatgtttttggctgacacgatggtcagcattgcttacagcagcagaattgtcagaccaggtgtaaactttcataactggatggattttggcggacaaaatatcgggctggtgattctgatcgtcggtgcagtgatgattgcagccagcatgatccgggatatgagaaaataaaacagataaaaataaggtatgtctgttcgtgttaaagttgagagatagacgtaccttattttgttgtgtattgacaaaagtatcgttatcatgataatgaataacatgatgggtaaaaaagagcgcaggacgaaaaaacgttttgcgctctttttcaacggagaaggagggatttgaaccctcgcgccgtgttaccgacctactggtgttcgaagccagacccttcagccacttgggtacttctccaaaataagacttaattagtataaacatttttcagaggttcgtcaatccctgaaaagtatgctaaaatatagtttactgtaaaattttcagacagggcaattagtcttgtaatcccctggttaatttgataaaattcagaacatacgatgtgtttttttcacagattgttttataataaaaagtacaagaaataaacagggtaatctgatcatctgtgaactgagagaggagcggaaacaatgaaaagaatcggaatgctgacaagtggcggagactgccaggctttaaatgccgcaatgcgcggagtagtaaaaggattaaataccaatctggatgaactggagatttacggtttttacgatggatacaaaggactgatctatggaaattatcgtctgctgacatccaaagatttttccggaattctgacaaaaggcggaacgattcttggaacatcccgccaaccgttcaaatatatgcgtgtgccggatgaaaacggactggacaaggtagaggcaatgaaacatacctatcacaaactgaaccttgactgtctggtaattcttggcggtaacggtacacagaaaaccgcaaacctgcttcgtgaggaaggtttgaatatcattcatctgccaaaaaccatcgacaatgatatttatggtacggatattaccttcggttttcagagtgcgctggatattgcgacgggcgttatcgactgcattcatactacagcagcttcccataaccgcgtatttatcgtggagatcatggggcataaagttggctggcttccgcttcatgccggcgtagcaggcggcgctgatatcattctgatcccggagatcccgtatgatattgacaaagttgtagaggccatcaacaaacgaagcaaagatggaaaaggtttcacgattctggcagttgctgaaggtgcgatttccaaagaagatgcaaaactttccaagaaagagctgaaggcaaagaaaaaagagacaaaatatccgtctgtctcctatgaagtggcagcacagattcaggagcgtacaggaaatgaagtgcgtgttaccgttccgggacatatgcagcgtggcggaagtccgtgtgcttacgaccgtgttctgtgtacacagcttggtgcgcatgcagcaaaactgattctggatgaggattacggctacatggttggtatgatcgacggtcagaccaggaaagtacctttgggcgatgttgccggcaaactgaaaatggttcagccggactgccagctgatcaaagaagctaaattagtgggaatctgcttcggagattaataattatattcaagaatgcttcggtattcttgttgcgaggcgctaactgcataaattgcaataaaacgtgttactgagagttagaaaggagccgctatgtcttatacggctttatatcgaaaataccgtccgtccgaatttgaggatgtaaaaggacaggagcatattgttacaacattaaaaaatcagatcaaagcagaccgtatcggacatgcttatctgttttgcggtacccgtggaaccggaaaaaccacggtagcaaaaatttttgcaaaagccgtaaactgtgagcatccggtggacggaagtccctgtggggagtgcgcttcctgcaaggcgatcgcagcaggctcatccatgaacgtgatcgagatcgatgcggcttccaacaacggtgtggaaaacattcgtcagatccgtgaggaagtttcctattccccgacgcagggaaagtataaagtatacatcatcgatgaggttcacatgctttccatcggagccttcaatgctttgctgaaaacactggaagaaccgccatcttatgttatctttattctggcaaccacagaatcacacaagattccgatcacgattctgtcccgttgtcagaagtacgacttccgcaggatttccatcgagacgatttcagaccgtctgatggatctgttgcagcaggaaggcgtggaagcagaggaaaaagcagtccgttatgtggcaaaagccggagacggttccatgcgagatgcgttaagtatgctggatcagtgtatcgctttttatctgggtgaaccgctgacctatgaccatgtgctggaagtgcttggcgcggtggatactgaagtattcagccgtttgcttcgttccattctggcaaataacgtggtgcaggcgattgaacttttggaagaactgatcgtgcagggacgtgaactggggcagtttgtgaccgattttgtatggtatctgcgtaaccttcttctggtcaaaagctccgaccagatggaagatgtgttggacatgtccagtgaaaatctggcattattaaaagaagaagcggacatgatcgagggtgatgtgatcatgcgttacatccgtattttttcagatttatccggtcagcttaaatatgcaccgcagaagcgtgtattaattgagatcgctctgatcaaactttgccgcccggcaatggaaaccacgcaggatgcgctgaccgaccgtgtggcacaacttgagaaaaaagtagaagaaggtgtaaccgtggtggcagcagcaccggctgtgcagcctgcttcgggcagtgcacccgccacaccacagaaaccgaaagaaccggcacagatgccgaaagcaatcccggatgacatccgtcaggtggtaaaaaactggagttccattgtgcgtgaacttccgggtgttactgcgacttatttgaggagcgcacacttaagccttggcggagaaaataaattaatgctggtgtttgacgacgatttggcatatacttatgtgacggaggagcgtcgcaggacggaaatcacggaacggatctcaaaccggatcggcaaagagattgaggtagtgatgcagtccaacgattccggacgcccattcgaagagaattatatcgatttggaacagattgtccacatggatattgaagtggaagatgaataactgcaggaaaatacggaatgaaccctgaaagaaacaaacagggagtaaattgcgtgtaaatgcgggtaaaatttgaaatagcaggaggatgcaatatggcaaaaagaggtggatttccgggaggaatgccgggaaacatgaataatctgatgaaacaggcacagaaaatgcagcgtcagatggaagaagcaaccaaagagctggaagagaaagaagtatctgccagcgcaggcggcggagcagtagaagtaactgtatccggtaaaaaagaagtagtaaaagtaaaattagcagaagaagtagtagatccggatgatatcgagatgctggaagatctgatcgtagctgctacaaacgaagcactgcgtaaaatggatgagatctcacagcagtccatgtccaagattacaggcggcatgggaatgggcggaggatttccgttctaatggattactacagcaagcagatcagtaaattgattgaagaactgtcttctctgccgggcatcggcagcaagtccgcgcagcgtctggcatttcacatcctgaacatgccgacagagcgggtagaacgactggcagacaccattctggatgccagaaaaaatatccgttactgcaagacctgttacacactgacagatgcggaagaatgcccgatctgtcgaaacaacggacgtgatcattccacgatcatggtagtggagactacccgtgatctggcagcttatgaaaagacaggacagtacgatggcgtatatcatgtgttacacggcgcgatttccccaatgcttggaatcggaccggaagatatccgtctgaaagaactgatgcagcgtctgcagggcgatgtaaaagaagtgatcatcgccacgaactccagcctggagggagagacgactgccatgtatatcagcaaactgatcaaaccgaccgggattaaagtatcgcgaattgccagcggtgtgccggtgggcggtgatctggaatatattgatgaggttacattattaagagctctggaaggacgagtggaattatagtctgtaaaaatgtgatgctatttttatgatagaatcgcagatatgattgcaataaatatacattttggttatatgatgtatatttcgcaaaaaagctataggaaaacttggttcgatagagcagagcaagaaagggagcacattatgacaaagttagaacttgaaaaaattgctgtagaagtgcgcaaaggaatcatcaccggcgtacacagcgcaaaatccggtcatccgggtggatctttatccgcagcagagatttttacttatctgtattttgtagagatgaatgtagatccgaaaaatccgaaagatccgaacagagacagattcgtcctttccaaaggacatgttgcaccaggtctgtatgcgacactggcacagaaaggatatttcccggtagaagagctgaaaggactgcgtcatatcggctccatgcttcagggacatccggatatgaaacacattccgggtattgatatgtccagcggttccttaggacagggattttctgcagcagttggtatggcactggcagcaaaaatggacggcaaagattaccgcgtatattcacttgccggtgatggtgagatccaggagggacagatctgggaggcatctatgtttgccggagcacgtaaactggacaaccttgtattattcgtagacaacaacggtcttcagatcgatggaaatatcgcagacgtatgctcaccgtacccgatcgataaaaagtttgaggcattcaatttccatgtaatcaacatcaacggaaatgattttgacgagatcgcagcagcattaaaagaggctcgcgagacaaaaggtcagccgacagctattatcgcaaaaacaatcaaaggtaaaggtgtatcttacatggagaatcaggccggatggcatggaaaagctccaaacgatgaagaatttgccattgctatggaagaattaaagaaagcaggtgaagcattatgtcagaaataaagaaaatcgcaacaagagacagttacggcaatacattagtagagcttggtaaagagcatgataatttagtagttctggatgctgaccttgctggagcaaccaaaacaggcgtattcaaaaaagagttcccggaacgtcacattgactgtggtatcgctgagggcaacatggcaggtatcgctgcaggtcttgctacctgtggaaaagttccgttcatgagttctttcgcaatgtttgcagcaggacgtgcttttgagcaggttcgtaactccatcggatacccgcacttaaatgtaaaaatcggtgcaactcacgcaggtatctctgtaggtgaggatggagcaactcatcagtgtaacgaggatatcgcacttatgcgtacaattccgggcatggtagtcatcaatccgtgtgacgatgtagaagcaaaagcagctgttcgtgccgcttacgagtacgaaggaccggtttatttaagatttggtcgtctggcggttccggtaatcaacgacgaagcaacctacaaattcgagatcggtaaaggtatcgtattaaaagaaggtaaagacgtaactattatcgcaacaggtctgtgtgtaaacgaagctctggaagcagcaaaactgctggcagcagacgacattgatgcagaagtgatcaacatccatacgatcaaaccgctggatgaggatctggttgttgcatctgcacagaaaacaggcaaagtcgtaacagtagaagagcactctgtaatcggtggtcttggaagtgctgtatgcgatgcgttaagcgagaaagctccgacaaaagtaatgaagatcggtgtgtatgatcgctttggtgagtctggaccgggtgctgagctgattaagaaatatgagcttgatggtgagagcatctataaaaaagtaaagggctttatggcttaaaaaatcttgtttagggtggcttaaaattcttaagtctgtgaaaacgccggtcatccatcttacctccgcagctaacaatcgcttgctgaggaaagatggatgactggcgtttatttacgttgagataattataaatttttgcgccaatctgcactgtgtgttgattcttcaatctcgctttcatatactttgagtttatttccaaaaaacggcaaagttttacagtgtttccgtgatattattccccgagaaatttaaaacactatgattgtatgaaaatatagagaaagagggaatcaaaaacatgggaaatcagcgtgacagacagtttacacttccgaaaaacattcgccagatgggacagtttggagatacatataaaatatacgtcgaggattttgtatacacctacgtgcatcggacgcttcacatggaaaaacaggaacatgaaatcgcggcagctgttttacttggaaaaacctgccggcgcaacaatcaggagtacatttttatcagtggcgcacagcaggtatctttttcggaatggggacaagctgatgaaacagattcgatgcagcattttacagaaaatgatatgaccgttttgaaatcagatgcagaactaaattcaaaaccaaatgcggaaccagatacgggattcgatacgcaaaaagaagatgctgtgtatcaaacggaagagactatgtatgatgtccctgtttccgcgatcgcatcgcaggaacgtcagcagcaattctgggaaaaagtatatcagggcattaaggaatatttcagcgatctggaactcttgggatggtattttaatctggatggcgataatctggagatcagtgcgtccatgcagcagttttttgacgcaacagaggaacacggttccaaatttttatactttgaggacaagctgaaccggcaggacgtatttttcgtgcaggaacagcattccctgcaacgggtggaaggctacgcggtgtattatgagaaaaatccatccatgcaggagtttctggtggcacagaaccgtcatacggagccgccgcgcgtggaaggagagggtatttctgtcaaacgggaggatgttgcgcagaattaccgtgccattttgaataaactgaatgagaaaccggcaaaaaagaaacgtcagccctttgtctatgtggcaggagttgcagttttggcagtggtggcagcgacaggcatcacgcaggtgggtaattatcagaatctgaagactctgcaacagacgttacagactgtttcgggaaatgtgcagggaaagcaggacgcaaagaaaacttcgtctacggacccaaaagaagtagcaaaatccggggatgagaaaaccgcgggacagacctcagaggcatcatcagatggaaaacaggagacaggtgaacagaatacaacccaatccggtgagactagcgatgcagcgcagacagcgtcagaaaatgcatcaggaaagcaggggacagatcaaaatactgatacaaagtcagatcagagcgcaaatcagaataccgatacgaaggcagatcagggcactacacagaatacagacgagaaggcagatcagagcacaaaaaagaatacagatcagagtcaggggaatcagagtcagaacacgcagtcacagcagacttctgctcaggatgtgcggcattacactgtgaaaaaaggagacagccttatgtcgatcagcaaagcgatttatcatgacacaagcatgattgacaaaatctgttccatgaaccagatcgagaacatggatatgatttatgaagggcaggatctgattttaccgtaaaagggcgggaaaacttccgtcacgctggacttcgcagaaaaaatgaattatgatgtataggaaaaagcatttctgaaacggaggaaagcatgaaagacacaggaaaaagcaacctgcagatggttcgggataactgggaagaaatcgagcgaaaagttcgtgaacatcatagaaaacaattaaagatagcggcgctgattgttggaatctgcgtggcacttggaatcacttattatgtatatgtgcagcacaaatcttacacagattataaaatcgtagataccgtggagcgttccgacagcgcagcaacgcattttgtgcagtataatggacatttattaaaatacagcaatgacggagccgtttacacaaccgttaacaatgatgtgatctggaatcagagctttgaaatgcaggagccgactgtatcgatctgtcagaaatatgtggcgtttgctgacagtgatggaaaagaaatctatgtcatggatgacagcggcacacagggcaaattcaaggtaacaatgcctgtaataaaaatggatgtctctgcacatggcacggtggcagttttgatggaagatgatggtacaagctatctggcactttacagcaaatctggcgaacagctggcagagggtgcgatccatgtggaaaatggtggtacaccgttagcaattgcgctgtcggcagatggtcagaaactggcagtttccagtatggatattcatgatggaagcgtaaaatccaccgtaagtttttacaattttggcgcagtaggtgaaaacaaagtagatcatatcgttgcaagttattcttatgcagatacggtgattccggaactgacatatattggatctgaccatgtacttgcattttccgataagggtgtttatacatttaccggaagcacagagccaaaagaaggaccgaagaaagagaccgacgaggagatcaaaggtgttttctacgatgagtcctattttgcgcttatttttgcggcaggcaaggatgaggcaaaacgccgtgtcgaagtatataatatgaaatgcagtcagcaggtaacgtttgaaacagatttttcctttgaggaagcacagtttctggataatcatgagatctgcctgaccagtgaaaatgcctgtgcactgtatacacttggcgggcgtgaaaaattttactatgaatttgaaaatcgtctgtgtgccgtgacacatgtcagcggatatcgcagatatgcctttgtaatggaaggaaaaaccgaacaggcgcgtttgaagctgttcgacggaaagaaaacaggagataagtagtcatgaattggttattctggattgtggtggcaattatcgtattttttgcaatccgaggatggaacagaggtctgctgcgcattttgtattcgctgatctctgttgtgctgctgataggactgatatcctatgcaacgccatatgttaccagttatataaaagaaaacacaggagtttacactttattacaggaacgctgtacgcaggcgttgaaaaatcgtggagaatcgacaatagaagaaaaaacgtcggaacaaaccagtaatacagaagtggcaggtgtatcccttccggagcatgttacttcttatataacagattctggaaatgcactgctggatcaggcaggcgtctatgatatgcttggaagtaaactggcagattggattctggcaggaatttcatattttattgcgttgatcattgcggggattattgtatcgttgatcggcagggcactccgaatcgtgagccggattcctgtgatcaaaggaatcaaccggacgcttggaatatttgcaggtggttttcagggactgcttttgatctggctgctctttttgctgcttactttatttgcggcaacagaccttggaaaaatgtgtatcgaacagattgatcaaaatgttgtgctcagatatttgtattatgataatgcattgtcgaagattttgactggatttttatttggtaagtaaaaatataagaaagaatagaaacgaaaaggtaatagatgttgtggatgagaatgctggaactacaacatctattgttctgtaaaaagacttgaaaaaaatgtaaaaaaatgtgtaaaaaagtgttgacaatgtaaagccccgatggtattatctaatagctgtcgcggggaacgaagcaaaatgaaaaacaacttttaaaaaaagttaaaaaagttgttgacaagagctaaaacctgtgataagataaaaaagtcgctgaacgaaagcgataacaaagaactttgataactgaacagtgaaataaccttgaaagattcattgagaacagcgaagtaattcgca

SEQ ID NO: 13196 - DNA, 1455 bp, Unknown
  gut microbiota DNA sequence
tgctgatgttcgcttttgtcaacgaagttatcgacaccatccgtttggatgctttgaaagaccgtctgcatctgctggtagagaagcgtttccggggggaactgaacaaatgccaggggtgcgccatctgcaagtgatagcttataatttcgattcattatgaacaacgatataaataagagtagtatcttggctcccctccctatgggagaggggctgggggagaggcttcgagctgatttccctatcctttcccgtgaggtatatggcaagccgttggtctatctggacaacggcgcgactacgcagaaacctcgccaggtagtaaatgccattacggacgaatattattcggtgaatgccaatgtgcatcgcggagtgcacttcctgtcgcagcaggctacagagctgcacgaggcctcgcgtgagacggtgagacgtttcatcaatgctcgcagcacgaatgagattgtcttcacccgtggtacgacggagagtatcaacctgcttgtctccagctttggtgaggaatttatgcaggagggggatgaggtgattctttctgtgatggaacaccatagcaacattgttccctggcagctgcttgccgccaagcgtggaattaccatcaaggtgattccgatgaatgacaagggcgaactcttattggacgaatataggcagttgttctccgaacgtaccaggattgtcagtgtggcgcatgtttccaatgtgctgggtacggtcaatcccgtcaaggagatgattgcttttgcccatgagcagggtgttccggtgcttgtggacggtgcccagtccattccccacatgccggtagatgtgcaggatctggatgccgatttcttcgttttctccgcgcacaaggtgtatggtcctacgggggtaggggtgctttatggtaaagaggggtggctggataggatacctccctatcagggcggtggagagatgattcagcatgtatcttttgaaaagactaccttcaatgaattgcccttcaagtttgaagccggtacgccggattatatcggtactaccggacttgccaaagctttggactacgtttcgctggttgggatggacaagattgccgcctatgaacacgaattgacccagtatgccatgcaacggctgaaagagattcccggtatgcgtatcttcggcgaggcagaagacaagggtagtgtcatatcgtttctggtaggtgatatccatcattttgatatgggtacattgctcgaccgtcttggcattgccgtacgcacgggacatcactgtgcccaaccattgatgcagcgtcttggcatagagggaacggtgcgtgcatctttcgggctttacaatacccgggaggagatagatgtgctggtggcaggtatagttcgtgtcagccggatgttctgacaattttttcactcttcgttgcaactttcc

SEQ ID NO: 13197 - DNA, 3964 bp, Unknown
  gut microbiota DNA sequence
ttaatccgaccggatgtaaaaagaggagagaaaaagatgaaattgaaaaaaatcgcagcattagcagcagttgcagcgatggtagtttccatggcagcatgtggcagcacaaattcagatgcagacaagagcacaacaggaagcgcggctgaggaatctcagaacgcaggcaaagacactttagttatggcaacaaacgcaacttttccgccgtatgagtatgtagatggagaggaatacaaaggaatcgatattgaaatctcacaggcgatcgctgatgatcttggtatgaaacttcaggtagatgatatggattttgattctatcatcccggcaatcacaacaggaaaagcagatatgtctctggcaggtatgactgttacagaagatcgtaagaaaaacgtaaacttctcagacagctatgcaacaggtgtacaggttattatcgttccggaagattctgatatcacgggaccggatgatctgtctgataaactgatcggtgttcagcagggaacaacaggagatatttactgttctgatacaccggaaaatggtggatatggtgaagaccatgttgtcgcttaccagaatggtgcaagtgctgttcaggcattaaagacaggtaaagttgatgcagttgttatcgataacgagccggcaaaagcattcgtagctgagaatgaaggattaaagattcttgacacagagtatatcacagaggattatgcaatcgcaattgcaaaagataacacagagttattagacaaagtaaatacatctcttaaaaaattaaaagaagacggaaccgttcagtctatcattgacaaatacattaaagctgagtaatcgatttcgtacaggaaatattgttacaaaaagtaacgaaagaactgtaaaaaatagtgggacagcaatagacgctgtctcatttttttgctataataaaattcagtgtttgaacgcaggctgcaaagtggctgcgttcatgagcaagtaacgaaagtggattgcaaatgtccgctttacaatttacagaaaggagaaaagtgaatgaaagaatggtttttaagccttacagatggattctcacagacgtttattgaagacggtcgttgggtattatttgcaaaaggttttggcgttacgatccgtgtggcagtgcttgcacttttgatgggtattgcgattggtattcttgtagcgatcgttcgtaccaaacatgataccagaaagaaaaatgcacatggcgtcggcaatgtgatcttaaatattttaaatgcaatttgtcaggtttatctgaccgtgatccgtggaacccctatgatggttcagttgatgatcatgtattttgttatctttgcatccagtcgtcattctgttgcagtagcaactttggcttttggtatcaattccggtgcttatgtagcagagattgtacgtggaggtattatgtctgtggatgcaggacagatggaggcaggtcgttctcttggtatgaattatacccagaccatgcgtcacattattattccgcaggcaatcaaaaatattctgccggcactgggcaatgagatgatcacattattaaaagatacttctctgatgaccgttaccggagcaaaagatttgatgaaagcagctcagagtgttacagcggttacatatcagccacttatgccgtatatcagtattgcaattatctatcttgtatgcgttatggcattatccaaggcgcttgctgcatttgagaggaggttgagaaacagtgatagacgttagaaatctggaaaaaagttttggtgatcacaaagttttagacggaatcaatgaacatatttatccgggagaaaaagtcgttgtcatcggaccttccggttccggaaaatcaacctttttacgttgcctgaatctgttagaggagccgacagcgggaaccattaccgtagatggtgtggatatcacagatccaaagacagatatcgataaaatacgtcagagaatgggtatggtattccagcagtttaacctgtttccacatttgaccataaaggaaaacatcaagcttgcaccggtgaccttaaaattgatgtctgacagcgaagcagatcagaaagccatggagcttttagagcgtgttggactgccggataaagcggatgcatatccgaaacagctttccggtggacagcagcagcgtatcgcgatcgcgcgtgcacttgcaatgaatccggaagtaatgctttttgatgagccgacatccgcgctggatccggagatggttggagaagttcttcagttgatgaaggaactggccgacgatggaatgaccatggtggttgtaactcatgagatgggctttgcccgtgaggttggaacacgtgtgctgttcatggatggtggaaatatcgccgagcagaataatccgaaggatttctttgagaatccgcagaatccacgattacaggaattcttgtccaaggtgttgtaaattcttttgtggctaaactttaggttgtgaaaacgccagtcatcaatcttacctctgcagctaacaatcgcttgtcgaggaaagattgcctgactggcgtttatttactttttaatcaaatcaaggaagttccctgcttcaattgcgaaaagcaataagcaggggtggggacttgcttgtatcaggaggggtgcaagccccttctgataagctgcaaagcagctatttggttatgagcaagtagcgtaggcggattgcgaatatcctttgactggtatcataaagaaaatgataaaaacgcaggagcacattatgaaaaaagaaaatcgggacaaaatagtggcacttcgccatgacctgcactgtcacccggaattatctatgcaggagcaggaaacgaagaatcgcctgatcacatttataaaagaaaatatacagcttgaagtcattgaccgaggaaactggttttacgtacagtatacaaccaaaaggcagtcagaaatgccagaggcagacacgaaaccgccgatcgcattccgtgcagactttgatgcattgccaattttggaagacgcagaaagtttaccctacgcatcagaaaatcccggagtcagccataaatgcgggcatgacggacatgcatccgcattggcaggtctggcattagaactggatgcaaacggcgcagacagggacgtatatctgatttttcagcatgcggaagaaatcggtcgcggagcgcaggaatgtgttccgttgataaaagaaaaaaagatagcggagatttacggttttcacaactggagcggttttccaaagggagcggttgtacttcgggaaggcgtcagccagtgcgcttccagaggtctgactattacgtttaccgggaaaaaatctcatgcaagtattccggagcagggaaaaaatccatcagtggcaatcgcaaaactgattttatatgtgcagaatttattacaggcaacaacgtttgagcagcttgtactggcaacgatcgtgaatgtagaaattggcacgaaggattttggaatatctgccggtgaaggtgagatttcctttacacttcgggcggcgttgcagcgagaactggatgaattggagcagatgatccgcacgcaggcagaaaagtttgcagccgaagaaggattacagttatcctatgcctatgatgatccgtttccggaaactgcaaatgatgcaaaggctatcgaacgggtgagaaacgcggcagaaaaattgcatcttccagtggtagaactgacggagccgcttcgtgcatcggaagattttggctattatacgaaagaatgtccgggggcgatgttttatcttggtaatggtgaagattatccggcacttcatacgccagagtatgatttccgggatgaattattagaactggcagtaaatatttttcagaaattgatataatccggttaaggaagctatctgatt

SEQ ID NO: 13198 - DNA, 21030 bp, Unknown
  gut microbiota DNA sequence
aggaataggaaaaataagtgtttttataaatatatattataacaaaaagaaaaatagtgatttttgataatattaaaaaatagtagaaaagagggcatagtatgaacgaattatatgaactgattgagcagaaaataaaggcatccggttatccgagagagatttccggtgaggcagtatacaacgatatctgtgaccagatagatggaaaagagaatggagtatatctgttgttatcaaaatttgaggaagatgtagttttcgagtatcatattaccgttcgggatgaagattttaatttgggaattttgacaatgcgtacaccggaaggcgtatttgaagtagattttgacgcataaggaggaactatggatatcaaagaacaaattcatgcattatctgaggagatgattgcaaatttaggtaaaatggtagcgattgactctcaacttggcacaccgacagagggcaaaccatttggcgaaggtcctgcaaaagcactaagcgaaggactgaaaattgcagaagaacttggttttcataccgtaaatctggacaattattgcggttacgcggagatgggcgaaggcgaagaaatcgtaggaatcgcgggacatctggatatcgtgccggttggtggagattggagttatgatcctttcgtgctgacacgcaagggagattatgtatatggacgtggaacgacagatgataaaggtccggtgattgaggcgctttatgcaatgaagttgcttcgtgattccggcgtgaagctgaataaacgggtacgtctgatcatgggatgcaatgaggagaccggttccaaatgtatggaacattataatgaggtcgctgaggagttgtcctgcggatttacaccggatgcaaatttcccgtgtattcatggcgaaaaaggacatatgtctatgatggcatattccaaacataccaaaattatttccatgaatggaggttttgtatccaatgcggtatgcgacagttgtacaaccgtgattccggcagaagctggattaaaagaaaaattggaagttgcgcttggtgacacaaaacttcaggagtacaaagtaacagaagaaaacggtcagattgagatttatgcaaaaggtgttccggcgcatgcaagtacaccggcacttggtatcaatgcagctggcgtaacatttgaatgtttggaaaaagtaggttttgaggatgattttgtaaaattttataacacacaccttggaacttcctgtgatggagccggaattggtttgaagtgtgaggacgcttatggcgatctgacattctgtaacggaattgtaaaaacagaggatggcgtaatttcctgtaccattgacattcgtgtgccggttactttcaaagaagcagatgttcgcaaaatgtgcgaaggcagactggaagatgaaaatggtcggatcgagatagaagaaatcggtgatccgctgtttttcccgagggagtctccgctggtagaagcattgtataaagcatacgtggacgtgacaggagatactgagcatgaaccgatggtaatcggtggcggaacttatgcgaaatctttgaaaaatattattgcatttggtccggaaaaactggatatggattatcatattcacagtgcagatgaatttattctggtatccgaaatggaagaagcggttctgatctatatggaagcaatcaaaaatcttctggcaatttagagggaaaataagatagaaatgtactcaggaaagtgatgaatgacacacgtcctctaaatatgaatatcggctatttctctagtgaaaaagagaaataaaattaaaaaaattttaaaggttcttttcaaaaaatctaacgtttcgattttataataagtgatagcttcaaaaaacgaagtgtagagtgcagagattctgaaaagaatatgtcacagtttactctgaccagaatcacgcaccaagtcttacgtgcgttcgacttaaatatttttggaaatgagaaaggggaaaagccgatgaaaatgttttgggttatcatgttgtcattgtttttaggggcatcaggaaatcaacaattgacaaattccgttgagatggcacggatttcgaagacactggatcttgcgttggcacagggaaacctaattgaaaatgtagatacccatagtggttctcatggggatggagattctttgcagacatggacatttgcggatgattccttattaaaacagattcaggcagattctgcctggaagccatttcctttgacaaaaaatttagaagcattgctttatggtgttacatatgatgagggattatcggtaacggttgtcggtccatatgtttctttttcagaggaacagcttccaagagtagaacacggatattattactttgtggatcggcaggcggagtcagaacagcagaatagtgatgagcagattctggagcgtgtgtcgtataatttcagtattgcgatttatgataccgatacggatacgttatattacgtggaggcggattcctgatatatggctacagacaaatatttttaggagaagcaatccggggattacaggatgcatattttgaacgcagaataagcatttccccgcttcaagtgagtagagcactaagtggtgggtaagggggatgcttatgtcagtgggagttaagctcccactgacagggcgcaaagcgactgcgttcatgagcaagtagcgaaagcggattgcgaatgtccgctttacctaagaaaaagaaaacagaaaataaggaaagagattgcaaagtttgatagatgtaccgaaattaaattttgcagtctctttttatatgcggtataattattttatatgttagaaaaatgggataatgcaagtaaccgaaaataagaaatattataataagggaagatgcaaatttctgatataagaaatattgtaacaagaggaaggcaaattcttaaaacagcaaaatatcataatgaaaagaagaactatgacgatgaaggagataaaataaatggatgattttttatatattttaaaattacagttggaaggtcgattaagtgacgatcagatcaccgatcagatgcacatttatgaggattatattcaggaacaggttgccggcggaaagaccatggagcaggttatgcgcaaactgggtgatccggcgaaagttgcagatatgatcgtagaacattatgaaaaactggaaaaacagcagcagcgcgaatctattggaaatatgacagcagaggagatcaatgcgaatgttcagaatccggagcatggatttcatgcggaatttattgagaacgaaggatgggacgttcgtcttggaaaattaaaactgaatacctggtatggaacactgatcattctgggtgcggtacttggtatttcagtattgatttctacgataatgcattagattgagatttttataataatgcattagatcttgtgttagatgaggatcctgggatgtgcaggagaagtatatagtatatcgtgtgttgccttatgcacattttacagcaaatatgcataaggcatttttgaattgacagaaaaaggaaaaatcgggggagagcagtaacgatgaaaaagtcagctggatatctggcgttatttagtaccatagcagcattaagtctgagcggatgtggaactgcgacaaaacaggaggcagattccgaagcaaaagcagatacatatgtgaccctgaaggcaatcacagttggaactatgccggaaaatggaatggatgaattttacgaagaactggatgagatgacggaagaactgggatgtcatctgcggtttgactatattccatggggagatgagcgttcacagcttaatatggcgatcgcttccggtgagtacgattttatctcaaatggcaacttttcggattattatcagcaggcagcaaaaggggcatttctggatctgaatcagtatcgtgatctggtgccggatctgtttgctcattatgaggattaccgggcggattttctgacgaatctggagtggaacggtggtttgtatggaatcccgcagtttaaggcagattctatcagtgattccggagagggatttttctatcgaagcgatttattgaaggactggaatttgccggaagtgacagattttgagagtatgcagaattatctgtatgcagcgaaagcagatccaaggtatcaggatgcggcaatgatcacggacaaccgtgcatggaccgcgctgtggcatatgtttggtgcaaattatcaggagattgaaagtatagaaacgattccgtatgcggtggtggatgccgcagatggaaaaaacgtggtgagccgttttgagacagaggaattccgtcagattctggatgtcgttcatcaatggtatcaggatggaatcctgaatccgggcattttggcatcttccgataatgagggaatgactgcccttgaaatgatgcttcgggatgaaaaaccgtgtgaaacaaatgttccgatctggtcagtcaatgatgcctgtataccggctttgtatgagaagcatccggagtgggaatatggatttttcgattatgatctgtatggtggaaatattacaaaagtaaaaagtggaaaagagttgtcctgcatttctgtgtctgcaaagtgtcagaatccggaaatggcagtgaaaattctggaaaaactgcatacggatcaggatttttataacctgatttcttatggtgtggaaggcgttcattatgagaaaaaagatggtgagatctcacacgaaggaattgcaagtaaagatgctttttcttattgggtaggaagtccggatcatatgttggaactgtcaaaatatatggaagacaagcagtgggaacaggtttatacagatctgcggaatcagcagcaggaattaaaagcgacagcaccggataatttactgattgattttacatgggaagatgatggtttgaaagaaatcgaaagccagctggatgaagtacgaaaagactatttgttaccgttatgttgtggcgtgtcggataatattgatgcggattatcagacggcaatcgacaagttgtatgaagcgggtttacaggaatatctggatattttacagaaacaattagatgagtattgggaggaacgatcatgaagcttctgattgtggatgatgatgtgtatacaagggaaggacttgcggaaaatattccctgggaattgtatggaatcgaagaagtgatgcaggcagagaacggcaaagaggctttgcacaccgtgtcatggtatctgccggatctgattattaccgacattcggatgccgcagaaaaatggcattgatttttgcaaagaagcggttcgactggtgccggattgcaagattatttttattacgggatatatgcagacaaagtatctgaaggatgcaatcgatctgtcggcggtggcgtttattgaaaaaccgatccagccggaagctgttttggaggcgttggaaaaagcagtagaaaaaatccgcagacagcaggaaaccgtgcaattgcaaaaagaaaatatttcctatcagaagacaagatttctacatttgttgcagcagaaaaatacatcggaggaacagttggaagaaatctgccgggattgcggatttgtatgcgccagagatgagaattatctgtgcatggaaattcgatttgagaatgaaactgcacagttggagccatgcaggacgttactggagaaatatcttggtgacagtaccgactttttattactggatcagatgccggagttggagaccgctattgcggtgcttgcatgtcaggcaaaacggcagcaggagattcgacgtaaattacatctgtttgtagcaaaatatccggaatatacggttgcagtcggatattttgtggaacgattatctgaggtgcacaacagtagccgtatggcgcagcttgccatggaacagggattttttcagccggaagtacgttatctggagttacagcatctggtaaaacacgaatttatcgatccgggaatttatcaggtgtttcttcagacttaccgggaaaatccgtggcgtgtccgtgactggtattgggagcagctggaacaattttgcgcgcagaaggatgtaataccggaaggcgcacagcttatttcactgacaaaaacctttgccagtcagattttgaaggattatccggaaagcctgaaaaatgcaggactggagacagtggagcattatatggaatatttgtcaggcagcaggcacattcaggagctgaaaaaacggttttatcagttgctgcagggaatggaacagtgtctggagaaacagaaaggatacagccgggtggtcagtgatatccgtacctattgcagtcagcatctgtcagacagtgcccttggcggtcagatgatctcagatcattttgggttgtctgcgacgtatctgaaccagctttttaagcaggaacttggcatgacaatcaagcagtatatcagtgaaatgcgtatggaacgtgcggagcaattgctgacgcagacttatgagacggtggatgaaattgcgacaaaatgcggctattccaacggaaattattttgcaaaagcgttccgggaaaatcggaaaatgccaccgacggattacagaaagatgatggggaagcgttatgaaacaaaagggacaacgtaaactgccatttttttatcactggaaattgtccagaaagctgttgttgcttttttttggaatcggtattctgccgatcacggttatttttggcattacgctgtatcgaatggtgcaaaaatccagtcagatgcagctgtataccatggataagaactttgaccggatggaacagactatggataatattcaggatcgcatcgggcgtatcggttcgctggttacggtgtcggatctggtaggagatgctttgcgcagtgatgacagtgacggtctggttcaggaattgcagaaattcgatgcgttgtcggattatacctatcagctggaactgagttccgatgatatttccattttgtattatattccggaaaaatttttgctttcacaaagcggaaatacctgttatcgaccgttaaatgatctgactaaatggaaggtagatgcccaaaatctggaacagacggcgggagcttcctggcgcgtggtacatgaaaagaatcgctatggtcagaaaaaaagttatctggcaaattttcgggcaatctggaatacagagcagtattcggaactgcttggaatcgtagcagtcatgattcctgtggatgccgtcagggacagtatgaatgggatgatggatcagcagacgctatatctgctggatgagaatgatacgattcttttgtccggtggcagtcaaaaaatatcggaggaacgtctgccaaaattagagggaacatcaggggatactcatgtggaaaatggtgcgtggcttgtgcgcaataaaaagctggaagaaggtggtatggcactggtttctattgttccgcggaacgttctgatgcaggagtcaggaaaaatcatccgggaaatgctcattttttatatcatagtctgtgggatttctttcgtgctgttgcagcttgggaccagaccgtttctgggacgtatccgcaagttggatactaccatggaagcagtagatcaggggataatggagccaatttcggtaccggaatacagagatgaacttggcagactgacgcaacgttacaataaaatggtggaacagattcagcatttgctggaagaacagtatgtgctaggtaaagaaaaatcggaagcacagctttatgcgctgcaggcgcagatcagtccccactttttgtataatacgttagacatgatgaactggatggcagtaaaaggtgagacagacaatattcgaagtgtactgtcctccatgtcacggttttaccggatggttttgagtcgtggcgcgtatatcattacgatcggtgaggaaatccggatgtgtcaggcatatatggaaattcaggtaatgcgcaaaaagaaaaaactgcaatttttactggatgttgatgaggaagtttttccatatctgattccgaaaatcacgttgcagccgcttctggaaaatgcagtcagtcacggaattgatgaaaaagacggcggtcgcggaacggtgcggctttccggacgattaatgggggatgagattgttcttcaggtacaggatgatggtgtgggcatggatccaaagatgctggacgaagcgtcgccggatgatggtaagacacattacggtttatctaatgtaaaaacgcgtctgatgattttttatgagaaaaatgctgaggtaatttgcaacagtgcaccgggaatcggaaccgccatcacattgaaattccccaaaaaagaggatatggaagaatacaacgggtaaaaattaaaacagacaggtaatttttgaaagtacatggaagaaaatgcaaacttccatgtgctttttttgtttgaaaaatggcagaaaatacaaaaaaagtcctcttaaattgtgcatattccatggaatataataaaaccagaaagaaacacagaacagaaaatggaagaaaacgtaaaaaactgtgtgggatagaagtataataaaaaatcagagttgttacaatcagattatgtaaatgctgaagatgaaaacgaatatttgtgagcagcaaatggaaagcgaatgagagacaggtattcgtctttggaggaattatgaaaaatcatctggaaaaagaaaatgtggaatttcgctattatgaaatgccacagggaatgccggttttgccgctgcttggagaaaaatggattacacgctatggagcagatcccatgcattttcacaattatctggaacttggatattgttattcgggaaaaggtgtcatgcattttggcgatgaacttgtatcatatcgggcgggaaccgttattgtgattccaagaaactttccgcatcgaacagagggcgaagacaataacctgcagaaatgggaatatctgtatgtggacagtgaaaaatttctgaaagaacagtttttaaacagaggcaggatggcagaggaactgatcgcacgactgcacagcaggatgttcgtgatcacaaaagagatggatctgaaagtcggaaagcagatgctgattctgctggatgaactgcgggagaagaatgaattttatacggattccgtaaatggagcccttctgtcgctgcttttgatgatcatccggttcaatccgggagaccgggagcaggagccgatgacgtatcacaaccgatatctggcagatattttaaaaacagtggaatatatggatgctcattacaaagaagaaatccgcattgagaatctgacgcagctcagtcacttaagcgagacgcatttccggagaaaattcagcgaatacatgaaaatcacaccgggagactatatcaacctgcttcgggtaaaaaaagcatgtgagctgcttcgttatacggattgcagtattggtgatgcgggaatccaggcaggattccggacagacagtgcatttataagaaatttccgtaaatttgtcgggacaacaccaagagaatggcgcaaacaatcgggaaaagaaatcgataatccgatgaattataacatttccgtgttgaaaggatggtgaaaagaggaacaggaaaaggactttgccgaaagaagggagtttttaatttggggtacaggcagtataggcggaggggaaaatctgcatgagttaagaaaaaggaggagaaccatgaataaaaatcgtaagagatattcaaagaaaacagggataagagcaatggcactttccatagctgcggcaatggccgttaccctgtatccgatcccggcatttgccgtggaaaacggacaggcagcagagcagacaaaggtacaggataaaaccggaggaaacattcatgattatggaaaatcgggagatgatccgacgacaccggatgtggatgaatctgcagttgtagctaacagtgatgtgttaaaatctgcacagtatcaggaatcaaccaaatatgaattgaaagtaaatggtacacctgtttctgtttataaatatcagaagcaggagaatccaggtcaattttatcatatggatgtagcaagattttcttcggatgatgcagaaccggtatttgagattaccttgaaagacggttctacgattgacagtgtttatgtcagtccggaaagatattatccgcaggattcctttgaaatcagtgcagataaaaagacggtaaaatttaaaatgtcaaatggtctgcgttattgcatcgttaatatcaacggaagcatcaatgataccagtggaaaaccgcagctggcaatcatcaacgatccgacagagacgaacaaaccggatgtggcagcaaccaatgtgctgaatttcaaagaatttgcagaaaaatatctgcaggaacatccgattacggatacggtgggggaagtttgtacggaggccggaactgttacagacacatctatgaatgatggaaaagagtatacatggtcttatggacagggagtatttcaggattataatgcaaaacaggttgtgttcccgaataagcgtgcacggcagaagaatgatgtgtctgaagcatttcaggctgcactggaagaagtaaaaaacagtgatacactggatacgatttatttcccggcaggtacttatctttggtcaggtttatcgattaaaaactgggatggaaatggcaaagacgggaagttaaatatttatctggatgaggacgcattgcttgtcaaccgtctgcaggaatgtacacaggcgatggagccggccatcggcatctgggattcttccaatatcacaatttcaggtcgtggtatcatcgatggacagggtacttatggatatacctgggatcaggcacatgcaagactgagtggacatcagggaggaagtatggtagttcgctcacaggatattacctttaacgatacctatgttcgtgatgtaaagcaatggaactgggaatgccatacagtaaaagatattacatacaataatattaagggcttatctccgttccagcattcctgggtagatggacttgatctgaccagtggacagggaattaccgtaaatggtgcgatcacaatgggaaatgatgatacgtttgcatccggacattataatccaagtaatgagttcccggaaagacagctatggggaaaagatttgaataatctgtccacagaagatcagaatatcgctgctgcagccgctatttataataaagaccgcctgaactgggataccgatgatacgacagatgtgaatatcaatgatacacttggatggagtacgtttgccaacgcaatccgtctgggtcataatacccattttaaagcggatggcggcagctatcagttgcgggattatacatttaataatgtgaataccctgcatgtgacaggatatggaacaaatggtggcggtggtgcactgagtattcagaatggaacgaataaaggaaatccgaattatgagaaccttgtatttaataactgttcttttactgcaaataacggaaataattccgccaatattccgaatacgaatgatctgactacgtttaacccgaaaaatgtgacctttaaggattgctggtttaaagatgcagacacaccgttttcattcaaaaacattgacaatgtaacgattgataatctgtatctgggcggaaagctggtagagtatgattcacaggttgatctgacagttgcagacagtgtgaaaaactttacattccttgcaaacggtgaaaatattaagaaaaatgaggcaccggtatttgaaaatctggacgatgagccatttaatgtgaaagccggtgagacagtttctttccggttaaaagcaacagatcctgaaaatgataaggtaaccttatctgcggtcagtgcgcttccgaaaggcgcatcctttgatgctgaaactggcacatttacatgggaaacctctgacagtgacagcggacggagagaaattacgtttaaggcattggatgagtacggagctttttcagagaaaacggttactgtcaatattgaagccggtgaggtaaagctggtaaagattacagcaacagaggatacatatctggcaggttggaaaacagaaaaaaatacaacctattcagacaatgactatctgcgtgttcttcgaatggcaaatgcaaagtctgatccggaaaagtatggattattcggtgaaaggataacagatacttccgatggaagtgatggaaaaatcagtgttctaaaatttaatgtatcagacctgaaaaaaaatcttaagaatttggataaagcggaattggaacttaccctgattaacagacgcagtaatagttcaacaggaacagatcggctgatggttgttccggtgtccggagaatgggatgcgaagaaggcaacctggaatacacatccggagtgggatacagaaaaagctgtttactcagaagaatttcaggttgataaaaacagtgaagtgaaaaataatgttgctattactgactcaaactatgatggaacaaaagcaatcgtagatgtgacagaacttatcaaaaatatggatgatgccgaaaatacactttctctggctgtatgtgatgagaatggctatgaactggcatttgcaagtaccgaaggcgcagcaaaactggatgcagagaaggaagcggctcctgtcatccgtgcaactgtgaaaaatgttatcggaaaagatgcagaagtatccagaacagtcgtatctcaggatacatttgcaggcagctggagcggagatcagacagcagactttggcgcaaagaatttcctgcgtacttcttacggaacagattcgaaaggaacattgggaaccgcaggtggaagtgacaataaagttacatatctgaaatttgatgtgtcacagattgatcttactcaggttgaccgtgtaaaattacagatgactttactgggtgtacgccacaatgaagctgctaatctggatgcacagcttcagattgccatggcagagaatacagactggacagaaaatactctgaactggaaaacgaaacctgcaattctggaagaaaatggagtaattacttcagaagaatttaaccttggaaagattgtaagcgatgatccggcactgatcagtacaccgaatggtacaatagcaacagcagatgttacatcattagttgcagcggcaaaagcagccggtcaggacagtatcacgctggctgtaaatatggttggcaaacaggtcgacaaggcaaatcgtattttctttgtaagtaaagaaggggcaaaatcttatgcaaatgcagaaaatatggctccggtactggtaagtacaaagacagtagccgtttccggaattaaagtaaatgcaccgacaaagacagtatatgatctgggtgaatcacttgacacaaccggtatgacagttactgcttcttatgaagacggaacagaagatgttgtagatttgtccaaagtaatcgtaactggttttgacagcagtaaagtagcagagaaacagacagttactgtaaaatatgcaggaaaggcagtgacattcgatgtagagatcagaaatgttacattagaaaatgcaaaaactgcagcaagtaaagaaattactgattatgcaactgctcagaaagaagcaatcaaaaatctgaaaggtttaagcgaagaagaaattacagcttataacgagaaagtagagaaagcagctgatgcagcaattgcaaaagttaatgaagcagcagtaactacagatgtagacaaagcagtagcagatgcaaagactgcggtagatgcgtttgtaaaagaagcaacagaagtttcagagaagaatattgcggctgcggaagcaaaggcaaaactgaaagcagcaaaagaagaagccgtaaaagcagtaactgacaaagctaccgctattacagcaaaaatcgaaaagctggaaaatttaagcacagatcagaaagcagcgtacgaagcagacgttgaatcagcagtagcagcagcaaaggaagcaatcaatgcagcaacaacgcctgaggaagcaacaggggcacagaaagaagcagtgacatctctggatgaagtgtttacagctgcaaagaatgctgataagaaagcagaaccaaccccagatccgaagccggtacacaaagacggactttctgatgagaaagatgcagacggaaactggtattactacaaagataacaagattgcaacaactgtaactaccgtagcgaaaaacaaaaacggctggtggagagtggtcaacggtaaggtagacttcagctgcaacagtgtcgagaagaacgaaaacggctggtggtacatccgaggaggaaaagtagactttaattacacaggaatagcaaaaaatgcaaacggctggtggagaatcgttaacggtaaggtagatttcaactgcaatagcgtagagaaaaacgaaaacggctggtggtacatccgaggaggaaaagtagactttagttacaccggagtagcaaaaaatgtaaatggctggtggagaattgtcaatggtaaagttgatttcaactgcaacagcgtggagaaaaaccataacggctggtggtacatccgaggaggaaaagtagactttagttataccggagtagcaaaaaatgcaaatggctggtggagaatcgaaaacggaaaagtaaacttcaatttccgcggaattgcacacaatgagaacggctactggtatctgtccggcggaaaagttgatttttccaaaaacggaacagtcaaagttcagggtaagacttatcgtgtcgtaaacggtaaaatcaaattttaacagttaatagttaaataattaccaaaaataatgcaaatatttttacaattttggttaatctgtttctgctatacctgctataattgcactgtaacaaataaggaactacttaacaaaacctctttgtagaaggctgctaagcaattcagatttttggaggaaaagataaatgaatactttaaaagctgaaaaaagaagcatggatgtcaaagcaaagaaactcagaagagagggattcgtaacaggtaacctgttcggtaaagagatcgaaggttctgttccgctgaagatgaacaagatggaagtggagcgtctgttgaaaacagatcacaaaggaagccagatcatgctgaatgtagaaggacaggattacgatgttctgatcaaagaggtagattataattcaatgaaacgttgcgttgatgagattgatttccaggcactggtaagtaccgagaaagttcattctacagcagcagttgtaattgagaaccgtgaaaaagtcctggaaggtgctctgcaggagtgcttagaggaaatcgaatacaaagcgttaccggcagcattagttgatcacgtaaatgttgatgtagcaggcatgaaagtcggcgatgttatccgtgtcaaagatcttgagatttctaaaaacccggatatcgatgttcacacagatccggaagcaatcgttgtcatggttgatgcaatcagaaacagcatcccggaggatgaggctgctgacgaggaagcagccgaagcataaaagcagaaatgcttttatgagaattgaaaaaagtatgagaagcggaatcacagagttaagcgctgtggttccgttttttgttgaaaaaaatttgttaaggaaaaggtgtggttcagaaaacgataaatatcagatgggggattcaattttaaggaaaaatgcataaaatttgagcaaaccatgcatcttaaatggagtgagaactgttcgattatttaattgcaatataatttatgtaaaagaaagacagttctaaacggattaagatgattggaggaattgtcatgcagaataatatggaacttggatacgaaatgttttgctatcagtgtgagcagactgcaaacggaaaaggctgtacccgacagggcgtgtgcggaaagacaccggagattgccaacttgcaggatctgctcatttttcagttaaaaggcatcagctgctatggaaaaatactgttggatcagggagaaaaactggataaaggtgtgatctcttttattgaaaactgtctgtttaccacgctgactaatgtaaattttgattcggaagtgcatgtaaaacttctgaaagaggcgcagaagatcaaagatgaactgcgtcagcagatcggaggagttgcaacggaaaacatctatatgtcttatcgtttgccacaggaaaaaagtgaaatgctgcgcaccgtagaggttgccggaatcatgtatgatcaggatctggatgaagatatccgttctttgcgccaactgatcatttatgggttaaaaggaatcagtgcttatggacatcaggcccgggaattaggttattttagtgatgcagtggatgatttttatgtggaagcattgtcggctgtgacggatgataacatgacggtggaagaattgatccgtctttctatgaaagccggagagatggcgcttgcagtaatgaagacactggatgaggcaaacacacagacttatggaaatccaacgccacatgcagtatcaacaacgctgaaagcaggccctttcattattgtttccggacacgattttcatgatctggaaatgctgttgcagcaaagcgcaggaaccggcgtgaatatttatactcatggagaaatgcttccgggacacggctatgaaggcttgaaaaaatatccgcatctgatcggaaactttggcggagcgtggcaggatcagcagaaacaattcgataatcttccaggatgtattctgatgacaacaaattgtctgatgcgtccgcgggaaagttacaaagaccgtatttacagtacgaatgtcgttggatgggacggtgtcaaatatatcggaaaaaatgcaaacggtgagaaagatttcagtgagctcattcatcaggcgttggaactggggggctattccgaagatcgggatgtaaaaccaacggaaccgtcggattgcccaagttgtcatctggcatctgaacttttgacaggttttgcacatgaagcaactttaagccatgccggagaaatcgtacaggcagtcaaagatggaaaaatcaggcatttctttctgatcggcggctgtgacggtgccagaccggggcggaattactatacagagtttgcagaactggtgccggaggattgtgtgatcctgacgcttgcctgtggaaagtaccggtttaataaaattgattttggaacggtggcaggccttccgcgtctgctggatgtgggacagtgcaacgatgcatattccgcggtacggatcgccacagcactggcggatgctttcgatacagatgtcaacagtctgccgttgtcgctgatcctgtcctggtatgagcagaaagcggtagcggttttgcttgcgttattaagtcttgggatcaagaatatttaccttggtccgatcctgccggcatttttaagtccgaatgtggtgcagtatctggtggatacgttccagcttcatctgatcagcaatgctgaagatgatataaaaacctgtctgaaacaggaattgtaggttgcaggttcaggtgtgagaaggaaaatagttgaaaaaatgcatgtaaaccagtaagtcttgactaaaaaaagtgaaaaaattgcttctgcatattgtaaaaatgcaaaaaatcatttactataaagattagttgatgcatttttgcaattttataaggagcaaaaatatgaatttgcaggaaaaagattccggaaatcttcaggtggaagattatctggaggctattttggacaattttcatgatggtatttatattacagaccgggaagcgaacaccgtgtatctgaatcacagctatgaattgatcagtggtctgagaaaatccgaaatgattggaaaaaacatgaaagatctggtggaagccggcgtggtatccatgagtggtacactttctgtgctgcaaagcggggaaccggtgaccagtgaacagattttccgaaccggaaaacgggcagtgatcacgagtacacctgtctttgatggggatgacaaggaaaatctggtcatggtggtgacgctggttcgcgagattacagagatttattccatacgcaaggaattgcaacgaaaagagcaacagaaccgtcagtatatgcaggaactggagcgtatgcgtaaggaactggacggagatgtggagctggttgcggtggcagaaccgagtagaaaactgctggaatttgcccgaaaaatggcgcaggtggatctgccggtactgctttatggagaaaacggctgcggtaaattccgattggcaaaatatatccatgcacattctgatcggacagaagctgcgtttttacgtctgaatttttctgctgtgccgaaaaatgatctggagacttatctgtttggaacaccgggaactgcagagcatgagccgcagatcggcttgctggaaagtgcggaaggcggaaccttatatatcgaagaactggcagctgtgccagaagatattcagggaaatctgctgacagttctccgggatggatgttgtgtgatgaaagaaggatatttacagaaactgaatatccggatgatcgctggcagtaagtattctgtgcagcagttagagcagatggcaagtgttaataacttactgttgcagcagttttcactgttttccatggaggtgcttccgttgcgggaacgcagggaggacatcattccgctacttgatttcttcctgaaccagtacaattataaaaccggacagaacaagcagtttgatcgggaaagttaccagtgtctgaacgattatccgtggccgggaaatattcaggaactgaaaaatctggtgcagagggcagcaatcatcagcaccggtgatgtgatccgggcacaggatctgtttatgcatgatcagcttgaaaaagtggagcagaagcaggaaagctatcaggatcaggtagatctgaaaatggaggttgccagatttgaagccgggtatctggatcatgcgttttccagatttggaaatatccgtgaggcggcagcgagccttggaatggacagttctacttttgtccggaaacggcaaaaatatgagcaattgggcttgatgaaaagccagaaaaagaaataatgagaaaacgttaaaattgcgtttttacagcactaaggactgctgtttgtgcatattgtacagaaacatatgcacagacggcagtctttattttaaaattgcaaaatattttgtgaatctgcataattgcaaaaatacatataatggtgtataattgcatcataacataaaaatgatgcaaaaatgcaattaaatcaacgagaaaatgggaggaacaaaaaatggcacttatgactggtgaacagtacatcgagagtatccgcaaaatgaacatggagatctacatgttcggtgagaaggtagagaatccggtagacaatccgattcttcgtccgtcattaaattctgtaagaatgacttatgatctggctcaggatccggagtatcaggatctgatggttgtcacatctccgtttacaggcgagaagatcaaccgtttcactcatatccatcagagcacagaagatctgaaaaacaaagtaaaaatgcagagactgtgtggtcagaaaaccgcagcctgtttccagcgttgtgtaggaatggatgcgttcaacgcagagttctccacaacatatgaaatcgataaaaaatatggtacatcttaccatgagaacttcaaaaaattcatgaactactgtgcaaccaacgatttaaccgtagacggcgctatgacagatccgaaaggtgatcgttccaaagcacctcacgcacaggaagatccggatatgtacttacgtgttgttgagcgccgcccggatggtatcgtagttcgtggtgcaaaagcacatcagacaggtatctgtaactcacacgaagtaatcgttatgccgactatcgctatgggaccggatgacaaagattacgcagtatctttcgcagtaccggttgattccgaaggtatcttcatgatcatcggacgtcagtcctgtgatacaagaaaactggaaggcacacagatggatgtcggaaactccgagttcggtggtgtagaagctttggttatcttcgaagacgtattcgtaccaaacgatcgtatcttcatgaatggtgagacagagttcgctggaatgttagtagagcgtttcgctggttaccatcgtcagtcttacggcggatgtaaagttggtgtaggtgatgtcctgatcggtgcagcagcagttgcagctgagtacaacggtgttgcaaaagcttccgcagtaaaagataaactcatcgagatgactcacttaaacgagacattatactgctgtggtcttgcttgctctacagagggtacagctacagagtccggcgcatacatcatcaacctgcttcttgcaaacgtatgtaaacagaacgtaacacgtttcccatatgagatcgttcgtctggcagaggatatcgcaggtggtctgatggttacagctccggcagagaaagatttccgtgacgagaaacttggcaaatacattgacaaatacttaagaggtgttgctgatgttacaacagagaatcgtttaagaatccttcgtctgatcgagaacctttcccttggtacagcagcagttggatatcgtacagagtccatgcatggtgcaggttctccgcaggcacagcgtatcatgatcgcacgtcagggtaacttaggcgctaagaaacagcttgcaaaagcaatcgcacatatcgaggagtaatacttactttttatatgacataggttcgactga

SEQ ID NO: 13199 - DNA, 10943 bp, Unknown
  gut microbiota DNA sequence
ggtagaaaattttaatacctgcatttgtttccggtttacacagagacagatgcaggtatataattaaaagataaaatgtacggaataatccgtaaagtatcttaaattaatttaagggcagaattgtatttttgaggaggaaccaccatgggggaattagaaatcagcaaaattgaaaaggttttggatgaacgggtgcgcccgaatctggctcagcatggaggcgatatcgagattgaaaaactggaggacggagtccttcatgtgagaatgcatggacagtgcagcggatgtccttctgcagaactgacgttggaaaatctggtcaacacagagttaaaagaagcgtttccggaactgaaagatgttgtgctggtgacaggtgtcagtgatgacctgatcgcacaggcaagacagatcatgcgccagagaaaagaagcaaaaaaatagagattttctgcaggcagattgcatgagaaaaagataaaaatgatctgtaagcagatgggacgcaaaaagaaataagcaataatctgtacgctgggacggaatgcaagatgatggaaaaagaagaaatcaagaaaattttgccacacagagaaccgttacttttggtagatcgtgtgacggagcttcaattgccggatcggatcgaagcagaagtggacatacagaaagactggcagatctttcaggggcatttcccggaacaaccaatcttgccgggcatctatattatggaaagtatggcacagacagcagatatcttgttattgctttcggaacagaaccgtggaaaactgccattattttttcaggtaagccagatgcggttttaccatccggtgtatccgggagcgcgattgtatctgagtgcacaattaatctcagacgcaggaaatggcatgtatgactgtagagtgacggcgaaaacagatgcgggacgtgcagcagtcggtgtgatcacactggcaatgaaggcaaaatcagaatagcataaaatatatgaggataagacaatgacaaatcttgaaaaatataacaaaattttaaaaagaaatttacaggcaacagacgaagatctgaacgatgatgtgcttgtgtataatagatttaaaagatgggaatctgttcgtcatgtagacatggtagcagatctggaagaagcatttggtgtgttctttgaaacactggatatcacatctttcagcacctacagcaaaggaatcgagattctggaaaaacttggcgtggatatgagcaaataagagatttttcgtaaaatctcttacgaaagtatcttttgagagaacacgtcatgagaataaaaggtaatctttaagaaggattattgaaaaaagaaggtatgacaatgtattttgatatggaattaaaacctgcagaccgtcctgcattgcagacggatacaggcatttgcattacatacggtgagctgcgtgagcagattgcagaattcagacatgcagtccgccagcgcagctttgtttttttattatgtgaaaatacaccgggcgcagtgatcggatatctgggatgcttaaatgcaggagcagtaccgttgctgctaaacgctgagctggatgaaacgctgctgcaggaaatgtatgagcggtatcaaccggaatatgtatggatgccgaagaaacatgcagaaacatggaaaccatgtaatttatcagaaaaacagaacaaagcagacgaaaatatcaataaaagtgatgaaaaaaactgcacgatcggatatgaaaaagcagagtatgtcttatatcagaccgaagcaccaaaatgtgaactgcatccggagctggcattgctgctggcaacttccggaagtaccggaagtccgaagctggtgcgactgtcacggcaaaatctggagagtaatgcgttatccattatggaatatctgaaactgacagaatcggaacgtgcgatcacctgtctgccgatgcagtacacctatggattatcagtgatgaacagtcattttcaagcgggagcctgtgtgcttctgaccaccagcagcgtggtacagcagcaattttgggattatttcaaatccgcagaaggaaccagtctggtgggcgttccatatacgtatgaactgttccgacgtctgcatctgtttgatgaccggacacagaaaccgggagaacaaccgtggtatcagcatcttcgctatatgacgcaggcgggcggcagactgccggaaccattgcagcagaaagttggaacatgggcaaaagagcatgacattaaatttgtagtcatgtacggtcagaccgaagcgactgcacgtatgagttatcttccggcagaccattgtctggaaaaaatcggaagtatcggcattgcgattccgggaggaaccttccatttggaggatgttgatccggcaactggtgtcggagaactgatctatgagggaccaaacgtaacgcttggcatggcagaatgccgtgcggatctgagtaaaggcgatgaacgtcagggtgtgttacataccggagatttggcaagagtcgatgaagacggattttactatattgccggtcgcaaaaaaagattcctgaagatttttggaatccgtgtcggattggatgaatgtgagcgtattttgcagaaagcctatgtggaagttgattgtgaatttgtctgtgtgggaacagacgatcatttgcagatttatacgaccgattcgacatgtgcggaaaccgcagcagagctgctggcagaccgactgcatataagcactcgcgcggtgcaggcgtattatattgcagagattccgaaaaatgcttccggaaaaacgcagtacaataaattgcaggataaagtgaaggaataaaaagagttcaaatgttggagtaagctgcttgtttatcgggtaagaacttatgagacgaactaattggacaaatatggaaaaagtgtaaatttacacagatatgatatatagaagaaagaaaagcatacttttgcatgaggaggggagaaacttggaggaacagagagaacatgaggtgtataccttagaagaagcgcagaaagatgaacaactcaccacacagttaaaagaactgacgcgttatcacagggaacattgtccggcgtatgcccgtatgctggaggcttccggatttgatgagtcaaatgtgacacattatcgtgatcttccgtttcttccggcaggattattcaaacggatcacattgagcagcatgccaacggaggaagatgattacaaagtcgtgacatcttccgggacaagcagtatggcatccagaatcgtgctggacggagagacacggacgcgccagcaggtggcactggcaaagattggtgcagattttcttggaaaaaagagacttccgatgctggtgatcgatgcaccttccacgctgtccggaatgcaccagttttcggcgcgggcggcaggtattcgtggattttccctgtttggtagatatcgcacttttgctttaaaggaagatatgtcactggatctggaaacgttggatgactttctggaaaaatacggaaaggaaccatttctgatctttggatttacattcctgatctggcagtatctggtgctggcattggagcagtctggtttgaaaaaagatctgtcacagggaattttagtgcatggtggcggatggaaaaaactggcatctcaggcggtatcaaaacaggaatacaaagcaagattacagaaggtttgtggtattacaaaagtgcatgattactacggaatggcagaacaggcgggtagtattttcatggaatgtgagtgtggtcatttacatgcttctgattattccggtattttgttccggagagcgtctgatttttcactctgtgatattggagagcgtggaatcattcaggtgttgtcgacacttccggaaagttatccgggacacagtattttgacggaagatgagggacaactgcttggtgtggatgattgtccctgtggacgaaaaggtgcttattttgaggtgtttggcagactgaaacatgcacagatccgtggatgttctgatacatttcagaagaattcaagtcgaacgcacgtgagacttggtgcgtgattctggtcagcgaaagctgacatattcttctcagaatcactgcacatctacacttcgttccggtcggcgcaaaaccattgtctcccagacaatgtgcgcccccgcggagcgtttatctcagtcggagattgtactcccactgagaaagacttgttattactcaccacttgcagaagtgggagtcttctcgactgagataaacatgttagcaggattatgttagataatgtatgcgaggaatcggaagcggttttgccaaatagtgagaactggaatccgaagataagattgaatgttgcaaacgaagtggtgcataagaagttgaagcagcacagcatttatataaatcaggagaagtaatgaatgtgatggaagatagagataataactggcaaaaagaccttcagtttttactgggtgatactgcaattctggaacaacttgcagaacagaaaccatatattcctttttcagaagaaaccatcgattttctggatgctttatatcaggcacttcgaaaagaaaaccgtagtgtacaggtagcagatctggcagcattttctttctggtgcagaaaaggaaatttaagtcatatccgtgagcagtatgcccgtcaatggaacggaaaaagagtgatcggcagaggtgtggcatttcacattgttccgtccaatattccggtactgtttgcctttagcatggcagcatctttgctggcaggagatccggtggttttgcgtctgccggagaaagaaacggtgcaggaacagatgattttatcggcactcagacaggtgatggaaacacagccggaatggaagaaacgaatggtgatccttcgttatggtcatgtaaaagaagttacggatgcgctttcccggctttgtcaggtgcgcgtgatctggggcggtgaccatagtattcaggaaattcaaaagtctgtattggagccgggcaaaacagaacttgcttttgcagatcgccgttccgcagcggtattgcggacagatgcaattttagaaaaagaagatttgacggacatcgtgcgcgggttctataatgatacttatttgaatgatcagaatgcatgctcctctccgtcattgctttactggttaggttctccggagcaaacggcacttgcccatgaaaaattttggaaagcagcggcaccttacattcagagccgctatgaactgggagcacatcttgctgtacagaagtgggaacaggcaatgtaccttgcagcgacaaaagaaaatgtaaagattcagaaatttggtaatgaagtcgtattggttaaactgccggagctttccgcggatgtatgggagctgaccgttccgggcggattctttttcgagtgcagcggagaaaatctggatggattatatccggctttgacaagaaaatgtcagacgttaacctgtgtaaacgaaacagagtgtacagaagttgcagaaaagctgatctgtgcgggtgtttccggtgtagatcgggtggtacagatcggacatgcattggatttttccctgatctgggatgggatggatctgatcgcacaaatgagtagactgattctatctcagttgagaagttagaaagaaaatggaggcattaccgatggaatatcaggtgaaaacagcacatggaacattattctgcagaagggaaggcagcggacctttgctgcttctgatacatggtgttgcctgtgacagcgaattttttcgtgaggcatcggcaatcttatctaaaaaatttacagtgatcagttatgaccggcggggatatagccgaagcattccggcagagggtgaaacagatttttcggtctgggcgcatgcagatgatgcggcagagatcattggggcagaactgaaacggaaacatgaggaagaaatatgcttggaagagtcagagccgcagatgaatggagctgaggaacagagcaaagtgaaagatggtcagaatatagggttttttgtagctggttgcagtgcgggtggcgcggtgacggcagcattggcaacaaaatatccggagttagtacgtcaggtatttttgcatgaaccactgatgcggggaagcggtgaactggcagcagaacaggatgctttttgggagaaacttcataaaagtgcagagaagcacagaattatcacctgcatgatgcattttgtgaatgccatgggcggcatgaaccgggacaaagagggacagtccatggagcagcagagccgaaatctgaaaaatctggagctgtttctggagaaagaaatggatagtttttcgaatttaaaactggaggattttaatatatcggttccggtgacggtagcctgcggttcagatgataaaaccggaatgtttcatcgatctgcttatcaggctgcagaaaccaaaggatggaaacacaagatcgtgccgggatatcacaattttgcttctgatgaaccggaaatgtttgcgcagtgtatcgtagaagaatttttcgaatgattttgtctataatatgggatataaatggaggaaaacaacatgtgtacagcagcaacttataaaacgaaagatacctattttggcagaacattagattacgaattttcttacggagatgaactgaccatcacgccacgcaattatccaatgcagtttcgtcatgcaggaaaaagtgatgaaaattatgcaattcttggcatggcgcatgtagtcggtgattatccgttatattatgatgccatcaatgaaaaagggcttggcatggcaggcttgaattttgtcggaaatgccgtatatcaggatttgtcagaggaaaaagaaaatgtggcacagtacgaatttatcccatggatcttgcgtcagtgtgcaaccgtgcaggaagcaaaagaatgcttaagtcatatgaatctggttggaacgccattccatgaaagtttaccgacggcgcagctgcactggattattgtggatgcgaacgcagcaattaccgtggaatgcatggcagatggtctgcacgtatatgataatccggcgggagtactgactaacaatccgccatttcagcagcagatgtttcagctgaatcaatatatgcatttgtcaccgagacaaccggaaaatcatttttcagataaactggagttgcaggcatacagccgcggcatgggtgcattggggcttccgggagatttatcatccacgtcccgttttgtgcgggtggcatttacaaaactgcattcgatttccggggattcagaaaatgagagcgtcagccagtttttccatattttaaattccgtagatcagcagcgtggatgttgtgaagttgcagaaggaaaatatgagattacattgtatacttcctgttgcaatctgaacaaaggaatttactattatacaacttacgaaaaccaccagatttcggcggtggatatgcatgtggaaaatttggatgccacggagctgattcgctatactccaatcacaggagagcagatccattggcagaacaagtaataaggtattgtttcaaaatctgttattagaaatgtaatagtcattctggattaaataataggaaaaaccagaaaatgtgaatataagaattttgccaacaaatgtaaaaatttatctcagtctgagatgagactcccacttctgcaagtggtgagtagtaacaagtatttctcagtgggagttcaatctccgactgagataaatgctccgcgagggcgcacattgtctggaagacaatggttttgcgccgaccggaacggagtgtagagtgcagtgattctgaaaagaagatgtcagcttgcgctgaccagaatcacgcaccaagtctcacgtgcgttcgacttgaaatatgaaaaatcccctgctttgcagattcatgacatgttttgcaaaacagaggatttttgccattctatttgttttttttgatagtcggttttgaatttagaatacaaccactaacagcattttaaactgttctttgccgtaaacagcatgcggatgttttgctggcataacaatggattcaccctcatgcagttcatgctctacgccatcaatggtgatgcgtccgacaccgtccaggcaggtaacgaaagcatctccgccagactcatgtgtgctgatttcttcgtctttgtcaaaggcaaataaagtaacgcttaaagcatcgttctgagcaagtgttttgctgacaacctgaccctcctgataagcaacttcatcttttaatacaagcacttcggctttgtttatatttttcatcatagacatatgcgatgtcctccttttctttgatactatgtagtatatccctgatgatacaaaaaaactgtggttattaccacaaaatggaagaaaagcggtaaaaaacaatgagcgtcggctaccatatttcataagattatgctaaaattgtgaataacttggagaaactttttcccagatgataggtggtgcgcatagtaaatgtgaataagagcgcgcattatttttttatgaaaaactgttttggggaaaaggatacaggagtataaaaatagatggcaaatataatagagattacagattttgcggcaccggagttggatatttatgcgcggtattctgaagtacaattattgcgcattaatgaaccgaagccgggtatttttatcgcggaaagtccgaaagtcgtggaacgagcgctggatgcgggatatgagccgatttccatgctggtggagcataaacatattgaaacgcaggcaaaagaactgatcgcacgttgcggggacattccggtttacaccgcagaatatgacgtgttgacaaaactgaccggattcgcactgacgcggggaatgctgtgcgccatgaaacggcggacgctgccaacagtagaggaagtttgcagcaatacgcggcggatcgctgttttggaaaatgtcgtcaatcccaccaatgttggcgcgatttttcgttcggcagcggcattacacatggatgcggtgcttctgacaccgggatgcagcaatccgttgtaccgcagagccatgcgggtgagcatgggaaccgtatttcaggtgccttggacgatatttccggaaaaagaaaaatggccggaagatggcatggcaaaactacagcagcttggatttaagacagcggccatggcattgcgaaatgataccgttaatatcgatgatccaggtctgatgagtgaggaaagattggcaatcgtgcttggcacagagggagacggactttgtgaagataccattgcaaactgtgactatacagtgaaaataccgatggcgcatggtgtggattccctgaacgtggcagcagccagtgccgtagccttctggcagttaggcaaccgataaaaagatgattttgttgagaaagtgagagagaaacgtatgttatttcaggaacaggtaagaaaggtaaaacaggcagctccgaagctggcagcaaccacaaacgaacagcgaaatgccgctttgacagcagtccgcgaagcattattgcagcatcaggcagagatttttgaagcaaacaaacaggatctggcacaggcagaagcagatggcgtatccggtccggtacggaaacgtctgaaatttgacgaaggaaaacttcgggatgtgacagcaggcatatcagatctgaccaagatggaagatccgctgtttcagacacagtttgccagagaactggatgagggattggtgctgaaacgtgtcacctgtccgatcggcgtcatcggtgttatttttgaggcgcgtccggatgcattggtgcagatttccgcattgtgcatcaagagtggaaactgtgtcattttaaaaggtggcagagaagcacttcgcagcaacaaaaaactgtttgacattattcatgaagcaattattgacgcaggacttccagcagactccatgatgcagctggaagcacgttctgaaatcaatgaacttctggaatgtcatgaatctgtggaccttttaattccgcgcggctccaacgcatttgtgcagtacattatgaatcatacgaagattccggtaatgggacatgcagatggcatttgccatatttatgtggataaagatgcagatcttgcgaaagcagttccgatcattgtggatgcgaaaacccagtatgtgtctgcctgcaacacagtggagacacttctggttcacgaagctatcaaagaccaactgcttccaatgttaaaagaagcactggatgcgaaaaaagtagaactccgtggaacgaaagacgttgcggcagttgtggactgtgtgccgtccactgaggcagatgataaaacagaatatcttgattacattctttctgcaaaaacagtcaaaaacatggatgaagcaatcgaccatatcaaccacttcggttcgcatcacactgactgtatcattacagaaaatccggatgcggcagagcactttatgaatctggtggattccgcgggggtatatcagaactgttccacccgttttgcagatggttaccgttatggattcggtgcggaagtcggcattagcaccggaaaacttcacgccagaggaccggttggactggaaggcctggtaagctacaaatacaaattgtacggaaccggacagatcgtggacgattatgcttccggtaaaaagcagttccattttaaaaatctagcaaatgagagataattcctgcgcttatagatagtgtgtaacaaagttacatcagtgttgggagtaaagcgactgcggtaaagcggacataagcatcccccttacccaccgcttagtgctctac

SEQ ID NO: 13200 - DNA, 209 bp, Unknown
  gut microbiota DNA sequence
atcatcataaatatcctgtatttttgcttttacggcttcacgacgtttttctgtatcagaaggtacgtggtggagccatgcaagatatcctgagcgagagacacctaaaaatttcaacattccggagacggaaacccggcgtccagcctttttggcagcttctgtcttctcagtcacttcgagataaatggcttccgtcattttcccag

SEQ ID NO: 13201 - DNA, 267 bp, Unknown
  gut microbiota DNA sequence
aaattccaaatacacataagcatggtacaatagaaacatgctgaaggaggatctcatatggcaaagcaacatgacaaacaatttaaacttgatgcaatccagtactatcaagatcataaagatctcggagtacgtggatgtgcagaaaatcttggcatcggctacagtacattaacaaagtggctgaaagacttccgagaatcaggtgatattcctgttcgtggttctggtaattatgcatctgatgagcagaaggaaattgcccgt

SEQ ID NO: 13202 - DNA, 1468 bp, Unknown
  gut microbiota DNA sequence
agtatcagtcgcaagatatctctgccaaaaagggtagcggtgtacccgagttgatggagaaagtgctgctcgaagcagaaatgctggagctgaaagcaaacccgaaccgccgtgctaccggttccattatcgagtcctcattggataagggtcgtggctatgtggctacggtactcgtttccaacggtaccttgaagatgggcgacatcgtgctggcgggtaccagctacggtaaggtgaaggctatgttcaatgagcgtaaccagcgcatgcaggaggctggtccttctacacctgccctgatattgggcttgaacggtgcacctgctgctggcgacacgttccacgtaatcgaaacggagcaggaagcacgcgagattgccaacaagcgcgaacagttgcagcgtgaacaaggtctgcgtacgcagaagatgctgacgctcgacgaagtgggtcgccgtctggcgctgggtgacttccatgagctgaacgtgattgtgaagggtgacgtggacggttctgtggaagcgttgagcgactctttaatcaagctgtctacggagcaggtgcaggtaaacgtaatccacaagggtgtcggtcagatttccgaatcggatgtctcgctggctgccgcttcggatgcgattatcgtcggtttccaggtacgtccttcgggtgctgccgccaagatggcagagcaggagggtgtggatatccgcaagtactccgtcatctacgatgccatcgaagaggtgaaggctgccatggaaggtatgctggcaccgacattgaaggagcagataacggcaactatcgaggtgcgcgaagtgttcaacatcacgaaggtgggactggtggcaggtgccatggtcaagaccggaaaggtgaaacgcagcgacaaggcccgcttgatacgcgacggtatcgtaatctttacaggtgccatcaatgccctgaagcgcttcaaggacgacgtgaaggaggtaggtaccaacttcgagtgcggtatcagcctgacaaactgcaacgacatcaaggtgggcgatattatcgaatcttacgaagaaatagaagtgaagcaaacattataattgaataatgtgcaaatatgctaatgtgccaattggctgcgcgtacagaaaatgccgcagggcaattggcacattttgcatattagctatttgctcattgccccattagcatatttgcatattagcacattagcacatttgcacattggtacattaattttatggcaattatagatatcatcatattggctgttttcggcttgggcacaatcatcggcttcatgaaaggttttgtgaagcaattggcctctttgctggggctgattgtcggtctgctggcggcaaaggcgttgtatgcctcgttggcagcgaagctgtgccccacgttgacggactctatgacagtggcgcaagtactggcatttgtcctcatctgg

SEQ ID NO: 13203 - DNA, 275 bp, Unknown
  gut microbiota DNA sequence
acaacggagcagcaggcggtgacagctcagcaaaatcagagtcaaacagctcagcaaaatcagagggcagcaaagatggatataccatcgcagcaaacatctggggaacaggcgcatatccgcttgacatcatcgtacatgcagatgagaaagcagcagcagttgcaggagcaaaagtagatgtggcagataaccagttcacagcagacaagatcgtaacagacttacagagccagttagcatccaaaccggacgcagtactgatgttctcagta

SEQ ID NO: 13204 - DNA, 14842 bp, Unknown
  gut microbiota DNA sequence
cttcccactcgtgtcctttctcacatctccaaatcactttcttatgagaaccaatagaaacctctgtcggttttatcttattctttttcgaccactgcttttccagtagcggctctaatgtcgccaaatcgttaatgcctgcaatcactcttgcaccggaacatatcgggcatttttctccattggaacgagccttaacgcttgtctgccattcgtgaccgcaagcacctttccaccatacctttttattcgagccgaaagttatgctgtccggtgtcagtggcaaattcttttccgaccactcggcaaccaattccggatgtactgccgctaagctgttactcatatcaaatcctctccttcctttggctttattatatgaagaaaaggtacttgccccaagtttgcgaatatgcggataaattaaaaaagccctttgagaaagggtattcctctctcaaagggagttaatcaaactgaaatttgtcgctttaatacccgtggtcaacatgttcccaattcccactgtcattcctaattagaatccatttccaatcatcatatgttgaatccggattaagcgaaccatccccgcctgatgagtctacatcgaaagatgataatattacgattgcttcatccgcgtcatattgttcagcccattcatcaaattcatcggcgtatgtatctccgggataggacagttttgtcagtgtgcagccgtcaaattcgttgccgaaatagtcttttactgtttggaaagccgcctcaatatcactgtctgaatatatttccgatggtttccaatcaggaatttgaacattgtcaatattcccaccactattctttccactacagccggcaagaacaaaaatcattatcaaagctgtcagaaaacagaataaagttttcctattcatttttcgatacctcctacgaattcaaattttcatccctacagactgaaatttattttttccttgtggttatacgaagtaacaagcatcctatcaaaaatccaacgagagtcccacaagtattcataatcacatcatctaactgtgcaaaccttccaataaatgtttgcaaaaattctataccaatcgaaaatactgctccaagtataacgccattccaccaatgcttgtggatattcttaaaaataaatactggcaaaaatccatatggaatgaatagacatatattcaaaatagttgccgcattaaatccatcctcaaataatttaaaactaatataactatcaagtggtgaggatattccaaaactaccaccaataattcctgtaatttttaatattgatacaactattagaatccataagaattgacataaccaatttaaaatcttaacttcaattttcttcttctggataaattcaatacccacttcgataatcataacacctgcaaaaataataagtgccattggaaataatctcactaatatccatattccagtccatatttccattgtaatataactcactatcattcctccataacttcaaatttgtcgttttcttttatccccattataactgttctccataaccactgcaatgaaaacctaatcggtgatttacatttctctctcttctaaaaatgggcaatcccattaaggactgcccattcattctgcttattatgcgattttttcttgcttgcaccgatttctgcatcaaatgatgtaagtttgatgtaaatcgctgttttttcagttttttatcaaatgaagtacgttccgtttatttggtaaaacggtacatctttacatcatcttaatagagctttgcacctgccggaatgtggtcatcaaccatcagaagatgaagcttttcttcgccttcttcttcgtgaatagcactgaggagcataccgcaagagtcaatgcccatcatagctctcggtggaagatttgtgatagcgataagagtctttccaaccagttcttccggctcgtaataagcgtgaataccgcttaaaatggttctgtctgtgcctgttccgtcatcaagagtgaactgtaacagttgctttgacttcggtactgcaacacactctttaacctttactgcacggaaatctgacttgctgaatgtatcaaagtctaccatttcctcaaacaaaggctcaatctttaccttagaaaaatcaatcttttcaggctctgctttcacttcttcagtagccttagattttacatcatttttcttatttacatcattcagggtcttcattgtcgggaagagtaatacatcacggattgccgggctgtttgtcatcatcataaccatacggtcgataccgaatccgataccacctgtaggcggcataccgatgcttaatgcgttcaggaagtcttcgtctgtgtggtttgcttcatcatcaccggcagcgaatgctttttcctgtgcctcgaaacgctctctctgatcgattggatcattcaactcggaataagcgtttgccatctcccatccgttcatgaagaactcgaaacgctctacataatccggattttccggttttttctttgttaacggagaaatctctaccgggtgatccatgatgaaagtcggctggatcaggtgctcctctacatactcctcgaagaagagatttaagatatcacctttctcatgacgctcctcatattcgatatgatgctcgtctgcaactttttttgcttcctcagtagaatgaatctcgttgaagtctacatttgcatactgttttacagcatcaaccattgtgatacgtgcaaacggtttagacagatccatggtgtgctcaccgtatgtgaggatctcggatccggttacttcctttgctacatgacggtacaggttctctgtcagatccatcatgccgtggtaatctgtatatgcctgatataactccatcagagtgaattccggattgtgacgggtatcaagtccctcattacggaatacacgaccgatctcgtatacacgctccataccgcctacgatcagacgtttcagatagagctccagagagatacggagtttcagatcttcgtttaatgcgttaaaatgtgtctcaaacggtcttgcagcggctccgcctgcgttggataccagcatcggtgtctcaacttccataaagccctgcccatccagataacgacggatactgctgatgattttggaacgtttgatgaatgtatcttttacttccgggttcatgatcaggtctacgtatctctgacgataacgtgtatctgtatctgtcagaccatggaatttctctggaagtacctgtaagctcttggaaagaagagttacctcagaagcatggatggaaatctctcctgtctttgtcttgaatacttcacctgtgataccaaggatatcacctacatcatattttttgaaatccgcataggattcctctccgatattatcgcgtgccacataagactgaatgcttccctgcaaatcctgtacgttgcagaaagaagcctttcccataacacgtttgaacatcatacgaccggcaatcgttacagtctgaccctctaatgcgtcaaaattgtctttgatctccatgctgtgatgtgttacatcatattttgtaatctgaaacggatcttttccacgttcctgaagatcctgcagtttctcacgacgaaccttcagaagctggttaacgtctacgtcctgtcctttcttttgttcagccattttcattctcccttttctcttaatttgatctctggatttccagtactttatactgtaaaacgcctgcctgtgtctctacatctacaatgtcaccgacttttgcaccaagtaatgcttttccaaccggagactcatttgagattttgcctttcagactgtttgcctcagtagaaccaacgatcttgtactcaagttcctcatcaaactcgcagtcaaggatacgaacctggcagccaacgctgatcttgtccagatctacctcatcctctacaacgacttctgcatgtcttaagattttctcgatctcttcaatacgggcttcgatatcacgctgctcgtcttttgctgcatcgtactcagcgttctctgataaatcaccctgctcacgtgcttctttgattttttgcgcgatctcttttctctttactacttttaattcctgtaattcgttctccagtttctgtaatccctggtaagtcaaaagatttttcttatccatgtttgttgatcctcctgatcgttttttatttatcattaattttgaagagttttatccactttcacaatcaatacattataaccaatcggtacttctatgtcaagattttgcatcttctcttcctcagtttgtacggcagtttcatgaatcttccaccggcgcttgtaaaaaggaacatataaaacctttggcatcagacggtctgtgtacatgatcccctgccgctccaggtcaagtaccacgtttgcatggctctcccgcatcgcatccagtggaaaaattctggtcatgagaccgtattccatctccagccagacggtaaaagacacaaaatcttccggtcggttcgtacagatttccagaaaattcaaccccggactcaactgtcgcaaaatctgatccacatcatcgtcctcgccaaatacctggtccggcgtatccgtgtcaatgatcagcggtttgaaatcgcgatataactgttttctggtcagtctgcctcccagttcttctttttcctcccggatcacatcctgtttctgccacaggatctgttctatgatactgcgggttgcaaaaatccatggattttctgtcgtttccggttccggatcatttggttgttcctgcacgttatgccgttttttcaaaatacggcaaaggtatgtccacatttttcggaagaagttttttattttgctgacttttcctgcacagttctgttctgccataatctgttttcccacatttcctgtttttgatcttcttacagtttatgtggaaaaagtcgttattatgatttttttactatttgtaatgtctatgttattataatctttttactatctataacgaaatttctactattgattctttatctgttccacttcatcgtatctgtttcagcatttctgtgacttgcatatcatttctttccatgcactttacgctatgcttcttctgccagccactgttccagcaatgcttccagctgtgcatagctttccacttcattgatcttcccgcgaagtttggaagaatttttataaccggcagtgtaccatgcggcatgtttgcggatctcacggatcccaatgtaatctcccttgatctgaagctgtaaacgggcatgtaaaagcatcatgtctgccacttcccggcggcttggtttcggcaactcttcaccagtctcaagctgatgctggatctgtttgaagatccatggatttccctgtgcaccacgtccgatcataaaaccgtcacatccggtctgttctttcatacgaaccacatcctgcgcacacaaaatatcaccgtttccgatgaccggaatggatactgcctcttttacctgacggataatatcccagtccgctttgccggaataatactgctgtctggttcttccatgtaccgctatcgccgccacgccacagctttccgcgatttttgcgatctccacggcattgacatgttcctcatcaaagccttttcgaattttcaccgtcaccggttttttcaccgcttttaccatcttggtcagaatctcttccaccagcttcggatctttcatcaatgccgatccctcatggttattcaccacttttggcaccggacagcccatattgaaatcaaggatctcaaagggacgctcctcgatctgcgctgccatagctgccagaatatccggatctgatccgaacaactgcagtgaaaccggatgttcctccggatgaatctccatcagtaattccgtatttttatttttataataaatcgcttttgcgctgaccatctccatgcacaaaagccctgcaccctgtctgcggcataacaaacgaaatggcaggtctgttacgcctgccatgggtgccagtactaaattgttctccagggttacattgcctattttcaatttattcatactgtactctttccgttttttcttctatttatccttgtatctacgcttgtttgttttacattttcaatgtatctgatctgagattctgcattttctgaaattactttttctgcttttccaagatcagactttcccaaaactactttttctgtttttcaaagatcagacgcatgccctgtaaggtaagcatcggatcataaatatcaatggcattggtctctttttcaataattcttccaagaccgccggttgccacaactttgatattctccttgccaaactcttttttcatctgtttgacaatgtattctgtctgtccgatctgaccatataccaatcctgcctgcatacatgcaatggtatcctgcgccagaatgctcttcggtttcttgatctcaaattccggcagtttggcagccatactccacatcgcctgcgcggaagtacggatacccggtgcgatcacacaagcggtaaaggtaccatctgaatctaccagatcaaaggtagttgccgtaccataatcaatcacgatcgccggtccaccatacagctcataaactgctgccgcatccacgatacggtctgcacctacctgacgtgggtttttggaagtcacacggattccggtctttacgccagcctcgataataattggttttgtattaaaatatttgatgatggcacttgtcagggaatgcataacgttcggtactacggatgcaacgatgacatctgtaatttctccaactttcacctgattatgctccagcagctcacacatcaccataccgtactcatctgaggtacgtgtctgaattgttgtcattcgaaatgtggtacgcagttttttcccttcaaatacacccagtgtgatatttgtattcccgatatctacggttaaaagcatttttccagtcctccactagctagttttcaacgtttatctgatgagtcactttataatacatttccagtgattccaacaattcctgctttgtgttctgcagctgtttcactttcagaacacttccaatctcatcatacagcaaatcaccctcatctgccgccgtctcaaagatcagttctccgtcttcatcaaatttcaaggtaagtgtaccgcctacatcttctgtatacaatacacacatcagtttcagttcatcctggattccctgcggtaatttctgaaaatccggattcagataatatttttttgtatatgcgctggatccacacagcactacttcttcctgattcataaatgatcattttctcctgttatctattcttctgtccagttcgtctattctggcaaacaaaggtacattcatcacacatatccatacacaccacgaacggatacttcaccggaggaaacatgggcagttccgtcttctgtctgtaccagaagctccccactctgattgattccctgcgcgacgccggtatactcctgccgcgggtcaagcacacgcacactgcgcccacggttgataagatgactgttatactcattcatcaaaccggacagatcctgtgttttcagataaagagcataatatttttcaaactctgccataatctttgcagccagttttgctctgctgatgcgcacacccgtcagcaaatacagggaggtagctgtcgcagccacttcctccggaaaaatttcattggaaacgttgattcccacgccgatcacaatatagttgatataatcgatctgtgcgctcatctctgtcagaatgccacagacttttttgccatcacatacgatatcgttcggccatttgatctgtgtgtcaattccaaccacatcttcaatgcccgcccggaccgcaagtgccatcacaagggtcagcatagaagcatttcccggttgaatatccggttttaacagcaaagtcataaaaataccttcgccggctttggaatcccaggaacgtccccggcgtccttttccagaagtctgacaatcgctgagcaccagcagaccgtgctctgcaccttcttctgccagccgttttgcctgattgttggtagaatcggtctcatcaaacaccaccagatgctgtcccgcccagtctgtttccagatatttttgaagctgttcttccgtcagcagatccggttcttcttttaaccgatagcctttgtttctcactgcttcaatcacatatccttctgcttctagctgacggattgctttccataccgctgtgcgggatacaccaaatttttcactgatttcctgtccggatataaaatcctgacaattctgcaaaagttccagaattttctttttcacagttttctccatcctatcatacagttcataccgtacgtattctgtcttgtcttctattggatattcaatcagatatgctcaacgaagacaacgtacttttttatatttggtcaattcagagcatacgctccatacggatgattatttctcagctccgccaagggttgcatacataaccgctttgatggtatgcatacggttctcagcctcatcgaacacgatagactgcgggctttcgaatacctcatctgttacttccattgcatccagaccaaatttgtcatggatctcttttccgatctttgtattcagatcatggaatgccggcagacaatgcatgaattttacctgcggtcctgcattttccattaattttgcatttacctgatatggtgtcagctcctcgatacggcttgcccatacatcatccggctcacccatggatacccatacatctgtatagataacatctgcacctttggttcctgccattgcatcctctgtcaaagtgatggttgcacctgtctcctctgcgatggcacggcactgagcaactaattcctcattcgggaaatattttttatttgtgcatgcagtaaaatgcataccaagtttcgcacatacgaccatcagagaatttcccatattataacgggcatcgcccatgtatgcaagtttaattccttttaaatgtccaaaatgctctttgatggtgagcatgtctgcgatcatctgtgtcggatggaactcattggtcagaccgttccataccggaacacctgcatattttgcaagttcctcaacgatctcctgatcgaagccacgatactcgataccatcgtacatacgtccaagaacgcgtgcagtatctgcaatgctttcttttttaccgatctgggaagcagacgggtcaaggaatgttgtatgcataccaagatcaaaggctgctacttcaaaagagcaacgggtacgtgtactatttttttcaaaaatcagggcaatgtttttgcctgtcagtacatcgtgacgaataccttttttctttttctctttcagctctgcggataagtcaatcagatatgtaatctcttccggtgtgaaatccagtaattttaaaaagttttttcctgttaaattcatttcttttttacctctcagtttattatcattcagctttttctattttctgctgtaaaaaatcgcatcttgcctgtgtttcttcgacagaaaatggtaaaacaccttctgtcatgtaaaaactcatgtcaaaggatatgcgcaatccgcctacgctacttgcttgatttgattaaaaacagggctgccgtgcgggcagcccatgttactattcttacttttcttttacatctgctgctacttctaccagagatttggcaagtcctgccataccctgaatttctgacggaataataatctttgttgctttgccgtctgctgcttttgcaaatgcctccaaactcttgatctgaagaactgctgcatccggagaagcctctttcaggaagcggagaccatcggcgtttgcctgctggatcttcagaatcgcttctgcctgaccttctgcttctttgacggttgcttcacgttttgcctctgcacgaaggattgctgcctgtttctcagcctccgcatccagaattgcagattctttcttaccttctgcaaccagaatggtggatttcttctcaccttctgcacgaaggattgcctcacgacgttcacgctcagccttcatctgtttttccatcgcatcctgaatggcctgcggcggaatgatgtttttcagctctacacggtttactttgattccccatggatctgttgcgatatccagagaagctctcatttttgtattgatggtctctctggaagtgagtgtctcatccagctccagatcaccgatgatatttctcaatgttgttgctgtcagattttcaatcgccatgatcggattttccacaccataggaaaacagcttcggatctgtgatctggaaaaatacgacagtatcaattcgcatggtaacgttatcttttgtaataaccggctgcggtgcgaaatcaacaacctgctcttttaacagaactctttttgccacacggtcgatgatcggcattttgaaatgaataccaacctcccaggttccctgatatgcgcccagacgctctacaacatatgcgttcgcctgaggtacaatcttgatgcatgatgccaggatcaagataactactacgattagaataataattgcaatcactatattgccctcctttacacgttcaaaaagaatatgtctgctttaggtaatcggatttcaggaatgtcacaactctcttactgcaaaatacgcatcatgtagcacatgacatatgcctcccaattactccggacacttaaccatcagttttaccccgctgatagaaacaacgcttacaacgtcatcctttttgaatttttgcttttcatccacacttcttgctgcccattcctgaccgcgtatcatcacacgtccggttgacagaagattatcaatcggttctattacgactgcttcttctccgatcagtgtctgtgcatttgtgcgaatgtgctcagaattgaattttttctgagccagtggtcggatcagcagaaccaataccaacgacacaatcagaaacacgattacctgtacagcgactccaccctgagccacgctaacaaaaaatgctgccagtgcaccgcctgcaaaccagatggtcagcaatcccacggtcgcgatctcgagcaggataaatgctaccagaagaaccagccatatcattggcgctgataatgaaaacatgtcgatcccccttttccttgttttcaccaatatactatattttctcccgttttacaataataatcacaaaaagagagaccacattcttgccgttttccggcaatttttgtagtctctctgtataaagcacggtaattcttaaaaagaatatagcaacttctgttgactaatatcacgcaccaggtctcgctcacgtccaacctgaattgcataaattgttccgcctatagcttttcttaatagaaaatctgtgatccgatcactgtaccggatccgcttgttcctgcatggaaatattttgctccgcctgtattatctgcaccacttaatgcttctgctgctgcctgataacaactggatgagatatttccgctgcttaatactcttgcaagctttccactggaagccggtgtaaactgaccgctctggtagataacaccggaaatgctgttcgggaaagatccgctttttacacggttcatgacaacagctccaactgcaagctgaccggaatacggttctccgcctgcctcacactggatgatggctgccagaagctgtgtgtcactggaagaagcgctaactgcttcagagcttgttgtaactgctgcactgtctgagcctgagttgctgtttcctgcctgagctgctgcttcctgtgctgctttctgagcggcagctgcttctcttgcacggatttcttccatgcttacggcatcgtcaatatttaatgcaacgtctacatagtctgctgcaacatatgcagttgttccgttgcagtctacggaaacccatccgtcaacttcctctgcatctgtgtttactgtcagagatgcgccggaatcgatgacgtcaagaatttttgcatctgtgttggatgcctcacgaacacggataccatctgcattcgcggttgcctttgtctcacagttttcttctgcataagtgtgagcatcttcgccaaatacacaatatgcattatttacataaccttctacgtctccggattttaccttggtccattcatcaccggtctcaagtacttccgcaccggagcctgcataaaattttccaactacttccgcatccgcagatgcttcttttcgtatattcaatgaactgtctttatcaactgttaccagcattttgtctgcccactcagcagcttctgccgctgcctgtgcgttctgttgtatgatctgaacagactgaactcctgtgcttgccgcctggcttacacggtctgccacatttgcatttactgtagcgctctccgtcgtggttcctgtctcagcagcacttgcagaaacggctgttgtgacggatgtgagtgccagagctgctgtaataattccgctttcaataacctttctaaatttcatttgacctcctgattcaaacctttacaaaattgcccgtaaaaatttgttaattgattttataatttgttttgtgttagtattacaattccaattactaattatgcatttctgttaaatttgttacagaattgttacacaaacgttgcacgcattataacaacccattttcaggatgtcaaccctatttttcactttttgtgcactttttacccattttttccttgaaaaaagatgatttttataccaaattgcacatttttgtgcacttttttgggattccatcatctttttcaaaatacaatttattacatcatttacggaaacatttcctgtatgacactgccaaataattcttcctctgactttgttacagcatgtcctctttttgcacttgtttccggttcttttcttatgtatttttcacgatctctgccactgtctgttgctctctgactcatggcaattttcattacatcttttgatttttccgtcagacggatgatctgttttctgcatcgacgcacccctgccagattgattatcatcagtaccacaatacaccccagaatacccagaatcagctctgtcgtatgctgtgtatatatcatttctgcaaaatgaatcagtcgatccatttcacgcctccttcccgtcatggatcctgttcatgacatttttgttacatagcaagtgtaacaaaaacatacactttagaaaaggggctttgcggctcttttcgccgcaagtttcgacctgtttcttcctattataatatttttccagtttttaatacttaactgatcaattttcatcaaaaaccggaagttaatcaactcgtagagatgattctgaaacagaaaattctctccttctaagaaaatctgctattactgaacacttacagaaatggcggctcaattctgtaagtgttgaatcccttttttgacgaagagaaatacttgtcaccccatgggaataggtgtatatttgtaagaaatgaagtcagatatctgaaacagaaaggattcatcatatgaaaaaaatcattctcaccggcggtggtactgccggacatgttacaccaaatattgcgcttcttccgcgcctgaaagaactgggttatgacatttcctacatcggttcttatgcaggcatggaaaaaggactgatcgaacagcagaatatcccgtattacggcatttcttccggaaaactgcgccgttattttgatccgaaaaacttctctgatccatttaaagtaatgaagggatattttcaggcaagagccctgatgcgcaaattaaaaccggatattgtattctccaaaggcggatttgtcagtgttccggtggttctggcagcaaaacatgccaaagtgccgacgatcatccatgaatctgatattactccgggacttgccaaccgtatcgcgatcccggcagcaagccgtgtatgctgtaacttcccggaaacaattccacatctgccggaaggaaaagctgtattgtccggttctccgatccgtgcagagctacttcacggaagcaaagaagctgcttatacatacactggtctcaacagtgaaaaaccggtcattcttgtagttggcggaagttccggttccaaagtcattaacgatactgtccgcagtattcttccggaactgctgaaaaattatcaggtgatccatctgtgtggaaaaggaaatctggatgcttccctgaataacacagccggttatgtacaatatgaatatgcaaacaaagagctggcagatatgtttgccgttgcagaacttgtaatctcccgtgcaggtgctaactctatctgcgaattgctggcattacgtaaaccaaatattctggttccgttatccaaaaatgcaagccgtggcgatcagattctgaatgcaaattcttttgaaaaacagggattcagctatgtgatcgaagaagaagcgttgtctgatcagacactgactgatgcgattcatactgtatgggaaaaacgcaaggattatattcatgcaatggaaagcagtgatcagatggatgcggttacaacgatcacagatttgattgaaaaacttcggaaacattagatcttgtttggtgtggcttatttgtgtggcttatttgtgtggctggtagtgtaaat

SEQ ID NO: 13205 - DNA, 194 bp, Unknown
  gut microbiota DNA sequence
tattttaccttcaagcagatgctgaaaaagatggatgtgaaggaactccccgagcattcaccaggaacactgcctaatcatgaaaatatcagaggaaaggactactataagtaagggtgacgtactatggcatacagattaaaagactatctttataacgataaactcacaaaggaacagaacatactcatgga

SEQ ID NO: 13206 - DNA, 554 bp, Unknown
  gut microbiota DNA sequence
aaaaagttgataccatccggatactggaatctgagagattataatagttgccttgcggcagtctctggactcgatgatttcaaacaagtcgcggcatttttcaatgtccagatccattaaaccgaaatcatctatcaccatgagatcataagctgccatttcattcgaatactcaaagtaagtaccttcctgtctggcatgatcggattcctttaaaagtgtgttcgcacgtatatatttaacagtacgattctgatgcattgctgtgatacataaggcgcaggcgatgtgtgttttcccagcaccagctcctccggtcatcagcaggttattcggttcatcgatccaatcacacttggccagaagttctatgacgtgtgtattcagctgacgttctggatcatagattgaactgtcaagatcagctgcaggatatttcagagatgctttcttcatgagacgtttaaactttttactctcacgctgatcccactcctgatttacaatagcagcaaagcggacttcaaatggttcgagacctgtgtttggttcca

SEQ ID NO: 13207 - DNA, 1321 bp, Unknown
  gut microbiota DNA sequence
cgccattcgtgcggaggacattgcaaagggcgtgttcgtccctgtcagcagtttaccgcaaagggagccgatgaaaggagtacaaacagcatgaatatcacttacacacagaacggcgattatcttatcccaaacatcattatccgcaagaccaagcccctcggacactacggcagacttcgcaaggcgtatctggaaatgcaccgcccgatactgttcaatgagctggtgctatccgacaagctctttgagcattgcgccgagattgacgaagcggcacgaaaccgcatggagctgatcgtgcagtcactggcagagcaaaacggcgtgaccgagcaactgaaagccgaaaaccaaatggaatgggtgcggcagatgaacgcttgcaaggcacaggcagaggaagttgtgaaagcggaattgatatacgattgagcgaggaagtccgggcagaaaactgttcggacttttctcatatagtccaaagttgcggtagaattgttcacaagttttatggtataatttgaatatgaaaattgagcaacaaattggaagttataggggtagaatatgaatgatatgcaacaaaaatttttcaaacatattgcagcaatacaagaaagttgtgttgaaatttgtttgactgaacacaaaaagtaccatgataacgaagccagagcgatgttgtatgatgtaacctatgaatttgctgttgaaattatggagatgattgacggttattcggggtatagttctgataagcatgatattatcaatacagtcacaggtaaacatctgaaagaaaatccatttattgaattacacgaccagttagatgagataatgaaacattaaacttgcagcttccggtttgtcgaactgataaaatccctttaggaactaaagggcgcacttctatactctcctatcgggagtatgtgcgtcctgcggagcttcattcccagtcagcagaagaaaactgcccgaccgagaatgtttcgtcacttcgttccgtcaagggagctacactcccttgcgccgcttatgcggctatcccttgtggacttgccgtctgcaaacagcataaaatgctgttcgccgccagcaaggtttataaattgcatcaatatctatcagtcaaatggtgagcaagaaaggatgatttacatgaaaaaaatgtttatactggttatggcagttatgctctgtttcacactaactgcttgcaatgaagaagaaaatatcgactttccttttgaattgtccagtatcgaaaatgtggaaatgttccgcttcactaatcctgcggatgcggagaaaa

SEQ ID NO: 13208 - DNA, 2530 bp, Unknown
  gut microbiota DNA sequence
atttcttccatccgcttgaacgaggaagaacgcaaggctgaagtgttcttgaaacccgaagaggtgtcgctggctatcggtaaaggcggtttgaatatcaagcttgccagtatgttgactgagtacaccatcgacgtgttccgtgagttggatgaggccatagaggatgaagacatctacttggacgaattccgtgatgaaatagacggttgggttatcgatgccatcaaggctatcggtatcgatacggctaaggctgtgttgaacgctccccgtgagatgttgattgagaagacggacctcgaagaagagacggtggacgaggtattgcgcattttgaaacaggagtttgaagaggaggagcagtaatgtggtaatgtgggtaatatgctaatgtgccaatgcagatagcatatcggatgaagtgcacactccttttttctcagccaattagcacattagcatattggcacattaattcattaaattagtatgacgataaggttaaacaaagtaacaagagatttaaatgtagggattacgacggctgtcgagttcctgcaaaagaagggatttaccgttgaggcaaatccgaacacaaaaattacggatgaacagttcgaactgctcaaaaaggagtttagtacagataaggaccttaagataaagtcggagcgtttcagccaggaacgtcagagcaaggaccgcaacaaggcgtccgtgtctattgacggctataaggaaacgcaggagaaagcgaagcccgaggagattaagacggttgttccggaagacgcacgtccgaagttcaagccggtaggcaagattgatttggacaaactgaaccgtagacctgctcctgctcaggaaaaagagaaagaagcggaaaaagcggtagaggagaagaaggtggaggaaccggtagttgtagaaacgccgaaaccggaacctgctccccaaccggaaccacagccgcaaccggaggtacagccggcatctgagcccgagccgcagcctgtttcggaaccgcagccacaacccgttgtcaaggaagagcctgctccggttgtagaggctcaacaagaatctaaaaaggaagaaatgatagaagcgcctgctcccgcaccggtggctgaagaagcaccggctgaaaaagaggggaaagaagaaggagaagaaatcttcaagatacatcagcctgagtttgtttcgaagattaatgtcatcggacagatagacttggcggccttgaaccaatccacacgcccgaagaagaaatcgaaagaggagaaacgcaaggagcgtgaagagaaggaaaagattcgccaggatcagaagaagcagatgaaggaagctatcatcaaggaaatccgccgtgatgacagcaagttgaaggataccgctgccggcgatgccaacggcaagaagaaacgtgtccgtatcaataaggagaaagtggacatcaacaatgcttccaacttccagcgtggtggcaacgaccgtggacacgcaggtgcccagcaaggtcagggtgcccgcccgcaaggtggaaaccagcctggtggaaacaatgccaataataaccgcaaccgcaataaggaccgcttcaagaagccggtcatcaagcaggaggttagcgaggaagatgtagcaaagcaggtaaaggaaactttggcacgcctcacttccaaaggaaagaacaaaggtgccaagtatcgtaaggaaaaacgtgacatggcttccagccgtatgcaggaattggaagacatggaaatggcagaaagcaaggtactgaagattacggaattcgtgacggccaacgagttggcaagcatgatggatgtttctgttactcaggtcatcgccacttgtatgagcattggtatgatggtatccatcaaccagcgtctggatgccgagaccatcaacctggtggctgaggaattcggcttcaagacagaatatgtaagcgcagaagtggcgcaggccatcgtagaggaagaggatgatgaggaagatttggaacctcgcgctccgattgtaacggtgatgggtcacgtagaccacggtaagacttcattgctcgactatatccgtaaggcgaatgtgattgccggtgaagcgggtggtatcacacagcacatcggtgcctaccacgtgtcactggacgacggacgtaagattacattcctcgatactccgggccacgaggcgtttaccgccatgcgtgcccgtggtgccaaagctacggatattgccatcatcattgtggctgctgacgacaacgtgatgccgcagacaaaggaagccatcaaccatgccatggctgcgggtgttcctattgtatttgcaatcaataagattgataaaccgactgccaaccccgacaagattaaggaagagctggctgccatgaacttcctggtggaagagtggggcggtaagtatcagtcgcaagatatctctgccaaaaagggtatcggtgtacccgagttgatggagaaagtgctgctcgaagcagaaatgctgg

SEQ ID NO: 13209 - DNA, 1010 bp, Unknown
  gut microbiota DNA sequence
aactaaaaaagatatttccttctttttccatgtgttaaaatgatgctagcatacatctgggaggttagaattaaattatggatcaacagtacataaattcaattgtagatatgatagagtcatcgaatttgcgtttgcgttcagtagaaatcaggccggtatgctatgatgatgacacttctttaaaatcgacagtatctattatacattcggatattattggagaacgttccagattcgttaataccgatttagttgcgaatcttttgatttttaccgcatttgatggatttgtggaaaacaaatattcgttaccggaaggggaaagctttaaacggcattatgagattttgccagaaagcacagatatggaaaagatacaaaagaattgctatcgaatactgaaattaatgagaaatgctatgcaacataatttgagtggtgtgaccataggtccgcaggaatatgtttttagttattccaacagaaatacagtatttcaacttgaaatatccagagctgcagtggagtatttatattctataattcttaatttgataaaaggacaagtatatgggctaataacgttgggacactatgaagaaacgttaaaagagttttataaacgaatgttgtctgggattgtagtgctggaagatgagtttggaacaggagtttcaaatcagatttctggtatgctacaagggtttcgggttggggttcggtatccactggagaatccacggttctataaggaaacagaagatgaagtgatttttttgttttatgagactggtagtcagaaatatgccgtggattatatgtattatttgagagataattgttatgtgctgccggaagaattgggaagaatttttgatgaggaatcggtgaaatttattggatttcagaaaagcttgctgattgagagatggaagaaagtagatgatttttagtagcggaaacgtaaagtaaaaatcgaagcgtatggtatgttttgaaatttgttt

SEQ ID NO: 13210 - DNA, 13313 bp, Unknown
  gut microbiota DNA sequence
ctggtcgttttgtcttgcacgctaacaatcgcttagcaagaaaaaacggccagatttctttatttacgttgtgtgtatcactcattactatgatgattttgaaatcaaatatacttattttccttctgttccggcttcatactggctttcctccagatgattctgttttatatagaccgcttgtttctgataccgcgtccagagcatcctgttcatgcttcagatgcatcagacatattcggtaaatcatatcgcaattgcgctgataaaccgcttccatctgcgcttttgtaagtacactcattatcccctgactcctttcactactaacacgactgtgaattgcattttgtccattaataaaaaaattttcttaaacaaaaaagccgtgtacaacagacaatcattatctgttctacacgacttttttatgagcatcccgcttcgaattgcaatcccagacgttactcttacagccaactcatcccaggcaccctcacggcacacaagaggtcctacttagggctgctccattcctgacctgacccggttcataagttcctgttgcgtgagacccaaaaatctacgtcgcttataagaggcagctctacaattgacaaccctctacgggatatcaccccaactatagcggattgatggtacaaggtaccgctaccaccccggctgctcagtttctaagtatatcatcaggtgttggtaactgtcaacagattttccttcattcactctatccatttttcttttgttttttctttttccgtaattctttaaaaaagctgctcagcatagaagaacattcttcctggcagacaccctgcacaatttccacctgatgattaaatcctgcgatctgaagcaggttcagaaccgatccggcacagcctgctttcggattcatgcttccgatcaccacgcgatcgatccgcgactgtaccagtgccccggcacacatctgacatggttccaatgtcacatacattgtacagccttccagcctccagtctcccagttttttgctcgccttgcggattgcatttaattccgcatgggataaggtatttttgtctgtgtttcgacggttgtaaccacgggcaatgattttgccgtctgcatcatttacaatgacgcagccaatgggtacttcatcgatggcatatgccttttttgcctgttttatggcttgtttcatgtatttttcatctacagtcattactatatccttttcattcctaagatacaaatattctacccgaaaaagctacatgaggcaattcataaaattcacattcttttgggcagattggtttatataacggatctgccacgataatttttgcatctttcaatgcttcttccatggctttttcgccaaggacaatagcgtctttttctccgattaaatcttcgcattcttttaacggacacagtacacgggttgaacgtccatatgttttttcaatgccagctgccagagagcccatggtgacaggctcaccgatcagggtgatttcgacgtctttctgcatgcgattgttcagatatacgatgatcgaacttctttcctgttcctctacttgttccaatgctttagaaatatcctctgccagccattcatttggtgttccgatcacatacggtgttccaaatttttcctggagcacttttgctgcccgcagtccaaccacagacgctaccaagttgacattcgctgcttctgccatttgcagggtttccaatgcatcgcccatcgcccaggtggaaaaaacattccaaccatatttgtgcagattttctttcaggagttctacgtttttctgtggtccaaaatctaacggcgttacacctaacaagtttacactacgtccaaatttgttttccttttccagcgaattcaaattctgtgttttttccgtaaaccgttttgcgatttcttccagcgcaatacctgcgccgtacacataatcgtgcataccattcgttggcacagcaaacgtcggaatcccggtttctgtctcaatcactcttgcgatcgccggaaaatcggttccattcataaaaggaatcggagaacctgcaagtgcaataaatttcggatgcagttctctggcggcatgttcgatatcatcaataaatttccggtcatttcccatgatcgcatcaatttccgtaagacctgagataaagatcagactgtcctgatcgtaccagcggatttcatcgtgtgtattgtaagtagaattacatccggaaggatcgtgcatgactgtcattccgcccagctcgtacaatgcggaacaaacgccggacacatctgccgtataaattggtatgattcgataagattgtctcataggcagcactcgcacccccatcccttttgtactacaagtttttccgtgtctttttcctcgcggtatgcttccatcatcagttcggcggttctgcggatactgtcaaatccatacagaccttcgccctgcaccagattgacaaaatgacggctgcgactgaaatatgccgctttctgtccgatggcaagcacttcctgttcgccgcctcttggcagcacgcgcattttcacctgaatcgttgcgatcaattccagttccggtacatgttcctgcagccagtcaaatgctgctttttcctccggactgatgccatccagatacaccgctttgacgttaaatccatgcgtcagaagcagttttgccagtcccagcggtcgcggatgatacagataatccagcgtgatcggcatatctttgatcagcgctttcgcttttgccagaacttcctcacaggcagaacgttccacatccagtgcctccctgctcacttctggaagtcccaatgcatctgtcagttgctttaactgctgctcaatttcttcataatcaaaactgcccggcagatacagatgcttccgtgctaaccgctgcgcctgcgtctccatgccatattttcccgccggataaatgtcaagaaacaatcttcccttactcatatccaacaggtcctgccacgtttcacaggttggaagttcccgcacggtataaccatatcgtctcaataaacgcttgatatcactgctttcatccaatgcaaaatcactgccaaacaccgatactgtttttgcatccggctcacattccggcaacggatcatacatggcttttcgcagcttctgatccggcgtcagaccatgtttttgcatgatcggatccatgtaacagcggataaaacaaatatccgggaaacggcgttccagctcgtcataaatataattcagattgcttcccacaaaatggtgcagacatactgtaaacagcaaaactgcttttggatgatctccacgcttgttcaacacgtccgttacaccttcaatcgtgatgtcctctaaattgccgtttaaaacatgctgttcttccacaatgacaaaagaaaaacgatctgccgcgttcatttccgccgctgtcagcacaacgccgcgcatgcagttgtccgcgcagacataaatctgaattgcctctggaacctgcattcccgtatgtacgatgttccagttgccatgaaccggtgaattgtactccagttctgaggcaaatggtgcaggaaaggatgcgtctttgatttttaccacagcgtcctttggatctactgtttcacctactcgctgcaacatctaagtttcctcctgtaatacgccaccacataagatgtacatctttctagcaatcgtacgatattcctctgccatagcactttccggataacattccatcaatgtcatcccctgttcttctgccaatgccacctgctcgctgtgggataacgttccaatcacctttgtatgaaaatcgtctgccagttctgccactttttcttcttctcgcggaacatcccggcgatttaaaataattccgccaagctgtgcataaccacggtttttaaaattatctactgccatggcaatatttgccgccgcgtgaatcgccatattttctccggaagtaatgataaacaccttgtctgcgtaaccgtttcgcatcggcatggaaaatccgccacagactacgtctccaagcacatcatataaaatgacatccggcttgtatacatcatacgccccggtttcttttaatttttccagtgccgtgataatgccgcgaccggcgcagccaagtcccggtgtcggtccacctgcttccacgcagattacaccgttgtagccaatgcagatcatatcctccagctgcaacgcctgttttttctcattatataaatccagtacggtaggaactgcttccccgtgacgaagctgaatcgtggaatctgcttttggatcgcaaccgatctgcatcaccgtcaagcccagttctgccagtgctgttgccacgttggaaactgtggtggattttccgattccgccttttccgtatactgctatcttgatcactgttctgctccttcctctgccggagtgatgacattggagtacgcggttttcgcggatactccttttaaacgcccgatttttccggaaagtgcgctgatggtattttgcggcgcatcaatggcaatactgatgatgctgatgcccttcgggcgatatgggatgcccattctgcctacaatgtactggcgcgcttcgtgaagcattgcatttaattcttcgatggcgtcttcctgctctacaataattgaaataaccgccactctggtgtccatgtctggtttcctccttttctggctgataatttattttttgaagcgcatgaaagcagagaaaactgcaacggaaattgctctaccgtcttgcgttgcagttttcttctgctcttcattgcgcattcacaaaatgactttctagcaaattcttggaagtagctcgccacccggctgcggcaacaatgcctgtgtaccgatctctgtctccattacgactctgcccggctcatcggcaataacttctccgataatcgctgcatctgcggaatacgggcatttgcgtaatgtttccacaatggcatctgcctcttccttcggtgccatgatgacaagtctgccctcgcatgcaaggtataacggctccagtccaagcattccgcaaactccttttacttccggctgtaccggaacagctgctgcattcagacggattcccacattgctctgtcctgcaatttcatataaaacggttccgacaccgcctcttgtggcatcgcggatgacatgcagattgtgtgtagtgtccattacagcttttacagttccccataacggtgcacagtcactggtcacatccgcatcaataccaaaatcttctctctctaataaaatggtgcatccatgacgtccgatatcaccggttacaatgatagcatctcccggttttgccagctcgccgccaacagttacaccttcctgaatctcgcccattcctgtggttgtgataaagacgccgtccacttgaccttttccggctacttttgtgtctccggatacgatatgtacgccagcttcttttgctgttttttccattgctgctgcaatctcttccagtttttccatcggaaagccttcctcaatgacaaaggcgcaggtcagatacagcggttttgcacccatgcaggcaaggtcattgacggttccacagatggacagttttccgatatttccacccgggaaaaatgccggggacacgataaatccgtctgtggatactgccattcttcctgctggcggaaccaataccgccgcatcgtctgcggtcagatcggagtttgcaaaatgtgctttaaacacctgatcgatcagttcagatgtctgttttcccccggcaccatgtgccattgtaactgttttattttccattattttttccttctttctactactttcataacaaacgatttgtgccaagagagaaacaaatctattattttcaagaatattgatagtatgcggagcaggctccctcgccagataccatgcaggctcctaccggatgctgcggtgtacagccttttccgaacactttacaatcggatggtttgcattttccctgtaatacgtctccgcagcgacatgcaggatttggttttccttcgatttttggcatctgatatttgatacgggcatcaaaattctgccactctggtcgtaacttcattccagacgccggaatcacgcccaatccacgccattcggaatcacatgcttccatcatttcatctaccagaacctgcgcttctttgcttccatcctgtgtcaccacacgcggataacagtttacgaaaaacggctttccttcctggaattttaccagtgaaaccgccagcgctgtcatcagttcccttgcggtaaatcctgccacaacaccgctgacgccttcctcggtcagcgcttcgcataaacgtgttcctgtgatggcattgacatgtcccggatataaaaatacatctgcgctgccctttaatgcctcgtaagcctgcggcatggtcttatttgcaaccagtaaagaatagttgtccagaccatcttcttttgccgcttttacggacagacaccccgccggtgtcgttgtctcaaatccaacggataaaaatgttacctgctcttccggatgctccttcgcatatttttcagcatctgccggtgaatatacaatgtggatttttgcgccctgttctctggctcccgcaaggctcatctttgtacccggcacgcgcaccagatcaccaaacgtacagattgtcacgcctttttccagtgccagataaatcgcctcatcaataaagctgactggtgttacacagaccggacatcccggtcctgagatcaattccacctgctccggcagcaattttcggatacccagacggaaaatttcatgagtgtgggtgccacacacttccatgatccgcactttcggaccattgtaattttcaatgatctcacgggcagttttctttttattttcgctgtttgtctcccccattacagaaattcctccatgagctggtctgtttcgttatcatcctcatcggtgatctttgcgattgccacaccggcatgaaccataacgtaatctcccggctccagatcttccagaagctgagaggaaacttctctttttgcaccgccagcgtcaatgacagccgttccattactgatttttactacctttgctgataatcctacacacatttattttccctcctaaaaatgcaattatttgtcattgcatatataaatgttaaatatctttttgtaaccaatgcattccgtaagctgcctgtccgatggcaattccaccatcgtttggcggaatcatacgatggcgcaacacctcaaaaccttccttcatcaagcgttcttctgtcaaatgcagcaataatcggttctgaaatacaccaccactcaaagcaaccttatttctaccggaactttttcgtgcttctatacaagctgccacaatttgttctgccaacatctgatgaaagagataagccaatgctccactgtctgcaccttgcaattttgcttctacaattttctgcaccagtgcttccgtattcaacacacacgatacttcagattcagatacaacctcagattcttctcctgttttttgttctacaagatatttccgcaatgtatttaatgcatttatgattattgtatctgtaaacaaattctctgcatcattttcatctgctgactttgcaattacatccgatccactgctctgttttgcgttttctgccagtctgtttttctgctcaaatgcctctgccgcaaactgcaatgccgtagatgcctcgccctcaaaactcgactgccgtcggattcccaaaattgcgctgaccgcatcaaaaacccgtcctgcgctggttgacattactgcattgatctttcgttccgccattgtaaactgcaccttgctttcctgttcgctgcaaagcctcagtttttcaatgatctcccatgctttcgcccggtcttttgtatatccatagatcatggaaacagcgatacgccatccctcttttgcagaagcgtctccaccaatctgtaaaaacggtgtaatgctgccaaatctcgtaaaatcctgataatccgccagcaaaatctctccgccccagatcgtaccatccgttccgtacccagttccgtcaaaggaaactccaatgaccggctcctgacagtcattttccgtcatgcaggataaaatatgtgcataatgatgctgcacctgaagcatcggatagccaagactttctgccacaaccgtagaattgtatttcggatgcagatcacaaacgactacctgcggctccacttccaataatgtctgaaaccggtgaatcgtctcctgcaaagcttttaccgtccgcagatcttccagatctcccacatatggagagggataaaaacgactgtccacaccgatgcaaaacgtatttttcaactcaccgccaaccgcaagcacctgccctttccagtccactgatgtcataaacggcaacggtgcgtaacctcgggaacgccgaatcatatacggttcatttttataaaaatccatgactgtgtcatcggcacgaatccgaatttttcgattgtgagataaaatggcatcgcacaaatgagataactctgcgaccgcttcctcatcatcccgacagatcggcgcaccggaagtatttccgcttgtcatcaccagtaaatccggcattttgatttcatcatcatactgaaaaatcaataactgaaccggtgcataaggaagcatcacaccaactttcggatttcccggtgccacagacggagcaagtcgtgtctcagatgcattttccagttttagttctttatccaactgtagttgattttctaacgaacctgttttactacccgcttctatatctataacaggattcgtatttcccaactccagttgtttttctcctgtcatttgcacatctgggtgtctgtccagcagcatgatcggcttctgatgcccggtcagaatcgcttcctgctctggtgtcacaatacattcccgctttaccacagtttcatcttttgccataatcgcaaaaggtttcgccggacgacgttttaacatacgcaaacgactgaccgcttcctcatttgttgcatcacagcacaaatgaaaaccaccgattcccttgattgccacgattccaccatcgtgaatcacctgtcgcgtatacgtaatagcctccctgccacgctcggctctgccgatcagatacacctccggaccacactcattgcagcacaccggctgcgcatcgtaacgccgcgtctccggatcataatattctttcgcacaatccgggcacatcggaaactccttcatgctggtacgttcccgatcgtacggcagcgaatccagaattgtcaaccgcggtccgcagcaggtacagttgataaacggatgcaaataccgccgatctttcggattgtacatttcttccttacactcatcacagatggcaatatctggagaaacaaaaatctcgccttttgtcttttcactctcgataatgtcaaaagcatcaaactgcggtgcatcctctgccgaaatatcctctgtatttatttttaaaatcgccgctcgtttcggtggacgttcctctaaatctttcagaaatccatctacctgatcaacggaaccctgcgcataaatttccacatacggtcctttattacagacatttccacgaatcccgtttgatgtcgcatggcggctcaccgttgggcgaaaaccaaccccctgaacgataccgtaaactcggattcgccgtgttatttcactcatttctactttcttctcctgtttgacttgaaatattcatatacacttggcattacattaatgccgtgcagaaaattgttcgtgtccgaatgcatgtgtacaaccatattaattatgcatggggcacaatctcccgttacgccagtcgaccagacactgcaaaatgcaccgtatccacgaatatcccctcaaacttcggcgtcatccgctccatacaatgatccgcatagatcacatcaaaatcgccattttccaccagctcgatataatcatcctcatcccgcaaatgcagatctccatcctgccgaagttcgggcttcatcataaaccagcttgccaccgtcacctgcgcatccggcgcttttttcaaaatttcttcccggattgtatttccgattacctgctgctgcacaaccagcacctttttcccgctgtaatccatatcagaaaccagttcatccaccaacggataaccgatctcatacggtgttccgaaagttctctccagatattttgctgcttctaacgccgccggtgccaccacgatatgtttttccacattagatacggtttttacatcatccaatccatttcccataccgtaacaaatggcattttttccttctgccgcaaaacgctcccggatgcggtctgccgcacgcagatcactgatatcctgcggtgtcatgccaaggattccgatatttcccggaaccatttcttctttttccccggcaaacacacgaaacagctccagccatgcttttgcgctgcctttgtcatacagttccataccatcagtgtccaccgtcaaaatcggcagatccacttttttctccgtcatacgctttaacgcatgataatccgttccgatgacagccggaaccggcgttccaatgatcgccgcaaattttgcatccagctttgtcaccgcatccgcaagttttgccaccagacggtcatctctgccaagaatcgcatccatatcgcgaagccctgcgctgaacagtgcacttttgctctcaaaccagcgcggctcatcgaatccacagatatttccggtacagccgccggcatcacagattacgataattccgccaaattcatataacacagacaccgcgccggactgatccggtgcaaaaggtgtcagatattttctcagtcctctcattgctctatacctccgccagtgcctcaaacagtctgcggacaccggcataaccgtatggctgccgctccccgttccagagcacgtttggacagtttttatgataataaccggcatcttttccaatggtgagatttacttcggaatctgttccgtcgtaatacagcatcgtcggttccagattggaaaatactttcgtttccgggctcaatgccgccagctgtttcatatagataaaattttcaccggataacgttccgtaaatctccggcacgtggaaaccataacgtaccagtgccagcgccagttcaaatggatctccgttcatccactcacccactgcaaaggatgcatccggatgaagttctttaaattttgccaccgcagcttctgctgctttccgcggttcctcatcatcaaatgtgataccaagagcagcgccaaaggcacgatactgactggcaatcttatcaacctgatataatctgcgcaactcaatatatggaattttcaaccgatcatgaaaatcctctgctgcaaaccttgcttccgggtgaagcactaagttaaagttcgcctctgacatggtctgatattcttcataatccttacatctggaaatctcatgaatcgtctttactcccgcgccatgaagtagatcatacagctcacagtcatccaccagcggggagaaaaatcccaacagattcaccacatttccttttttcttcttcggctcaagcagggaataaatcgactgacgcacgtgcaccatcggcggcttgcgtccctctcttgtcagcgcatacatataacacggttttaccggaagtcccgctgcttcctccgccttgcgacagacacgttccatatccgttccaagtagcgcatccacgcaggtgatacagatcatcacaacggatggctttttctccaatccctcacagatttctgccaccgctttcggaatttttttcaaatggcgaccagttacaatatccgtttcatccatcagcagataataaaaacgatcgtgataagcccgcatagaactcaaaactgatgtatttcgcccgcagcatcccggtgccacgatcagcataatggaacccggaaccgccagtcccgcacgcttgacaccaaagccctccgctcccggtgagttaaaagccagcgtcgccggagaactgtagatcaaatgcgtatgggaaatgagctgctgcggaatgttctcttttccaagacgattcagttcttccaccgtacaaaaatatgcttcctgtctcatatattttcctcttctttccataaatcagtccactctgtctttcagaatgcctgctgccttatgcgttttcctcttcctttaataataattccgccagatcaaagaaacatttgctgatctcggaatccggatcaccctcgatcactgtttttccctgatcttcccatcggataatttcatcgcttcgcggcacttcgcccacgatcggcacaccgattttttctgaaaatgcctgcaccttttccgtctcattttccacatttcgatggttcagcacgataccaaatacacgggcataactgcgatcctcaaagttgcgtaccgcactggaaatattatttgctgcgtacagcgccattttttctccggaagtaacgatcagaactttctctgcataaccctcgcggatcggtgctgcgaaaccgccacagaccacgtcacccaacacatcatacaaaaccacatccggcttgtaatgttcaaacagttccatatcttctaaaagctggaatgtcgcaatgattccacgacctgcacagccaagtcccggcgtcggtccgccagtctcgatacaaagaatcccgccgtaaccttcctttgaaatctgcgccagctcatccggctcctcatcctcttctctcatgtaattcattaccgggcgaagcggctctcccccaagtaaattgatcgtagaatctgctttcggatcacaaccgatctgaatgacacgttttcccatatttgcaaaagcggctgccaggttggaagtcactgtggactttccgataccgccctttccgtaaattgctacctttaacatactttcctcctgatattcccttacacaactgcaatatttcacgtatactcgactaaaattttccgcatcctaccacaatttatgttttcttagttttcaagaatgctccggcattcttgttgcgaggtgcgcgtcatgcaattgcatgacatacttcaactgcgca

SEQ ID NO: 13211 - DNA, 30236 bp, Unknown
  gut microbiota DNA sequence
tatccggaattaacatataccagaatagcttccagtattaacaatacaaatataaaaaatgttcttctcgaaaattcatcaaagcgaaacacttttataatcagcaataaacatgccactgctttgcaaagtgtatatgcactccccggaagttgaaacatggttgtcgaaaacgtctcactaatcagaaaaataaaaaatgccaacaggtacaattgttctcctgcactcggtttatttattccggacaacattttccgttttgttttacttaatattttcataattattcaactacaacacatcctaaaacagaaacattaaattttttgcaaatttccaaataagctttgatctgtgtgtatgtggtttttccgacttcaacaaataaaatacagtttccaatttcaacgaatcgcttcatcatctcagaatcattctcaatattgcttccgacttctacagcaagtgatttcttttccattgcagcctgatattcctgcacagctttctgtacaatttccgcatcactcaacattccaaaaaatacctgttcaacagaatgttcttttctgatcagatcaaaatctatcatttcgcgttccaatgccggacgatatccctcttttgcggaataattaccaagaacagtaattccggccgcctttatattttcttttccttttaatttatcacttaacacatataaaagcgctaatagagcacaactgatcaccagtccggcaatgattcccagagcggcatactgaaccagcactttttttgcacttggtgcatccatgctgtctggtttatagtcctttatataacccttctctgatatctgctgtgataactgatctttttgcagatcagacaggctgtctttatagtttttcaatgaagtaagataactgttttgtgctgactgtacctctggtattgccttggcagatacattgcttgaaataacagaaaatgaaaaatcaccgttttcttttaatgtagaagcggcatatttctgaatctgctcatcaattaccttactgattttcgctgcctgatcagcatcataatgcataacagtcaaagtaaaaatatttccggttgaattgctgccaaccacttccggcaaatattctaccggcacatccgtcaatttttcttctaccgcagctttccattcaccatttttcacatatgcagttaactcgtttataatatctgtaactttttcacttacaccagatgaagaaacctgtgtgttgtctgtaccattcacggtaatacggtactgcacagaagccacatttacatttagtgcatcaagcttcatataaatagatgaatcacaataactctgcaaagcatcaatctgatcctgcgtggttgaaatatttgcttcaatattcttcataacctccgcatacttatcaaggccactcttataatcttcaatcttctgtacttcagatgcggatgatgcagatttcgctttctttacacccagaccggctcctgccacaaagcagagcagcacaaatatgattatgatttttttatgcttccagatagagtcccacatttttttcatagatactgattccatttgttaaccctttctttctatgttatcccaggtattttcaagatatttatgttccagttttatcagtctatctttcactttcaattttttaaatatatattccctgatcatatcaataaaagaacatataaaatataccgatacaataattgccagaaatgccagcagcatcagcaccacattataatttaatagtccctttaaccgatcctgcaatatatacgctttcaccaatggatggaaatgtatcagatatacactgaatgagaccggtgcaaatagttttatgaacttcttccatttttcagttacattcagctttgaaaaaagtataaccagtgcaattccggccaatagtatggtcggtgatgtgtaactcaccagaaatgttgtctgattcgtatctccactgacaccaaaacgatgatgttcaatcacaaattttcctaaccaggttaccgctatgcatacgatataaataaaaccaaggtgtcgttttgattttttcttccatccctggtattttccaagataaccgccaataatatacaaaacgatcatccagattggactgtatccctctttcgtaacaaaaatatcccgtctgaataattccggcaatacagaatacagtacaatccccaacataacaaccagtttcaattgttttcttgatgcatgcgatataaaaaaattaagtaccgggatcaggagaaataatcctgtatacgctgtaaaataccagtattgttctctcgatgtcgggaagatcgcacttgtccactcataccgtcccactacagaaggtgcagcaaatttgaaaaacactgtaatcagaatggaataaaataatactctcagccacaggagtacccagtttgaataccggtattttccatgtattcccacatatccggaaattaatgcatagcagtttaccgcacagtaagcagcgatttcaatcagccacaccacttcatattttccggataaaaaaggggcataatccaggattccacctcttccaagcatatgaagacatacaaccataaacatggaaacaatccgtaaaaaatcgattccccagttatattctttctgttttgtggcaacactttccctgctattggattttatcatcctacttttttccatcagatttggcaccagtattcctcctgtcatttacgttccagcttcgcacatttataaacctgtgtccagccaagatgtctataccagtccattacattttgttcataacaatataatactggaactttctgctcctttatcacctgtgccgtcaggctttgcagtacacgctttccgtatccctgtccccgtgctgccggagccgttaccagtccgcctaaaactgcaagaccttccacatctgcatatgttcccatatgtgcaacgattgttccattttcttttaagacaaaattttggcaatgccagtttttcattctatcttgcagctgttcttctaatagtgccacagaataatgtccgccgattccttcatctgcacaaataagtgatgcgatttcataacactcatccacacttgccttgcagacttctgaatcaacttttgccgcttcctgcccggctttcatgataatgccttctgtttttttccattctgaaagcaggcaagagatttttcgtatcaattctactgatcccgacaacatttgactgtcatttttttcaatcaaaaaacatatttctcttatattttcatcacttggatctgatattccaaaaatctgcagactgttataatatttatatacaattaccgtatccgcctcagaatcagaaataatccaagtctggatatcctgattttcaaatccataggtacttgtatcaatatacagatacacgttttgaaatatatcttttttaattatacctttcagatattctatatcttccacgcagcattttcttatcaatgttcttctcctttatccaaaaaagtaacttgaaaccggtgcatgtggatctcttttatcttctggtggcaatttcatataatcattataaatatattttaagattgtatcataatctctggtacccatcagtttctttccttcaaattcatattcctgcaaatccagaaaccattcctttggcataccgtatctggtctttaagctgttctctcttttccgatacagctttcctgtcgccggaaacaacaatgtacgaactcggtttgtactgctgtttctgcttttttcagcaattttttccacacgtttaaacacccaagacggtgatatatgagatacgatcttataatataatctgtgaattccgtcctcggaagtactgtattttcctacttcagaccacagaatttttcgcagacagaaacagtaaaaatcattcagcatctggccgatggttgaatgtggaatgtcgtccatagggaaaacatcaataaaaacacctgttttacattttaaatgctcctggcctacgcgcacataagttgtgcctgttcttcttaactttccataaccccagcgatattccggatccgtatcatgatcctgaaaataacagatttctgaatttaactggtctgttatttttttgaatttatcataatcttcacgcaacatggcaacatctgcgtcgtcatcccacggaatatatcctttatgtcggacagctcccagaagtgttccaccaaaaatcgtataattaatattattctcgcggcagacacggtctaactcaactaacatatcaagctgaagcagctgcatctgtctgaactcttccggtgataattcttttatctctcccattgtactcaatcctctttatttattttctgtttttatacagtaattgtgtgcagatcctttttttcattccattcttcaatgacagaacagatcttttctgacagttcctgtgaaatataggaatttgactgcttactttcaattgatctgataaaagcaacaatctgatatctgattccttctccatccaactgataaaaataacgtttgttttcttcctgattttcataacggatttcaaaataatcagtcttccaccacggtgccgggacataaatatatccctttgtaccagcaatgatcagatttccctcagcttttacacctttgccaacttttacagaagccactgcattcttatagttaaaattaatttttgtaaacagatcaaagttatcattttccggcataaaataagaacttgcttcttttttttcataatcagttccaagcagctggaataccggaagcagcgctgttggtccccatgcacagatgctgttcctacgttcgtaggtactggtctgcgtttccatttcttttgtacttgtacaggtagcatctaccgagacaatatttccaatttttcccgatttagccagcagcagtaatctatggtaagcagttgcatacgctgttttgattgcatccatgagaatcagatcattcttttctgcaatttcaaaaagttcctgacactcagatttttttaatgcgatcggagattcacataatacatgttttccactcagaagcgctttctttatctgttcatagtgtttggatggatgtgagacaataaaaactgcatctacaatttccagcaatttatcataatcatttgtaaatacaatatcattatctttctgttttaaagaaacatcttccgtataagccgctacaacttccacaccattggcaaatgcagcttcctgccgatatttttcaaaaattcctgtatctccgacaagtcccatttttacaagccgcttctgagaacgtaactctgtacttgaaacaccctgcgttctgtccagatataccaccttacagtactcatttaaataatcaaattttcccttccagtctgaaccaactgtaaaaatatcaacattataacgcaaaatatcatcgattttctgcccttcatattcctcgatgataatttcatctgcaagtcctgtcttttttaccgccagtacacgttccatcaaagactgctgcacatttatctttcctctggttttatcaaaatcatctgccgtcacaccgacgatcagataatctcccagtgccttcgcacgttccagcaatcgtatatgcccataatgaagcagatcatatgttccatatgttattacctttgtcatcttttaattacctttctctcccctgcttaacgattataacagtcctctgttctgcatatctttcaaagcttccaccagtgatgtattatcgtctgttgtaagtgcacctatatgaccaactctgaaaatcttttctgccagatcaccaccatttgggcaaacccagatatgatactcatctttcagtgtctcaaatattttataagcagaaacattcaatggatgaagtggtgtcaccgcatttgacatagattcagacggaatttcaaatggcatatctttgattttttctctgaaatctgctgccagtgaagcaatctttgctgtttcagcctctacaccgcctgctttttcaatttccagtaaacgggcatgaatctgtctcaggataccaacggccggcgtgaatggagtctgcccgcgctctccgttttttaacgcttctttcaaatctaaatacaggcactgtggtgttttttcatatacacgctgtactgcatgttcagataaaacgatcacagaaatacccggagggcacgcaagtgctttctgtgatcctgtcagcataaggtctacgccaagtttctccatatcaaactcatctgccaggaaagaactaatcgcatccaccaaaaggaacatattgttctttttgcagaattcactgatcataaccgggtcatagtgtacaccggtggatgtctcatgaatatttacaagaaatcctgtataatcttttccatcatactgatctaacatttcctgtgtcagttttttcccgatttcaagtttgatctctgtatatggaatctgatgaatctgacagattttcacaaaacgctgaccaaaacttccgccatttacgataagtactttatcctttgtatcaaaaacgttgatgactgctgcttccatcgcagctgtacctgatccggtcagaaatacaacacgcgcattttcatctgcttttgcaaatttcttcataagattctcattttcaaacatgatttttgaaaattccggtgttctgaaatacggtacctgctccgctccaattgtacgaacctcttcacatgacattactggtcctactgtaaaattaagcatttttgtcactcctttataacttcataaattcagcaattctcttgctgttgttcccatctgtatatttataaattcttccgcaaagttcttctctctgctttttataagaatctttttcctctgaaacatctttcaggaatcccaataactcatcataacaataaattttaggacctgcaatatattcatccggattatccacacaaagaccgttcgtatatgaatcaagatctgaaaaatcatatccaattggtctgttcagcattaaataatcatatgcaatactggaataatcacttaataaagcatctgaatcttttaacagtctgtaattgtctacattcagatttttcacagtgcttcctgtaagcacacagacatttgacatgccatgtacttttattgtctccggatcctgcatcggatgtatttttatgatcaaaagcatgtccattttcacaagttcatcattcagttgttttaattcttcctcagattcaatgattggaatccccaatggctgctccttcgtactgtcgttccgcttataacctccgcctttacggaatgtaggcatccagatcaccacttttcgataggactctttcgtcactttcgccagttcatgttctgatggcgtaaacagccggtcataacttggatatccaagatatacaaatctgtcatttgggaatggcaagcctccctgctttgcctgaattggtccatatgcttctgatggagacagaatataatcaaccgtatcagacagattacatttcccaattacacttttcaggcaaaccgctccatgagtaaaataaaatgatttctggtcggcacgaactttatttgtcaccacacagtcagctgtaaatacttttgccttgcatacatacaacgcttttttcagactcggtttatataaccagcaccagtcaacattcgctggtaaagatttcggagccttattttttaacagccatacaattttgtacttgtcattataatgattttttatcaggtagtcataaaaagcaccgccattggaatcaaaatcattatgactttcaataataatgatattctgtaacggtctgtgtttcaaaaagaaattacagcctttttgcaggatcaggtcaagcttataatgataaaagacatcaaaaaccctttttattccattctttttaatataactaacggcattcatcgtttttctcctttattaccagctcatcaggaatttctgatattcttcagccagcctatgattttttttctgtttacaaacattacagccagaataactgcaacaattgcataacgaataacaatatgcctgtatgtaaaggtcatcacaaacatcacgcacagaacagctgccagaataagcagcaattgtttcaaattatatacttctgatgctcgaactccttcctgatgtaacgcttttcgatagaaaaagtagtgcatcaatgctaacagtccataacagaccaatgttgtataacctgccgcataatatccaaataattcgataaaaactttatttaatcctaagtttgcaaccgcacacacgatagatgccagagcaataaatcctgtcttcttaaaataatattcaatattactgaacagagaatacaggaaaatcaaaaacatagatactgcaaccggcggtacaacccagattgcctcgtaatattttcttccaccaaaaattaaaataatttccggggcaaaagccatggacaagataaccagcactgcgaccagcacgcaaagcagggtcgcattctttttgattccgtcatattctttatcttttaacgcctgatatgtatacggtgtaaatgagttattaattgcatttgtaatcaacagaaccatcgtaccaattgtgtaggcaatactatataccgctgctgccgagcttccaaccatatctttaatcataatacggtctgactgactgagcaccatagttgaaaggaaatgagggatcaaaggtaagttaaataataacgcatatttccagtatttcttatcaaacagcttctttccatttctgacaatcacaaaaaatgcgaccagagaaataactgctttcacaaatacatcggaaaatactcgtgcttccaacttatagttatctgtagcaagcacggaaataattccaagtagaatacttcccacgctcattcccagtgtactcagcacaacttttttgtatttatactcaaaacgctgttttgttgaccagaactcataggcagacattgtaaatatttccacaaacaaggcaatgatcaatatcggtgataagcttaattttcctgaccagaacgtcagattgcacgcaaataccgcaaacaccagcaacgtgatcactgacgtcagacctaatacagatgatgtaaaacgatccttatcatcatcaaactctatcagaccttttccatattcaccggaaaacaaatttaatgttgcaaaaataaccaatatactgtaccaggattggaataccgaataatcaccgtactcatctgttgtcagaattctgacaaaaacaggtgtggaaatcagcgcaattcctttatttaaaatgttacagaccgtaaaccagaacgaagcttttaccggttgtgacatatctttatatttttgaatccatgttgaaattcgcatattacacttccatttctattttattaatcaatttattaatcaattaatgaaacttcttttcttttttaagcttttcataatgttctatatcacgtgttttaaacggaactgccggatggcctcctgcaatcgcataagccggaatattcttacagaccacacttccagcctggataattgcgccttctccgatttctactccccctagaatgatcacattgtttccaagccagacattatcaccaatcgtaacatctttatggatatactgatttccatacggaatcgcatcatctgtatcataattgtggaaagatgaaatgatctggcagcccggaccggaatgaaaattatttccaatcataattttaccatttccaaatatagacattccattaaaatttacattcattccaagctctgtatttgacgtaacaaaagattttccgccacaatacagatttgcaccacagcattttgctgtcttttgaattttttgcttataatattttccttcccatctgctcagggtttctctaatttttgacatattactcctcaaaccatttatcatattgaccgtaatcaacttttgcatttgtatgtgtttcacgctcattttccggcggcagtgtcatataatcgccataaagagaactcaggtattcatcataatccctgaatcctttaaaattatagccttcaaacggatattcagttctgttcaccagccacttttcttccattttttcatccggatagtcactggtaaaacaatcattgaagttcgtattattatattttgtaatgtgagcatatatttttttctttaatttttcaatcgttacaaatcttcccaggaaatgaaggattttatatcctgtccgtccggaatgttcttttaccccatacccgcatttgatccagagcattgtctttaacaaatgattttttttcaagaatttttttcttttcacgtccccatctggaagcttgtcataaggaaaaatatctacaaaaattccatgatgaatgtctacaccaatggaaaaatcctctatgatctctgttccgagcaactgtagcttcgccatcgaataagcaaaattcctgtccgtttctgctgtctgcaggaaaaaaatatctgtattcaaatctttcttgcaggctttgaggaaacgttcataatcatttcttgtcatggcaaaatcaaagtcatcatcccacgggataaaacctttatgacgaacagctccaagcaaagtacctgccgtaatgttatacggtatatcatttttatcacaaatacgaatcacttcatttgcaatatataaaatcaatttctgtattttttgtgtctctgtcatcttaaactccatattattttctgtttactaattccatgtaacatttttccaaaccttctacggtatggtcaatagaaaaatactgggctgtctcataacaattttcagctatctcatctgcttttccttcgtaataagcttctatcagagatgcaattgcctctgcaactgcttttcctgttttttcactggtcagcacaccatttttatgttctgtaataatttccggaattccacctacttcatttgcaacacaaggtactccataagacattgcctcaaccagtgaaataccaaatacctcttcgcaaatagaaggatatacaaaaatatcagctgtttttaaatattttcctatatcacgctgcatgcccgcaaaatgtacgatttctcccaggcccagtttttcagacatcatctgcagattttcctgttctccgccataaccgacaacttcaagctgtaccggatatttttttctcagttcatctgttgcctcaatcagcaaatgtacaccttttattttctctaatcttccaataaaaacgattttaaatatatgatttctctctaccgctcccttctttggtttgcggtattctgtctgcgggactaccccattatatacaactctgcacttggaatccggaattttaaaataatctctatatgatttttctccggcctttgacacaaatacgaccctgtcagaaatgttcaatacatgtttttgcagccatgctcgaactttattcttaaagtttgaactgtaatcataataaaattccggtgaaaagcaactatgtgccaccaacacatattttttacccggtaacagaaatttgagcagcgaataatagaactgaattacaatagcactatgatgaactacaatgatatcatatttttttgcaagagaaagcagcgcacgaattctttctttcgttacttttttacttccacaggaaaccagagaaacagcatctccattttttttcatttcctcataaattgcaccttcctcaaacaaacaacagaaacaattttcctctgttcgtatatcagaaatacatttacataaattctcgatgccaccaacaccgccatctgataacaaatttaaaactttataagccatatgttcgttctcctcattcacaacctgtatacaaaatcatgttctgctctgtatttttgaaatgtccggcaaatacagtaatatcattaatgtaagcataaaatacgggtaaaaagaaacactgtcaaacaatgcaacacacataaatgcgatcattgttaaagttcctatgcttcttaaaatcttattctctgtctttctgacacaaaatgccactgcaacaaacataacaaaaaacagaatcgacaatacaattccgccatccagcagattttgtgcaaattgactatgtgcatagttaaattttccgccccagtataactccaaagtcactccctgaacgccatagccaatcactggagcttcttttatatgttgaagtgctactgcccaaatactctgtctcgaattcaacattgaaatcacaaaacctggcaagcgaacattcaccataaccagaattgcactaaatattgtatatagcacgatataaattggaattcctttacaaaagataccatatactttaaagattactaaaacgataaacacaacaagcaggactacagttaaaatagcactggcagcattactggtcaacattgttaagatagaaagaagttccagcaacaatgccgttttctttctactcctgaattccaatgctccacacaaaattcccaatcccccaaactgcgctgccacctgaacatgtcccaaaaaaataatatgatattccgcaatcttatactgcataatatatgggttgaatattgtcaggttcaacaaaaacaacacaatcaggatattggatatcatttttataaaatgctttggatcgttgcgcagacataaaatggcatatacacacaaaaaaggagttgctatcatattctgtaacccctcatgtaatcctccctgcgctgtcaatgtaatcaaaatcacagctgcaaaataggaaaaaatggcaatctccgcccttttttccatatgaattaaatttcctctatattgtaaacacatctcaaatataatcaggagtaatgccagataaacccacgccgtcatgaatggcttataaaacggaacggcatcataaaatcctcttggatttaaaaatggaatcaggataaaataaccgattatattatgtatattaatctcacgtacctttgcagtcatacaattatcaatccttacttactaatttttcgtgccggaactcctgcaacaacggaataagcagctacatctctgtttacaacagagccggcagctatgaccgcaccatccccgatcgtaaccccttttaatacagttacatttgcaccacaccatacattatttccgattttaacaggtgcactcaccaattcttttaatatttttccatcttttctgtcatggtcatgatccaccaccacaaaattatttgcaaacatgcactgattgcctatcacaatattctctgctgccgtcagactgcaattatgattaaaaaagcagttatcacctattgtaatctccgccttatccgtacactttatataaaaaggtcctgccgtcatcaaaaaattaccaatcctgcattttgcatctgaaaacagatctatctcaatcctgcctttcagtgaattgatttttgccatttgtatacgacttccgtataatattttatatttcatataggtaaatacactcttgcatcctatgattacctttttcatattgttcttccttccttactgcaaacatttactgcttattttccgcagtatatgtcatgcagcaactctgcattatcccgtatatcaaacccagctctttttgtctcagctatcacattcaaagcttcttcatttctgtctgtattttcaattttcttcaacaaaatatcagcccacacatccgggttttcttctaatgagcaaaattccaccaaatcagaaaaagcacagtctgttgtaacttcattcgacaatacacacggaagtgctgcgatctgccactcaacagcaacaagcggaagtccctcaaacacagacggaagaagcataccatccattgcctgcaggaaacagttcacctgatctgacagtcccataaatttcacgcagtcttttaatcccagcttttcaaccttctgttctgtctctccacgcaatggtccatcaccaaacaaaaccagctctgtatcaggctgtttcttatgaacagcctgaaatatatctattaaaaatgcatgatttttctgcggcaaaaaaccgccgacatgtccgatcaccgtcttattttcccaatgatacttttcccttatcgaccttcgtatctccgaatcaaatttatatttttctatatttcggccatttgcaatgatcgtaaacggacggtttccaaaaagccattctcctgccgcttcaccacatgccagatgtttattacataacaaataaaagaaagggcgtaacatcttatccgctcttacctgttcgcaacaggtattatgtgaatgcgcgattcgacgtctgcatcctccaaaaaaagcagccgccatttcaattgtcatagtagcactgttaccatgtgcatgaactacatcaattttctttcttcgaatcactctgatcagcgctttaaaatatgctgtggtatctgttcttctgtttgggagatcaatgatctcacatccaagtccagtaatcttctccgcaatttccggatgtacttctatcgttccagccagataaatttcaagatcatcccgcttcatagcttccagatttgccaaaatcacactggtaattccttcatattttaaaccaactgtactgattatcaatacctttttcttttttgttttcatcgttgctttacatcctattgaaatagattatctacaattttttcaaattcccggttaaattcttcattatgactttttgcgccctgtgtcattgtcgaaataatcgtatcatagttgcatacggcattccgcagatcggcgatatcatacaccggaataattgttcccatacgctttgaaacattttcaacaaattccaactgatgattgtttacgtgttctccatattctgcctgtcttggcactaccacaggtgtctttcccatctgcaaaggcataataaagcttgccggaccaccatgtgtaataacgattctggcttctgccatctttttctccatatccgcatacggtacaaacttactccattcacaatattttggagaatatgtgctataccccgtctgaataaatatatcatcagtgatcagctgatccctttttaactcatcaattgcctttaccagacggtcaaaaggctgttcgtgagttcctactgtaacaaatatcattgttttttcctttaaaaaatgcttcctaaattgattgctttcttatatacctgtttctgttcttcccattgcacaataaatttatctgcaatcggatataccattttacctgacattgtcggtttatcgattctgtcaaacacttccacatagatcaactttgcaccgaacagttttcccagataaaagaacggaacagatactgctgctcctgatgaaatgatcagatccggtcgttcctttctcagtaccttccatgcaatttttgtatttttgatcaatgctttcaaacttctgtttgtcgggaaatagcatggatacattttttcatctttcaataaacttcgtgcatcttctttatcaaaagtaacccaaaaacgttccctggtactccaaaatggctttaacatatataaatgcgtcaggtgacctcctgaagatccaaccaagcatacttttatattatcttttttcattgagtagccccctcttcctttcagtcattgtaatctcctctaattcaatgcaacaatacctataagctccatattatgttccatacagatttccatttcacgggttatggtttcataacgggcaccggaaagcttttctacaagaacaatattttttaaacggctcatttcttccaccgcctgcgcctgttccaatccacctgatactttacaaagtttaattcctgcttcctgtaactgctgttccgcttctccaacccatgtctgcatatatttatcttcgcatgcgtatgccataatcatttcgtggataccatttttctcacattcgtattttacatttgacaccagtaactttaatgctgattctctgtcatttgacgcactgtcttttaaaagtttctttcttacttttctgtaaagagcattttttccggatactgggatttcagctagcactctgctattatataaatatttaatgtcgttacttgagttgattgttccacgcagcaaatatgcaataattatatagagaacggcaagaacaattcctatcgctccgccaagtccaatatactttttactaatagaaacttttgtaacaactgctgctttatcttcatcagaagatgattcctgattctctttttccagcacaagcttctgtgtcgcgtttaactgctctgtcaactgttttgtctgatctttcaacgtagtgatcgctgtcatacaatctgactgtttctgtgcaacagaagaatcaaccatattggaataagagcagttaaccattgttactgtatgagtatacatttttccactcagtgtttttgcataatctgagatacaggaaataatattatccgcaagtttttcacaggattccctgtctatatactttaccttcactccaaaagtactacctgtattcgtcgttaccatattgccagtcgtattgcttccattatttgccgaagcatcttcataactgatgatttcattcagatactgtgtttcttcttttactccgctgtcttctaaatcttccagtaactgtccatcatttacatacatataatatgcatatttaagatccgccagctgttcattattatctgttccaatgagaaactgaatggacgctgtactgacattatacggatccagctgcatcaatacagatttctctgcatactcctgcttcttttccagagatgtctgtgtatattctgttaatcttacctgttccagttcttcctttgtgaggctttttcccgcctcttctattgacacctctgctggactaatatctgcggattttttatcctttatgtacttgtatccgcccaaagcaacagcaaagacaactgcagccaacattattagtttaattcgtttaaaaagttccaaaagtaattctgtcacgcttacaattctgctgtcctgaactttcttataatctttttttgaattcataaatttcctccattataataccaacagacaattttcgtacattctgtaagtatttaatatgtttcactttatcactttttcgttatttttacaagaaataatcctttcctcacccattctgaacaaaataccatacatacagcaatgaaatatagcatatgcaaacaggaactgtcaatttgtaatcctcttccattcgtttcttcataaatttattaaattctcttcataatttcataatttgaattattttattaattgtagtaaactattgcatggtgtggaatagttataatacactgtgtatttattatgtactctcagaattcttcatagacttcttcatttaggaagattccgagaatacattttataaatgatagaggttagaaatgaagttttttaaaaagttactctattactgttgataatgatattctgcatgttatgtctaaatccattatccgcaagtgcaaaaccaaagaataatgttggagaaattggcaacagctgtttttataccaaaaacggacatatctcttccaactataccggcttcggcgacaatcagtatggaacatggtactgccgaaataggaagctagactatagtgcaactactgttgcagatgggaaaaacagccgttggctggttcagaatgggaaagtaaattacgactatacaggattatgtcaggtaaacgacagatattatcaggtttcaaagggcaatgttctttgggaagtaaacgacagttccagaatgcagcttaagtcttattatcaggaagaaataaaatatggacgtgaagacttgtcttttatcttcccgtcctacttttattgccatatcaatattatactatttgtcgtccatattttgcttttcatacgttcgatcacttatgatataacgtggacgatgttttgtttccatataaactttcccaatgtactgaccaatcacacctgtacataacaattgaacaccaccaataaaacatatcacacatatcatacttgcccagcccgaaaccgtatttccaagtgcccagctaataacagcccatataactcctataaatcctataattgacaccaatattccgaaattagtaatcatctggataggcttaaccgacagacttgttataccatcaaatgccaaagcaagcatttttctgagtggataatgagatttaccagccatacgttcctgccgctcgtaataaacagatgtacttttaaatcccacaagcggaaacatgcctctcaaaaacagattcacttctttaaactctgaaaatgcttccaacacttttcgggaaaccaatcgataatctgcatgattataaacaacctctgctcccatagtattcagcaacttgtaaaagccttctgctgttactcttttaaaaaaagtatctgtatctcgtttacttctgacaccatatacaatttcacatccattatgatattcatttatcataacttccatagctgtaatatcgtcctgtccatcgcaatcaatagaaattgtaatatccgcatatttttttgcttccattaaacctgccaatacagcattttgatgtcctcgattcctgctttggcaaataccaatataatgttcatccttttccgccagattttttataatttcccatgttttatctctgcttccatcatttataaatagtattctgcttttgctcgaaattttttctttttcaatcaacaggcttaactctttcaaaaacaattctgatgtaattggcaaaacgtcttcttcattatagcatggtatcactatccacaacactgtatccaactcaaacacctcatttctttttctctgctctatttagtaaaagtgctactccatatattgccaacaatatgtataatggaacataagcatataaatatctggatcttgcctcaaaaagtaattcaaatatcgttaatcctataacagaaagcattagtacacttctttctttttgatttttatagcatactcccagaattcctaatcccagacaagttaaccaaatcatttggacaaaatttatccaaactgtattatattttccaacagaactataatttctattataataaagtcctctcaagaaaccactgatttttgtatttctttccataacatttatgtaaaacgccccttctccaccccagaaaaaagttccgtcattataatttgttagcgtttttcttatcatttgttttgagaaacccactgcacccatattttcaatacgctcaaatgctttctgcagatctgcttgatcacgttcttccaccgtttgaaatgaatctgaataagaaacatcgtccccggcccatactcccattgtctgggtattcattcccatcataaaaaaatgttttattccaaaagctttttcatcatcaagctgtatattcaggcttctcactgcggctattgaaattcctaatgctaataagaatcccaagataagagctgccactttttttaaatatcctcttccaatgcagcttaattttatatttaaaattgttattaacataattgcaatagcgactatcattgtttgtggtttaattttatatccaatataagataaaaacggaatcgcaaaccacgaaaaacacttaaatttttctctattgacataaatgtacattatcaaaatcggaaatactaatgctatcgaatcagagtatggaatcgaaacccaaggtgacaagcctattaaaaaaaagtatatactatatcccaccatcgttaaaacacgattatgaaacaatttacttattatttttgcaagaagtactcctgtacatgtattaaacgcacattgtacgcacaaaagcataaaatattcatgcgcatgaccgcccaaaaaatgaacaatttccattatcttcgaaaagacaaataccaaaaataaattatttggatatctcgaaaaataattaatatatatatctgttgattcattatgtgcaattttatcagcaagtcctactactgaagccacatcccaatctgtatacacataataattccacacaaaatatatctgcattaaaaatatcattaccggaacaactatccagaaaattataggttttattttacattctctatctgcccttttgcaaattgtcacaatgccacatattgtgattccaccaaatattaataatacaattgcaggcaaaaagttttcactataagataatgtccaataacgtatgtgcgcaaagaaaatacaacatatcacgataaatatcatcattaaaccatatataccagcaatggcactatttagcattctaaacatactttgtacgatttcctgtactcgtttcattatttagattctcccatctgattttttgttttcaccttcaacattatgcattcattttcttacattgtaaagaaattcttcaccaaacctgctattttaaaatctaaaagctgtgtattttcaaatccttgccactcgtcaatcatatatatatgtatcaaaaaaataatcttgattttcagttatacactcgtttaaaagtctttcataagcatttgccattccactatatgcaacagccgttggatgccctccagacatatttttataaatttctgattgaaagaaagaatcctctgactgaacgatatatgaaatatgaattctcaattgttgatattttaactgtattttccagttcctcaatagacatagaaggtctgccattgatttataggagctaaagtttttaaaagcgaattcatatatcataattccatctccttgagatttttcacaatatcattctcttgctgtttttccttgacaattccactctcctgcgttaacatcttacccgtaaagtgccatacaaacggattttctgtttcataattaaccaggggagcatatcgctgagagtaaggacagacctttgacccttatacctgttggacaatgccatcgtaggaagtgttacagaatataatagtagagaaaactatcagacattcttaaagcatctgccaaccggttggtgcttttttgattgtaaaaatgtgcagcaccacatgtattgcataatcaagtaaagcggacattcgcaatccgtttttcgctacttgctcatgaacgcagtcgctttgcgacctgtcagtgggagcttttaactcccactgacataagtatcccccttacccaccgcttagtgctctacgcacttgaaatggggtgggggaatgcttattctgcgttcaaaaatgcctctcatttctgctgcgaatatgtgatatggcatgggagttatggttacttaatgtaataaggttcacagatggatcttaaatttcacttttattttcagggaggaacaaataatgaacgcaagtgtagctattcaggtattaccgacagtcacagatgaagacgaagtcatccgtatcgtagacgaagtcattgattacatcaaatccacaggtctgaactattatgtaggaccgtgtgagacatccatcgaaggcgattatgacgaactgatggagatcgtaaaaaactgccagctcgttgctgcaaaagcaggctgcccggctatgaatacttatgtaaaaatttcttttaaaccagagggagatgtactgaccattgacaaaaaagttacaaagcatcaccagtaagattccggcaatcgtcgcgttatgcctgatcgtgctggcatggtatctgatctgtgtatccggactggttccggcttatatgttgccgtcaccggtcaatgtggcaaaagcgctgatctcagacatgccgctgatcctgatgcatgcaagatacaccctgcaggaggcattttacggtctttgcatcggtatcctgctggcttttgtcagtgccacactgatggatcgttttctgaccatcaaccgggcattttatccgctgatggtaatcacacagacgattcctaccattgccattgcgccggttctggtgctctggatgggatttggcatggcaccaaaaattgcattggttgtcatcaccacatttttcccgatcgcagtcggtctgctggacggatataaaagtgtggatcaggatgcggtcaatctgatgcgcgccatgggagcgacaaaatttcagattttccggcatttaaaatttccatccgctttgaaccagtttttctccggtttgaagatttctgcttcctacgctgtggttggcgctgttgttgcagaatggctcggtggattcaacggacttggtgtttatatgacccgtgtcaaaaaggcatacgcattcgacaaaatgtttgctgttattatttttatcgtgatcatcagtttgctgctgatgctcgctgtcaacattatcagaaacttatccatgccttggataagaacagaaaaagagggaaaagaagtatgaaaaacaaatttttaaagaaacttgctgctgcatctttagcagctgctatgatattttccatggctgcatgcggaaatgctgacaacaacgctgcaaaaggaaatgcctccgacagctcttctgctgccgcagagaacacttccagctctgataaagatctgacaaagatcacattctgcctggactggacaccgaacacaaaccataccggtttatacgttgctcagcagcttggttactatgagcaggcaggtctggatgtccagatcgttcagccaccagaggacggtgctgcattaatgtgtgcttccggtcaggctcagttcgccattgaagcgcaggatactatggctgcatctctggattccgataatccacttggtatcacagcggttgctgctgttctccagcacaacacttccggtatcctctcccgtcagggtgacggtatcgacactccgaaaggaatgacaggcaaaacttattctacatgggagtccccgatcgaacttgctactttaaaaactgttatcaacggtgacggtggtgattttgataaagtaaatctgatcccgaacgatatcacagatgaaccggctgctctggctgctcatcagacagatgccatctgggtattctacggatggggcggaatcaatgcaaacgtagagaaaacaccttgtgatttcttcttctttaaagatgtaaacccggtatttgattactacacaccggttatcatcgcaaacaatgaatttttacagaacagcccggatgttgctaaaaaattccttgaggcaactcagaaaggttatgaatatgccatccagaatccggtagatgccgcaaacatgctgatcgccggtgacaacacgggttccttaagcggatctgaagatctggttcaggcttctcagcagtatatttccgagcagtacatcgcagatgctcagaaatggggattcatcgatgaggatcgttggaatacattctacaaatggctggcagataacggacttacctccaaagatctgaccggacagggattttcaaacgactacttaggtggtaattaagatttcaaacaggaaataaaaatggcattattaaaagcagaacatattacaaaaatatatggacagcgaacgatcatcaaagatatcaatatcgaactgaatcagggtgagctggtatgccttcttggtgtcagcggttccggaaagacgacattgtttcacattctttccggcctgactacaccggaggaaggacatgtgtatctgaatgataaagagatcacttccactccgggacagatcagctacatgcttcagaaagatctgctgctgcctcataagaaaattattgataatgtatcgctgccccttgtcttaaagggcatgaaaaaagcagatgcacgccagaaagcagatccactgtttgcagattttggtctggatggtacacagtatcagtatccaagtcagctctccggcggtatgcgtcagcgtgcagcgcttctgcggacatatctgtcatccaacggtgtcgcgctgctggacgaaccgttttccgcactggataccattacaaaatccaatattcataagtggtatctgaatattatgacgcacattgatctgtcaacgctgtttattacgcacgatattgatgaagcgattcttttatctgaccgcatttacatcttgaatggtacaccgggcgagattaaagatgagatcgtgattcgtgagaagaaaccgcgaccggatgatttttatctgacggaaacgtttttaaattataaacgtgacattataagcagactttaagtggctaaacattttacctttgccacgtatgtaaatagggactgagttcattttttcttagcgagcgattgttagccgcgaagacaaaatgaactcagtccctttcaaaatctcaaattttctgccacaaaacaagctttttaaataatttccattgctgcggtccagccttctcttaccgcatcaccaatctgacgggcacggacacagtcaccgatcttccataccggaataccagcttctttgattgccgcctcaagtgcttctgtcgcatgtgcgcggcgtcccattgcattgacaacagaatctgctttgatagtaatttctgttccattctgctcagctacaacaaagtctttgccgactttgataacttttgcatttacttcgtatttaccaccgtttttatcgataaagtcatgtacagcagttctgtacaaaccggttgtctccggcatcaaagcacctttcatctctacgatggttgtctctacaccgtgatctatgtaatctgctgctgcctcacagcctaccagaccaccgccgagtacgatggtgctttttccaagaccagcaaaatcgttgtaatatacctccattgctgtgacagcattttcaattccctcaattggaaggatcagatcatcagatccgactgccagtacaactgcttccggagcgatctctttgataagttccggtgttacttcacagtttaatcttactttgatcggacgtttctctacgtcacggaccagcagatctttgaagtttctgatatctactttatgatcggtatgatctgtaaagttaatcagaccgcctaacacgcctgctttctcgcacaggattacctgatgccctctatctgctgctgtgattgctgtctgcagaccaccgcagccgccacctactaccagtactttacggcttgcttccggttttggcatacgctccggaagaactttatgatgagaagccggccatacgtcgtatgggttgatcgtacaggaatccagtggtgggaacttcacagtccaaatctctgtctcatgttcaccggacggacccggataacatcttccgcagcgtagacagcgacgaatttcatctgcatgaccagcttttgccttattcgggaatgccggatcagcaaagaactgacgtcccatggataccatatcaattttgcctgctgcaattgcttcttctgcctgttccggagagttaatacctccaactgctgcaaccgggatagacacgttttgtttgatcacagatgccggctcgatattcggtccatgcggagcatatgcagttgtgaactcccagcttctggaagaactcagataatgaccacaggatacatgaatcatatcaatgtacggctcacaaagtttacagtattttacagcatcttccagctctaagccacccgacagatgttcagaactgctgacacgaatctcaatcacaaaatcaggtcccatagcctcacgaatagtttttaacagatcaacagtaaatcttgctctgttttcaaaggatccgccgtactcatcggtacgtttattgtactgcggagaaaggaactgtgccggaagccaaccatgtccgcaatggatcataacgccttcccaacctgctgcctcaaaccatttacaggcagttacataatcctgataacagcttaagatttcttcttttgtaaatgcatctacatgagttccatccggaagatctttctcagatggtccttttggattgatgccgtctccgatatttgttttgatctcaccacaggaaatcagctcaccgattgccagtgcgccatagcttttgatcatctctgcggtttctttaatgatgttgaattttttatcggatctggatgtataatcaaggtatggttcaaacgggaaacgtttgtcatactcatggttcgggcttaactcacccagacagacgattcctgcaccgccttttgccttcgcttccagcatccggaatgcacgctccggtaccggggtggtgtaaccaaacggatccggatccagctcgatataatgatcaaatgcaaataatgctggagctgcctcaatacggtttttaacgatttttgaaccaacttttaacggctcaaataaatgtggaaaatacggatttttttctgccataatctcttacctcatccttcttttttgttactgaaactgtaacagaaattaccctgtttattcaaacatcagcttttttcatgctgtttcattttgcaatatttttattatatttgttgcattgtccttgtataagtacagaaaaacgtgctacaatcgaatcagattttataataagaataaataatatctgtcacatttttctattataattttctgagatattttttatttcataagatgaatcatttatcgttcataaaaaggagaaaagagcactatggaccaccgcgcagaccgcatgaaatcactgatcatacgcacattttttgactgtatggaaaaagaagatttttctcagattacgattggaaaaatatcagaacaggcattgatcaaccgttctaccttttaccgctatttctctgataaatatgagttgcgggatgaagtggtcgaccatattgttcaggattttgcagatcatatggaagtagattttctgcatatggatgtcagtgatgccgaacatacccgcgcgcttcaggattgtctggctcacctttgcactcagaaacgtgagttggaaattctgtggaagcaacagctgctcggtcgaaatgtctttgatgaaatgatgaatgccggtgcacgcaaggtagaaactgaaattcagaatcatccaacgatctcaccggggaaaaaacagtttgctgactggtatgcaaaacttctggtcaacaattttcttgtgacagttcgctggtggttttcccgtaaagatgacatttcaccacaacagatcaccgctatgatgaaacgtcatatgatttcaggaacaattcctactttaaaagaacagtcctaacaagattgttcttccgtttctcttcttttttcatatgctgcatatatatgataaaaatcaggccaccggtaactacccatgaagtaacataaacattcatcagcatgttatacgtcggaacccgtttaaacacagttaccatccagatcattcgaaatacaaccgttccaagaatagtaatgattgccggctccagtgattttcccatgccacgcaatgctgcactctccacttcgtaagtcgcggtcagaccttccagagagcatacatgctgcatgcggatcagtgcatacatggctaccgcgtcactggcagtataaatatgtacaaatgtattgccgcctgcaataaaaatcacacttaaaatctcggtaaatccgattccaaacagcatacttaagccaaaaattttcttgcatcgtttcagattgccagctccataattctgactggtaaaagttaccgcgccctgtgcaaaggcacatgcaatggcataggtaaaatattcaaaattcaatccgaccgaagcaccggcaatggcatcctccccgaaagaattaataccactctggataaacacgtttgataccgaaaaaatggctccctgaattcccgccggaactccgattaccagaacacgacgcaaaaaatcttttcgaatctgcatttttccaaatcggaactgaaattcatcctctctccgatacaggcagagcaaaaccagtgacgcactaagaacattagatgccagcgtaccgatggcaacaccttccacgcccaaatgaacgcctactaccaaaagaagattcagtacaacgtttaccacacctgccagtaaaagatagtacatcggacgtttgctgtctccgtagcttcgcagagccgccgcaccaaaattgtaaagcagcataaatggaatactcaaaagataaatacggatatacagcatcgcctgatccatgacgctgtccggcgttcctgacaccacaagaaccggctttgcaataataaatccaaagcacatcagaccgatgccaagaatcagaccaaacatcagaatcgtatgcaacatagcactgatctgttcccgtttgttctgaccgatcagatttgccagagctgcattcggtcccacggaaagtcctgtgatcagatttacaaatattccgaccagagcgacacagcttccaactgctgcaagtgcactgcttccggcaaatctaccgacaactgccacgtctgcggaattgaataactgctgcaggatcgtgctaaaagcaagcggcagggcaaacatgatcagttttccggcaagttttccatgcagcatatctatttctctgtttttttctttcgtctttgtctgttccattcggaaaccagtcctttcctgtgggatgctactgtttttatgctatgtacgattataacatatataaagcgaaatcgaaaactccttctgtgagcacttatcacaaaaggagtttttaatctcgctatttcagatataaaattattttgaaagcttgttatttgcttttgtctggaatttctcattctgtacgacgaaacgctcatgtgttcctttaccgatcagacctgcctcatcataagctgctactttgaatacaagacgacgtccgtctacttcggtaagctctgtctcgcaacgaacagtcattccgattggagtagccgctacatggctgatatttacctgtgtaccaacgctgccacagccttcttccagatatggagctacgctctcgcttgctgttttttccattaatgcaagcatgcatggtgttccgaatacttccagtacaccgcttcctactgctgttgctgtattctcatatacaacttctacgctctgttcccctttgactcctgcttctaacattttatgtcctccttatcaagcatctgaattttttgttgcttttgttttcaaatgtttttttctgtttttatgtgtctttggtaagtatatcataactttttgtgtgcgactagtgtttttctgcatcactggagtgtggatttatttgattttcattttgtacagggaattctcgtattatccccaatatctatcaatcatccgcaacatattctctctcccaaccggattcatagtatgaagctttattggaaaaaaaagactattttccactaaccaatccaacagttttatcccatctccgccatcataagcataatctcccagatcatgatcacaatcaatcagcaaaatcggttcctttgccgattcaatgacgcttttcgcgctatttacacttttacaccatacatagccttccggcgcagggcgtatatcatctaaccaaatcttcatattttttcattctccttctacagtaactattcgtctttatctgctttcgtttccattcttgcttctcctaacaatttcatccc

SEQ ID NO: 13212 - DNA, 3922 bp, Unknown
  gut microbiota DNA sequence
aattcatattttgaaacaatccttgccctatataatggagataaatactgctctacttcccgatgattaaagaaataatctccatgttttaatgctccggtttccatatttccttcctcatctacatattcacactgtattccacagcaatcatctccaacttctttgagccgacaataaaacgctcccggtgcatacggtctgcaatctataaacagaacatctcccggatgatatggaacaggtaagttcaaatctggagatacagaaaaaaactgatcttccaccattcttcctagtgaaccatttaaatgattcgatgaattccattcatgtatataatattgaacttctccatctttatccataatataggtatactccgctgataaaaatccatcttctccgttgttcacatcctgactggcagtatataattctacccgccaatacaatgtcttccattccgcatccgcatcttcatccatatcctcacgataataattcttcactgcatttttggtattagccaaggacgtcatgatatacggtccatccataatatcacttttatgcttgtcatcatagcccattagctgtataagaaaaattgttccagtttcacttgtcaaaaattgaactgcacgatccatacatgcacaacataagctcacataatccatctcttgttttttcaagcaagatgatcgcttcatatcatgtaacaactcctgctttctccccaaactgattggcgctccggcaataattgatacataatcttttaatttcaatcgttctgcatgttccattaaataggcatgtaactctggtgattcaattaaatccagaatcctattttttaattttgattccaattttgttctccccattcttattcttctgccttaccattccttgtcccatattttttcaacccatcataaaccttatgatacaccatctggtttggataatatctgtaatctgcaaacacatcgattccatttttataaaaatattcgtgaatagctgctgcacatccagaacttctgctttcaccatattcacattggcaaataatatcctttccatctttttttgctgtaaaaataaattctgccagctcatctgcttctggaaaataagtctcgtatgttaaatgatattttggcaatactgcaagatcaatgtcatgcaacgccacttcaaatacacagtctgtttttgtagaataatctacaggttgatagtctgcatcacgaaaacttcctggtggatcataaaaactgatgattgccacattttcagggaaatcactttttaacagtttttccattgcttttcttgaataaatgaatatcttcatctctgccatttttctaaatctcctcaaaaagtaatccggattgtttcactttagatatttgtgtgagcatttcatttaaacactgcgttttttctttcactgataatttccgaaaccactcattaagtctgtttttatagttgtttctcatttgtttaggaagcgggattttcttatcgtacttctccaaaattttatgatagggttgcgtctcataataatctttctctgccccaaccaattgagaaaacagtccttcttctgccatcgcaagctgcatttgcggccagataataaattctacctttaacggtgttaattctgtattattttctaaatatttcctgatcacattttggatatctacatacccatattcacgatctttcttttccccactggatgtctttctcaagttgctccaggatggatattttctgcatattttttcttctttattatctatcgtaatctttacacctttttcctttaatcggtaaaaccattccagtgttatggaatctaatggcatatggcaaaatctaaaataatcttcgcgctccttggcaccttctaaacaataaatatatttgaaagtcatattaatcactttttgtgcctttccatatttattatcttttaatctaaaccgctttaaaaaatcttcgcaaatcttttcatgccaatcatcaaattctttctcatttttttctttctcatcaaaaaaatccaaaaacttcttactatatggctctagctctatatgtgtatctgacttttcaagttcttccaacatatctttagctgcaaaagaaacactttcttctcgtttctccgttctaggtgtaaaatcttttaaagccatgaaaaatgcatattttatcccctcttcatttatctttagtcgttctttcttttcattctcaccattccaaaaaagttttactaaattatcatgtgtgcaatccattatatttttcttcctctccctaaactatgtatgtttccgtaattcgttttctacaatacttcaatcttcatatgcttcccaagattttttcagatcatctcttaacttatttcgcaatcgcttcggctgcagcacaatcacatccggagcataattttttgcaaactgttctgctgcacgttcattcacatgtacgctcaccacgacatgtgtatccgtttcttccgaaaaaacaacatcttttccaaacagatcaatcacgtcagaaatcattgcttttacgattcgaaatttaacaaacgcattttcactggaatacatataaacgtgttctttcgtatatttgttcagatccattttctgatgtccggaccactttaatgtttcaaatggcttgccattttcctcaaggatctgtatatttcgaattctgtctacccggtaatttgaaatatcatcatatttatcataattacagatcagataatactttccatcctgagcaaccatctggtatggcgtgattatatatttacgaatccttccatcctctcgttttttcaaatgcatttttttatccgtatgatattccgcatattcaaatgaaactttcttctttttccgaattgcttcatccaaaacactaatattgtaaaatacctgcttattatctgtccgatctactggaaatggatagatatactgcgaacgcgatttgaaatatatattagataacgattctaattttgagatcatgtcttttgcctgtttgtatggaatatgctttgcaaacaacaaactgtctattaataatctcagttcttcattggtaaatttctgcttcagataaaaatcagtccacagcgaattatcgtctgaatgttctttttccgttaaaacctgtggattatcatctgatatgcaaatttttttcttaaaaatatctttccgtgccacttccctatattcaatattgctaccatattcgatcagatttaaaagattccttttcacagctttccgatcaaccggcatctcatactcttttttcaaaatatcctgaatgtctttctgacttaatctgtgttcttcatctgaatatttttgcaaaatatctaaaatatacaaaatcaacaattttttcggatgttccgcgctcatactttttctctccgttctgtgcagttcatataattttattgtatgcctgcactttgcagatgtaaagcggacattcgcaatccgctctcgctacttgctcatgaacgcagtcgctttgcgacctgtcagtgggagcttttaactcccactgacataagcatcccctttacccaccacttagtgctctgcgcacttgaagtgggggaatgcttattcttcgttcaagcaatccttatgtgtcgccttatttcctactctcgacgcaaaaattcttctacttatttctcactgactctattttaatgattccaatggggcaaaaaggggacacaaggaaatgtgcatcgtttgcacgacatgattttatttaataggaattttatcgtaatttcctataaaaaagtgtcttcgacacttcaact

SEQ ID NO: 13213 - DNA, 382 bp, Unknown
  gut microbiota DNA sequence
caaagaccattatgaagaaatgctttatattttacatccacgcaaatccgtcatcgaaaatgttgaccgcatgattaattgcggtgatccttcttttggtggtgcaatgtatggttgttctaaatgtggtactttcaaattcgttcctttccgatgccatagtcgtttctgtcctatctgtggaaccaagtactccattgaccgcactacctctatgtcttttaagataatcaatgcacaacaccggcactgtgttttcaccattgattctgaactcagacatttctttttagaaaaccgaaaactcctcggtcttctttttgatgctgttcaaagtgttattttccgggctttctataaagataataagtctgaatgtttt

SEQ ID NO: 13214 - DNA, 878 bp, Unknown
  gut microbiota DNA sequence
agattgtagatggtatctgcatatgttttcaggaactcatcatatgtatctactgttacatccgggttgtatttgtataacagagactggaactgctcgtctgagatgaagcagctttcatctgcatataatgctttgaagtgtgctgcgttgtccggtgtgatcaggtatgtggataaataatcaagtaccggtggttttccgtctgcatccagaatctgatgtccatctaagtagtttactaataagcataaggaaattgctccgtttacgtggttaccaccgttcattgcctggataactccctgctcgatgtaatcgatcagatccggtgctacgtctgttccgtaaaggtcgaacttataagaagaatctcctgctttgattgctgcaactgctgataagtagtcaccgcctgagcagtatactgcgtctacatccgggtttgccattacaaggtcatttgcttttgttgtggactcggatggatcagaacagtgcatggtctgtaatacttttccgccttttgactcaaattcttctgtaaaacctgcgatacgctgatcatgggaataatcaccgattgctgctccaagaacaactgctgtcttatctcctgcctcaattgcctgatctgcaagtgtttttcccatctcatacgggcttgctgcgattccgccgataaataacggatctgctttgatgctgtcccatacttcctgatcggacgggaagtttgtatccaatgcatatggtactttctgtgcatcacataattcctgtacggaaccgaatactgcgtctactactgagaacatcagtactgcgtccggtttggatgctaactggctctgtaagtctgttacgatcttgtctgc

SEQ ID NO: 13215 - DNA, 12251 bp, Unknown
  gut microbiota DNA sequence
aaaatagccagagtccctttactgtaggctgtgcaaaaaccacactgcttactaattgttatatttccggacaagtttccgtatatcttcattttttcccatcaccagcaaatgttcctcttccttaaaccgataattcgccggcggcattgcctgaatcccatctgctgtctgaatcgccacaatattcgtgtggtatttgttacgaatatccatctcaataatagtttttccaatccacttcggcaacggagccagctcatagatggaaaaatcttcgcccagttcaaaatagtcgaaaacactgtcggaactgtactgcaccgcacatttttctgcaatatcccgatccgggtagatgatcttgtcggcaccgttgcgcaaaaggaattttgcatgcacatcgcgggttgctttgctgatgacatattttgccccaagttcttttaacagacaggtgatctccagactgctctgaaaatttgtgccgatgcagacaaaacatttgtcaaagtttccgacgcccaggctttttaacacttcttctttggtgcagtcaccgatttttgcatctgtgacataagggagaagcggctctaataattcttcgttctgatcaacgatcataacttcgtttccaagtttggcaagatttcggcataaatgactgccgaaacgtcccattccgataattaaaaatgatttcataataaaatcctttctgcgaaaataaatagatttggtgtaataaaataaatagtaacaaatatgcaatggcaagacgttatcagaagtaatttgccgtatgtaataacgaatatgccgaaaaatcaaagtataccaacagattgccgggtcttatgtttaaccgatgctgatatgctctttgggctggcgaacgtgtgcgagtcgttttttatctgtaaaggacatggcgaaggaaagacttcccacacgtccaagatacatcaaaatgatcaggatcactttggcagccggtaccagagaaggtgtgacaccagtgctcatgccaacagtgctgaccgcggatacgacatcgaaaagtatcgtggtcaggtcaagattctgcagcattgagatcaaaaacgtggcaaccactgccagcagcagatgtgtcgtaaatacagcagcagcttttgaaattgcatcatcttccatccggcgtttgaaaatgttgacaccgtctgttctggtcagggtagagcgcagatacaggatcagtacggcaatcgttgtcactttgataccgcccgcggtagaacccggacaaccgccgataaacatcaggataatggtcagaaactgactgctctggctcaaagaggcaatgtcggttgtgttaaaaccggcggttcgtggtgtgacggcacaaaacagagcatttaaaagtgcctgggaaccgctcatgtctgcaaacaatgcatggcgctccagaatccagaacaaaatcgttggaacaacagccaggattacggaagtgaccagcacaattttggtatgcagtgcatatttgcgaaaatgtagtttgtgttcttttaaatcactccagacgaaaaatccaatgccgccaatcaggatcagagccatcagagtcaggcaaaccacccagtttgcgttgtatccgatgaaggatgacattccaaatgcgcccatcaggtcaaaacctgcattacaaaaagcggagatggaatggaaaatgccataataaagtgcctgatgaaaaggcatatcccgccaaaaacagagggtcaggataatggcaccgacaccttcaaatagtaaagttccccgtaagattaatcgtgcaagccggacgattcctccggtattcagcacatttacgctctcttttaataaaccgcgctggcgtaacgtgatttttttgcgaagaaaaagggaaaaaccgaaaccaaaagtgataaatcccagtcccccaatctgaatcagggtgataatgatgatctgcccgaacagtgaccagtgcagatacgtatttgtgactaccagtcccgtcacacaggtggcactggtggatgtaaacagagcagtgagaaaatcagtgggtgtaccgctccggcttgccgcaggtgtcataagcagcagcgtaccgatcagaatgatacagaaaaatcccagtgcgatcatctgcatctgtgaaatattatttcttgctttggcaaacatagtaacctccaaaattcaatcaagtcgaacttcaaaacagtataccatgattcttgtaaatatgctatactgtacgaaaagtttgacaggaaggagatggcgtgatggcaagtctgattttttggtttattgtattgatttttattatttccagtgtagtaaaaggcaaaaagaagcctgcaaacagaaatagaaatgcaggaacgacacaaagctgtccggtacagaaaccgcggacacagccgacagcggcacaaacggtgaaaaaacagcagacatcctatggatcttataaacagtcgaaggcaaagccagcggcttccacgacaaaatattccgatacaaaaaaagcaaaagcttctgaacagcgcgcacagcaacagcagcaggcagagcagatgagcatttttgatcagaacgagattgtggcagcagcaaaagcgaacaccagagaggtggagctggataatgacagggacgctgaaaatcagaatctgatggatgatgtctatgaggtaatggtcaaaggaccaaaaaacaacatagaatttcagcgtgattttattgcagaaggaatggatatgttaaattcattcaacgtataagtttgggattagcgaaaaacatagaaaacaatgtttactagttttggcttcggataataaagtaaaatagaaggatgcatgacaaaacatagaatgaagctgtagacatgcagatttaaacagatcaggggagtgatcgaagaaagaatcaggggcagaaagaaggaatcaaaatggcacagggaaatccgttaccgggagaaaaatatttacattttaaaaagaaattatatcagatcattgcagtggcaaaacattcagaaaccatggaaccgtatgttgtgtatcaggcgttgtatggtgattttggtgtatacatccgcccgtatgatatgtttgtgagtgaagtcgatcatgaaaaatatccggaagtgacacagaaataccggtttcaatatgtagatccagagacgataagccagaaagaagaaaatgtaagtgcagcaacgatgtgtcagaaggaagaaccagtaagcacatccgtggaaaatgacaataaagaaatagaaaaaacagtagtagcttcgccagaagatgataccatagagcaaatcaatccatggttactgcgttttctggatgcagaaaccatggaagaaaagtatcagattgtctgcgacatcaaaaatgaaattacagatcgtctgatcgatgatctggcagttgttgtcgatgtggtaatcccggagggaaaattaagtgatcgttatgaccagttaaaatattgtatccgcacacgtcagaaatacgaacagacctctctctggagaaaatagtatctgataaaatcagatgccaaccctgcatggggtgactaacaaatagcgatgcacagaaagtttgtctgctaagttagtttgctttaggcatgttttatctatgcttctggatgataaccgtggtggctcatatagctgttgtgatatttgccggaataggtaacatcttcggtgaaccattccggaggtgtaaagctgttcgcttcatcttcagaaggaaattccacttctgcaaggatcagcggagcaagttctccctcaaaaatatccagttcgatggtataggtaccaaatggaatacaatatctcttttttgtgataagcagaccgtctgctttcgggcggagatgttcgtaaccctctgcggtcagcggaagattgtattcttctcttgccatgagaccaccggatttgtaggtgagaaaataagcatcatcctgtttgcggatgcgcacaaccggattggtacacagatagccctgttcaatgtggcggcatggatattgttccagatgttccggtaactgtcggattaaaaatttgcgttcgatttccataataaggctccattctgatagttattgttcatgtccttttagtataagctattgttggaaaaatgcaatcagaagcaaatttgtttatgaattttataatgaaacggaggaaataatatgagtaaaatagcagtattatgtaacgatggtgtagaagagattgaatgcctgaccgtagttgatttttgcagaagagcaggtatcgaggttataacagtttcagtgaccggaaaacgccagatcatgggcgcacatcagatcgtttttcatgcagatgaagtatatgcagatatgaattttgatgaattcgacggaatcgtttatccgggtggaccgggaaccggcgcaatgggtgaaaaaccgggtgtcaaagagctggcgcagaaatttttaaataatggaaaaatgctggcagcaatctgtgcggcaccgggaatgatttctgaaaccggcattttaaaagaaaaacacgcaaccggctatccgggatgcaaaccggaaggcggcgcaatctggagcgaagatgcagcagttgttgacggaaatctggtaaccggaaaaggaccgggagcagcggctgaatttgcgattgagatcattcgttaccttgcaggtgacataaaagcggagcagattcgtacgtctaccatgatgtaaattgctttgcgacagtaaatttagataatgaaggcaccagtcaggcaatcttacctctgcagctaacaatcgcttgtcgaggaaagattgcctgactggtgccatatacgttttgttgatctcagtcggagattgacctcccactgagaaatacttgttactactcaccacttgcagaagtgggagtctcaactcagactgagataaaatacagaaggtcttttattagactttaaatagtaaattttaagccacccaccaataagctatagccaaaatctataactggctattttttttgtgtattagacagcctttatttgatgtgatagtatcaatgacatgcaaaacctattaagtaagtatgaataataggaaatgtaaaaacgggaggaaaaacaaatgacagatgttctgatcatcggaagtggaccggcaggtatgactgcagcgatttatgcaaagcgtgccaatctggacgtattggtagtagaaaaagaatatgaaggaaccggtcagatggcagagagcagccgcattgacaactatcccggtttttatggaagtaacggttatgaattaggcgaaaaaatccgggaacatgtggaagcacttggtgttgcatttttcgaaggcgaagcagtttcctttgaaaaaacagctacaggatttaaaaccacactggaaagtagcgaggtgctggagagcaaaacagtgatctacaccgcaggagctgcacatcgaaaacttaccgttctgggaagtgagaaattcgataacagaggaatttcctactgtgcatcctgtgacggagctttttaccagaaaagagatgtagccgtaatcggtggaggaaacagtgcattagatgatgccttattactttccgaaatctgtaacaaagtttatctgattcaccgcagagcagaatttcgaggagatgcatccacacttgaaaaactggagcaaaaagaaaatgtagaaatcattcgaaatgcgaaagtacaggaaatcgtcggtgaaaagaaagctgaaaagcttttattagatacaggagtaacacttgagattcaaggcattttcgtagcaattggcatgatcccgcagacagaagccgtcaaagatctggtgacgttggatgagagcggatacatcaaagccggagaagatggcataacttcagaatctggattttttgtggcaggagatgtcagaacaaaagaactcagacagattatcaccgcagccgcagatggagcaaacgctgcaaattcagcaatacagtatattattagaaaataatctgattcaataatagagaatataagacgacacagatataaaactgagattgccagatagagaacctgattttaaaaatatgaatataatgcagaagcaatgatgtttttgcaatatatatgaggatagcgaatatcctttgcctttgataaaacaaaaaacaacccagtcagaataaagggtggagaaatagaaaggaaacaacagcatggtaaacgaattgaccagagaaaattttgacaaaacaatcagagagcatagcactgtcgttgtagaattctattctgcaacctgtaagcactgtaagaagctggaggcgggcatcacagaactttccgaggaagcaggaaatgatgtttatttcggaaaagtactgattccggatgaactgtctctggcagacgaatatgaaatcagctccgtaccgaccttgttatatttcaaggacggagaaatcagagagaaatccgtaggatttacacacaaattaatcatcgcagaaaacatcaaaaaattatagaccgaaccacttttttgggaaaaaggtcaaatttacatagcagaatttagaaaagaccgaatcgctttttcgtgggatacttcttgaattgtgtttaagaaggtagaaaggtcagaatttagaacagaacaggagacaacatcatgggatatccaagtatttttccaacaggaacattaatttacaataaagacaaaacattcaacggttacaccgtttttccatccgcaaaaggagcacttttaattgacatgaacggtcgtgaagttcagctctgggcaggacttggcggatttccgaacaagatccttccgggcggatatgtaatgggaactacaggaaccagacctggtaaaaaagcgtatcaggatcagatcgatctggttcaggtagactgggacggcaacatcgtctggaaattcgataaaacagagctgatcgcagacggtgacaaagatccggtttacatggcaagacagcatcatgatttccagagagagggatctaccgttggatattattatccgggcggagagccaaaaacagacagtggaaataccttacttctgacacatgagaacttatacaatcatgatatttccgacaaacgactgatcgacgacaagatcatcgaagttgactgggaaggaaatattttatggagctggcgtgcaagtgatcattttgatcagcttggatttgacgaggcagcaaaaaatgcactgttccgtaatccatgcctgcagggggaagccggcggcgactggatgcacatcaacagcatgtccgtattaggtgagaacaaatggtacgatcagggagatgagcgtttccatccggataacattatcattgatgcacgaaattccaacattcttgccatcatcagcaaagagacaggcgacattgtatggcgcgtaggaccggattttaacgagagtgaagcaaccaaaaaacttggatggatcatcggacagcatcatttacatatgattccgaaaggacttccgggcgaaggcgatctgcttatatttgataatggtggcgaaggcggttacggtactccgaaccctggcgcattaactggtgtcaataacgcaagaagagattattccagagtattacagtttaatccgatcacactggagatcacatggcagtatacaccgttagaagcaggaaacctgttattcacagatgcatccaaattttacagctcctatatcagtggcgcacagagacttccaaacggaaatacactgatcacagagggatctgacggacgtctgatcgaggtaacaccggaccatgaaatcgtatgggagtacatcaatccgtatttcaacaccattcttggtcagttcactaacaatatggtatatcgtgcttatcgtgtaccatatgagtggattccacaggtggaaaaaccagaagaaatttccgtagagccgattgatgtagaaaccttccgcgtaccgggctctttagtaggaaacggacttggaaaagtgacaaccatcgatggtgtagatccgaatgcacgtctgatgacaggtggcggtgcatctggggatgaggatgaagaagtaaacttctgtgtcgcaactgtaaagaaaagtgatctgatcaagaaataggaagattatctgtttcacaaagaaataaataataaagaaacaatagatacataacacaggcaggtggaaaaagatatctgtttgtgaaacaaatgagagttaaaaagtagaattccgcagaaagggagtgaaggaaaatgaaaagcaaaaaaattactgcagcagttttaggtatcgttcttacattaggtctggtggtcagcggttgtggaagcaacaacggaacatcctctgatggaagtgcgaaagcagaaaaaaataaagatggttatgaggttgtcaacatcggttttccaagtgccggatatgaatgggcagagggagcactggcagtggcagaggaaaaaggatatctggatgaatatctgaatccattaggctacgatgcagacctgattccgtttacaggagcagcaccggcgattcatgaggcgttagtatccggagatctggattacgcatattatgcggggtttgcaggaatcatggcaaaatcaaacggcattgatacgaaattactgaccgtgacaagttttggttctgtatggcagcttgcagtcagcgctgattccggtatcacttccttacaggatttaaaaggaaaaaccatttcctaccagagaggtgcaacccctcagatgtatgtgctgaaagtgttagaagaagctggcctgacagagaatgacgtacagcttgttaacagcacaatcccggaaggattatccagtctttccaccggggctgtagatgcagcagttgttacatacggacaggcagatactttagttgaacagggaaaagcgactattttacataaaggtgtggaagctgatccggatgttttctatgagccaaacgtattgatcggaagatctgattatatcagtgcaaattctgatgtgagtgtggcaatcattaaagcaatgctgaaggcaaaagatgatatcgtatctgatccggaggcattctatgaattatctgctgagaagagcggaagaacgttagagcaggtaaaatcggtagctgtatctgatctggaacttggatatccgatcagtctggatgacagatatattacttcactgaaaaatattgaagaatttgagctgaacaacaacatcatcaccaatcaggtagattttgattcctggattgattcctcctatctggaaaaagcagtgcaggagtatcaggaaagcgcacagtaaggaggtcgcgtgagcatgtacaaaggaaataacgtatttatacaaaaactgttgatttttatcaacatgatcatattgccggtcctcattgtactggcgtggcattttgccacctctaccggtgcgatgtctacactgatcttaccaaagatcagcaccgtgcttgaaaccttaaaagaacagatcgcaaacggcaccctgccgggagatatcggcatcagtttaagccgtattgccaaaggttatgcactggcagtcgttgtaggaattttgcttggcgtgctcatgggaatgaacaaatttgcaaaccgtttcttcatgctgacatttaccgcgatccgtcagattccaatgatcgcatgggttccgatcctgatcatctggtttggtatcggtgaggagtcaaaagttgccgttatttttctggcagcatatttcccggttctggtcaacaccgtcagcggtattgagcgtaccgatccgaagctgatcgaagttggaaaaatgtatcatctgaatggttggcagcagtttacaaaaatctatctgccatctgcacttccgtccatttttgtcggattaaaactgggactcagcgtatcctggatggcagtggtaggtgcagagatgatcgcagctacttccggtatcggtttccgtatcaacgatgcacgaagcctgatgcagtatccggttgtatttgcaggaatcatcgccatcgcagtagttggtgtgatcatggatctggcgatctcactgatcggcaaattatgcacaccatgggaaaaaggcaggtaagcacaaatgggaaagacattatcaattcagaacgtaaataaaagctttattgtcgatgggcagaaagtagatgtattaaaagatatcaaccttgagattcaggaaggtgagtttatcgccatcgttggacacagtggctgcggaaaaagtactctgttaaaaatcattgcaggacttgagaaaaacgacactggtctggtaactgtggacggaaatgaagtcaaaggaccgggcatggaccgtggcatgatttttcaggagcaccgcctgtttccatggatgagcattgaaaaaaatgtacagctgggattaaagggactgagtaaagaggaaaaaataaagctttccgatcagtatctggaacttgtaaaattaagcgagttcaaaaaggcatatccgagccagttatccggtggtatgtcacagcgtgcagctatcgcaagatcactggtgagtcagccggaaattctgctgcttgacgagccgtttggcgcattggatgcactgaccaagatcgagttacaggaagagttactgaagatccgtgagcgttttcataatacaatgatcatggttacacatgatatcgaagaagccgtatttttggcagatcgcattgtggtaatgtccgcaagaccgggacgtatcaaagatgtcatcgaagtagaacttggaaaataccgtgatcgtggtggtagcgattttgcacactacaaaaagaaaattttcgattatttcttcgaagaaaagaccgttgtaccggagtacaacatttaaaaagaaaatccacacaaatggatttgcatatttgttttctatagaaaaatctctctgaatatgcttgtcaaacagacagcagaagtcagagggattttttgtgtacagatgcagagattttgagaagattatgccagcttacgctgaccagaattacgcaccaaggttcacatatgattgacttgaatgtgaagaaaaagaatcgtcgggtgaaacgtctgatttccttgcatatcgaaaagaaaaaagataaaatgaattcaagagagcatcagtattcttaatgcaaaatgtgcgtcatgcaaagcgtgacatattcttctacgcatttttgcaatacagaaattttttacgaagacaagttttacaaaggacaagaaaatggaagaattatatttggggatatccggttttttattgatggttttgacactttttctgataaaaatcggcacgtcgattgaaagaagtatcagtaagacatatgcaattatttttactacagcagtggagctatatgtagcgctggatgccctttttgtaaaatgcttttttacagaaggaggaagtgtaagggcatttcggatcattgcatttgcatttctgttgatgtacgttatcatgccgtatacctggcatttgtttatacaaagctatatgggagtgcagcgcagaatctgcataaggatactggaagcggttccgatgatgcttctggttgttcttgtgattgtgtctgtgtttaatgggatgctgtggagcattgatgatcatagtgtgtatactcgtggaccgtggttcaagtcgtttgcggttttgaatctgttttactatggatttgcctttgtacagaattgctatattctgattacaaaaaataaaaacggaaagaggtatgcactgatatccgccgttttttcatctattccgttgatggggattctgattaatatttttgttttccctttgcatgatgcatatccgctccaaccttattgcctgacagcaacggtgctgctggcatatctttttatggtggagcatcagaagaaagagcatgacagggaacagcgggaaaaattactgctggcattggaacatgagaaagaagctgccagagatgcgaaggaagccggtgcagtgaaagctacgtttctggcaaacatgtctcatgacattcgtacaccgatgaatgcaatccttgga

SEQ ID NO: 13216 - DNA, 2263 bp, Unknown
  gut microbiota DNA sequence
ggaaagctgacgttggaggaaaccgccgtagatctgaagcagatatcagaaaaactgaatatgataatggaatacagcatggaaaagaaacacattcagtttcagattatcagtgaattgcaaaacccctgtgtctggtgtgatgagacaaagttacagcagattctggtcaatatactgaataatgcagtgaaatttacacctgagggtggaaagattacactagagtatgaagaaacaccggtgaatgaagaattctcagaatatcggatttccgtgcaggataccggtatcggcatggatgaggaatttcaaaaacatgcctttgaagcgtttgagcgtgagcggacttccacggaaagtaagacggaaggaaccggtctgggacttgcaattgtaaagaaactggttgaactgatgggcggacaggtgagcattcaaagcaaagtaggacagggtacaaaaatcactgtttgtctgcgtttgaagattgcgggacagggcgatattatcgataagcaaaaagaaccggcaattgccacaaatgcggaactggcgggagtgcgtgtccttttgacagaagataatgagctgaatgcggaaatcgcaaaagaaattctgaccagtgcaggaatgatggtggactgggtagaagacggaagtgcatgtttaaatcgtctgagacaggtggaggtcggatattatcaggtcatattaatggatattcagatgccgaaaatgaacggatatgaagccacaaaacgtattcgtgagcttccggtttcaggaatggctcatattccgatcatagcaatgacagcgaatgcattttcggatgatcagaaacgggcattggatgttggaatgaatggatttattacaaagccgattgatgtggaccggatgctgaggacgattcagcagacgctgcaaagataaggatggaaaaatttgatatttcagagaaacaggataaaaatcatggtaactttgagtggattcagagttaccatgattttttagtgatttttttcaaatgatgtagattaattagtttatatcaatgtaaactgctaaaacggacggaattgttaattgtgcaccaagtactgttgtataagaatataagccagtagaggtaccataaaaactaatgatatcatcttctaatacacggttcgaaggatctggtacatacatttcatacaataaatgatggagatatcgtgatgatagattattcacctttttggaaaacgcttgaaaattcaactgaaaattggtatacattaacgaataagcataatttatatcatagtacacttcatcgtttaaaaaggaaaaatatggaggggtaaaatggaacagaacagaaaccgaatagacaatattataaaaaaactgatagaaactcatacgaccatttcaacaatggaaagttgtacttccggcatgattgcatctatgatcactgatacggaaggagcatcagcaatctttccgggaggatttgttacttatttgaatgagacaaagattctgatcggtgtggatgcaaaagtaattgagaaatacggtgtatattccagagaatgtgcagaggcaatggcacaaactgcacaggaaaagttgaacacggatgttgccattggtatcactggcacaaccggaaatgtagatccgaataatgctgacagtgtgcaggggcaggtgtatttttgtattcggattggaaatcaggcgcatacttttgaattacaagcagaggtggcggatatgagcagacatgagatcaagcagatgtatgcggatgaggtgtttgaaaaattaggggaattgatctcagtctgagttgagactcccacttttgcaagtggtgagtagtaacaagtatttctcagtgggagttcaatctccgactgagatcaatgctccgcgcggatgtgcagtgattctgaaaagaagatgtcagcttgcgctgatcagaatcacgcaccaagtctcacgtgcgttcgacttgaaaaaatataatgcgtaacgaatactgagtatgaaatgttttacagaataaaatacaaatgtatgtgtttgaaaacggctaatggttgtacatttcataatccttgcgaaggaaagaaaaagcagttatactgatagatattaaaaaagtggaggaaacccatatgcccaaaaaattttgtgttactggaatatgtattccagaaaaaaattatatggtagatatcagtaagcgaatcgatac

SEQ ID NO: 13217 - DNA, 10782 bp, Unknown
  gut microbiota DNA sequence
ggcaggattacagaggtgcgcagttgaagtatgtcatgcaattgcatgacgcgcacctcgcaacaagaatgctggagcattcttgaatttcgttatacaaaagaaaacggatttcaactattggaaaaagatttgtgtatgaaactgaaaccatggatggatgaaactttccgtaatgtattttgatgtgaaagaattgcaggaatgggtaagccgctgtgagaaataaacagaaactttaatgagttgaagtgaaaaaacttgctttttattttgtgccttattataatattggaattaagagtttgtaaaaaagaattttctaaggagggccagaaccatgataaaattacatgagaatggtgtatatctgctcaatggaacggagattatcgaagataatcaggaggctgcagcatgtcttgcggcaaaaacaggaaaaacagtgaccgctgcagaagctgcaaccggtacaatggcatatcgtattttgaaagcacacaatacttccggaaatatggaacagcttcagattaaatttgataagctgacttcccatgatatcacatttgtcggtatcatccagacagcacgtgcgtcaggactggagaaattcccggttccttatgtactgacaaactgccacaatagtctgtgtgcggttggcggaaccatcaacgaagatgaccacatgtttggactgagctgtgcaaagagatacggcggaatctatgtaccgcctcatcaggcagttatccatcagtttgcccgtgaaatgcttgccggcggtggcaaaatgatccttggttctgactcccatacacgttacggtgcccttggtactatggctatgggcgagggtggtccggagctggtaaaacagttactgtgcaaaacatacgacatcaaaatgccgggtgtagtagcaatttacctgaccggtgaaccgatgaaaggtgttggcccgcaggatgtggctctggcaatcattggagcggtatttaaaaatggttatgtaaataacaaagttatggagtttgtcggacctggtgttgcatccttaagcgcagatttccgtatcggcgtggatgttatgaccacagagacaacctgtctgtcttctatctgggttacagatgaaaaaattaaagagttttatgatattcacggcagatctgcagattatgcagaactgaaaccggaagcagttacttactacgatggctgtgttgaggtgaacttaagcgagatcaaatcaatgatcgctatgccgttccacccaagcaatacttataccattgatgaagtaaatgcaaatctggaagagattctggctgaagttgagaaaaacgcgttagtaagtctggatggagccgtagagtacaaattaagagataagattcgcaacggaaaattatatgtagatcagggaattatcgcaggatgtgccggtggtggatttgaaaatatctgtgccgctgctgacattctgaatggcaagagcatcggaccggatgagtttactttaagcgtatatccggcaagtatgccagtttacatggaattagtaaaaaatggtgccgcagctaagatcatggagacaggtgcaattatgaagactgcattctgtggaccatgtttcggtgccggtgatacaccgaataacaacggattcagtatccgtcatacaaccagaaacttcccgaaccgtgaaggttccaaactgcagaatggacagatcgcttccgtagcactgatggatgcacgttccatcgctgcaaccgctgcaaacaaaggttatctgacaccggctacagatctggatgtagaatacacaggaccgaaatatttctttgataaaacaatttatgagaaccgtgtatttgacagcaaaggtgtggctgatccgaacgaagaactgaaattcggaccaaacatcaaagactggccggcaatgagcgcactgacagacaatctggttttgaaagtggtatctgagatccatgatccggttactacaacagatgagctgatcccgtccggtgagacatcttcttatcgttccaatccgctggcactggctgagttcgccctgtccagaaaggatccggaatatgtaggtcgggcaaaagaagttcagaaagcagagaaagcaagaatcgccggtgagaaaccgacggaggcacttccggagcttgcaccggtcattgagaccattaaggcaaaatacccggatctgaactgtgagaacttcggtatcggaagtacgatttttgcagtaaaaccgggtgacggttctgccagagagcaggctgcttcctgccagaaagtattaggcggatgggcaaacattgccaacgagtacgcaaccaaacgttatcgttccaacctgatcaactggggtatgcttccattcctgattccggaaggagatctcccatttgcaaacggtgattatctgtttgtaccgaatgtgcgcaaagccatcgaggacaagctgacagatatcgaagcatacgtagtaaaagacggtgaattaaaaccgtttactctgaaaatgggtgatctgacagaggatgagagaaccatcattctgaaaggctgcctgatcaattattacagagattaaaaagatccttaagattgtataaacaacggataaagaaaaacgaaaagaatcctggaaacgggattctttttgatttttttgcgaacaattctgttatgtgcagaaaaagtatggtatacttatttcagctatcacgattgagtttgggagatttttagaaaggcaattttagcatgcaggaagaaacaaaaaaagaacatactgcaactgagaaacaaccggagaaaaagaaagtaaatctggatatccgaccatatctggcgattggcctgactgtcattttgatagttgtggtctgcatcgcaatcttttttgtggtacttcgatttgacggattattttccggtttccaaaagattttacagagtcttcaggccattttagtaggagtgatcgtggcatatctgcttaatccgatcatgaaatggtttgaacgttttttatataaaagaagcagacaaaaatcaaaagaactgacacgcaaacagtgtcagaaaatccgggcagcgtcggtagcttttgccatggcgatctttttggcaatcattgtggtactgatctggttgatcattccacggctggtagtttgtattgaagatatcgtcacgagtatgggtgaaaaagtccaaaatctaacgaaatgggtggatcgtctgaccaaacagaacagtgctatatcaggaaagctggatacgttcattgcggatgcatcggtttatctggaagactggctgcgcaaaaatgtgttgcagcagtctgattttattgcaagtatcacaaccggtgtttataacgtcgtaagagcaatctttaatgtgatcatcggttttattgttgctgtatatgtgttaatgaccaaagaaaaattcattggtcagttaaagaaaattatttatgcgatcttccgtccacgttacggaaatgtggtcatggaagtgatacgaaaagcagatgatgtgtttggtggatttttcatcggaaagattattgattcgctgatcattggctgtatctgttttgttggactggctattttgcgtatgccgtatgtggcactggtcagcgtaatcgttggtgtgacgaatatcatcccgttttttggaccgtatatcggcgcgattccaagtgtgatcctgatctttttggtagatccgatgaaaggtctttatttcattatcttcatcattgttttacagcaggtggacggaaatgttattggtccgaagatccttggaaatacgactggtctgagcccgttctgggttatctttgcaatcctgttgtttggcggaagttttggcgtcattggtatgttatttggtgtaccgatttttgcggtactgtactatattatcaagcgtgtgatagagcatgtgttgaaaaagcggcgattgccggaaggaaccgatgagtatatcgaacttgacacggtggatactgtgacaaatgaagtgaagatgaaagctacggaggagccggaagcgtcgatccgcaaatatgaggagacagaggaaaaaaagtaaatttttgaataaaacaaaaaatacagacatgaggtgaataacggtggataagtatgagtataagttaaagttggagcagcttcagaatctgatggctgcaggtgactacgccacagcatcagagatggcggataccattaactggaaaaaggtgcgcagcagcaatacactgtgtatggtgagcgatatttacgaaaaaacagagaaatatgacgcctgcagggaagtgttactgcaggcatatgatcattctccgattggaagaaatatcgtaagcaagctggcagaagtgtccattaaagcaaaaaggattgatgaggctgaggaatattataacgagtttcttgagattgcaccaaaagacaatatgcgttatgtgctggcatatgagatcagctgcctgaaggatgcgccactgacagaccgtatcgcgatcctggaagaattgaaagagcatgaatatacggaaaaatgggcatatgagctggctgcattatacggacaggcagatatgcgtgataaatgcgtggagacctgtgacgaactgattctctggtttggtgaaggtgaatatgtggagaaagcgttagatctgaaacgtctgtatcaaccgcttactccggcacaggaggaaaaatacaaacagttccgtgagaaaaaaggaatggtggagatcagcattccggcagcaccggagcgcaaaaatgtcatccatgagatggtaaagacaccggagacaacggttacagcaagcaagtttaatacttccaacctggaggaagaacttgcaaagagcatgaagcagatcatggaagcaaccaaaaaagaaaccgtggtagataccatggagaacatcaagaagattgtcggtgacattccatatctgaacggtgagcatgaggcagaggagacctttacgtttgacaaagagaagatcaatgagcaggtcgacgagcggttaaagaaagaatttgacaaactgatggctgaaaatgcagaagaatccgataagaaagacgagccggaaacggaagcgaagccggaggagacattgtcagaagccattgaggaagaaaatgcagaagaggataccattgaggaaaaagcggcatccgcacaggcaagcattgaagaagttctggatgaatgggaaaagacaaaacatgcggctgagatcgcaatcgcagcggcagaacagaagaagctggaaatttccaaagagcatgcactggtggaagccggtgagatcatggaacgtctgaaaacactgatcccgattttatcagcaactccgggagaggaaatcccggttccggaagataccgttgcagcagcactggttccggatgaatctgagaaagcagaagcaaaagaagatttagaggaaacagcagaagcagagtctgagacggaagaaacaaaagaagcagcagaaactgtagagacagaatcacagattgagccggaaacagaaaaagcggctgatgaggagactgtagttgaagcagctgaaccgtctgtagaggcagcagatgcagaactggaagatgttgaagaagaagcaccggtagaggaaaaagaagatctgtctacaacaaaagaaatgccggatttgaaggcagcacgtacagaaaaaacagcagagacagaggaagaagccgaagctgaggaagaaccgaaagaagaaaaacgactgagtgtggttgagccggttccggatgaagaactggaaaaagtactggcacaggcaacacagatgtttgtggaaaatgcaaatgtagaagttccggtaaccggaacagcaccgaccggcgtatctcagaatactggtgttttaccggagatccagatgccggatgatatcgaggaagacaaaaaagaactgacagaggaacagaaggaattattctcttatttccttccagtaccgggtatggaagaccagatccgtcaggttctgttaggcgcaaaaacaagaatcggcaattccgttacttctctggcaggtaatattctgatccagggtgaggaaggaagtggtaaaaccgtatttgccacaagcctgatcaaagcaattcagaaagaaatcggaaatgaagatgcgaagatcggcaagattagtgcagaatctctgaaccacaaagattttgcagcgctgattccgaagattgagggcggatatctgatcgtagacaaggcaggtcagctgacagcagaaacagcagcttacatgtctcaggttatggaacagaatacacagggtatggttgtgatcctggaagataccagagcaggaatccgtaaagttatgaaccttgattttggcttcactaagaaatttacagaaaagatcgatattccgatttttacgattgatgagttagttgattttggtaaatcttatgcaaaagagatggagtgcaccattgatgagatgggcgttctggctttatataaccgtatcaacaatattcagaagctggatcgcgcaaccacactggcagaggtaaaagacattgtggatgaagccattgagaaagcagaaggcagcggaatcaaaaaagcatttggttctattttctcaaagaaatataacgaaaacgattatctgattcttcatgaaaaagattttgagtaatcgctgaaaaagatttatccgtaaatcttgaaaataaaagagggttttaaggaggagaaacattatggggaacatttctgagtatgatatgtatctgtttggcgcaggagtgcattatgatatgtatatgaaacttggggcacatccttgtaaaaaaggcagatggcagggcgtaaattttgctgtctgggcaccgaacgcaaaacgtgtgtgggtgatcggttcattcaatgactggaatgagacttcacatgagatgaaacgactggagccaaatggcatttatgagctgtttgtcagcaatgtgaagatcggtgacatgtataaatacctcattgaaactcaggatggacgcaaactgtataaggcagatccgtatgcaaactatgcggagatgcgtccgggaacagcatccaaggtggcagatatcagcaaactgaaatggtctgatgagaaatggatgcaggcgcgtgctgagcacaaggatgatgaggtataccgtcagccgatgtccatttatgaggtacatccgggttcttggaaacgtcatgcgggttatgatgaagacaccggattctatacataccgtgaactggcagtggaactgaccaaatatgtaaaagagatgggatatactcacgttgagctgatgggaatttccgagtatccgtttgatggttcctggggctatcaggtaaccggatactttgcaccgacttcccgttatggaacgccggaggactttgcatatctggtaaactatctgcacaaacataaaatcggtgttattcttgactgggttccggcgcatttcccaagagatgcacacggactggcagagtttgacggaacctgtctgtatgagtacgcagatccgcgaaaaggagagcatccggactggggcaccaagatttttgcctatggaaaaactgaggtcaagaacttcctgttaaactccgcattgctctgggtagaaaaatatcacattgacggacttcgtgtggatgcggttgcttccatgctgtatctggattacggaaaagaagccggtcagtgggtaccaaacgagtacggcgagaataagaatctggaagcaatcgaattcttccgtcacttaaatacactggtttgcggcagaaatccgggcgcagtgatgatcgcagaagaatccaccgcatggccgatggtaaccggaaaagccgaagatggcggtctgaattttacttacaaatggaatatgggatggatgcatgatttcctggattacatgaaactggatccgtatttccgtaaagataaccacaacaagatgacatttgccatgagctataactacagtgagaaatacattctggtactttctcacgatgaggtggttcatctgaaatgttccatgctgaacaaaatgccgggacttggcattgataaataccgcaacctgatggttggatattccttcatgatggggcatccgggcaagaagttgttatttatgggacaggatttcggacagttgcgagagtggagtgagaaacgcgaacttgactgggatcttctggaagatgaaaaacacagtcacttacagtcatttgtaaaaggactgctgacgatttacaaaaaatatccggcaatgtatgagctggatgatcatccggaaggatttgagtggatcaatccaaatgacggatatcgaagcattttcagttttgtgcgtcacagcaaatccggaagaaacagcttactgtttgtatgcaactttacaccgatggcacgtccggattatcgtgtgggcgtaccgaaaaagaaaaaatacaccttattactgaacagtgatgatgcgaaattcggcggcgaaggtacagagcgaccaaccgtttaccaggctgagaaatcagagtgtgacggcagaccgtattcctttgcatatgaacttccgccatatggagtagcaatattcaaattctaattaagatacgagagaaaacataactttcaccttaatggtgagaaacaacgatatcaggagcatttttgttccggggagtcccactgcagatcatttatgatgctcatacagtgggatttcttttataaaattttgtgaaatacgataggaaggaaatggagcagaatggcaatattagatacgattcttcaacaactaaatatatgggatgggcagctgttgctttttattcaaaaccatttgcgttcggaaacgttgaatccgatcgtgatcgctgtcacgaatcttggaaatgccggaattttctggattgtgttatctgtcattttactgtttccaaagaaaaccagacgtgcggggattttgtccctgttggcgctgcttggttctctgtgtgtgacaaatttcctgttgaaaaattatgtggcgcgtgttcgcccttacgaagtcgtgcagggattgcaatgcctgatcccggcacaaaaagactggtccttcccgtccggacatgcatccgcatccttcgcgtcagcggtggtgatctataaaagctgtcatcgcggaatcggggtgccggcgttgattcttgcgtttgcgatatcattatcgagattgtatgttggagtgcattatccgagtgatgtgattgtgggaatgatcattggaacgctgattgcgctgatattgttttggatctttggggagaagaaatataaggcgcgggcacgtagacatcgctaaaaaagtttatctcagtctgagttgagactcccacttctgcaagtggtgagtagtaacaagtatttctcagtggaatatgtgaaaacaaaatcagagaaagtttcctcactcactagacgttcactacctttgtttcacggcggtttcatcgcgcacgttcccggctcctataaaagctggtcgcctcccacttgcgcaaaaccttgtgaaactcagtcgttcgcttaatcgttcgttgaggaaactttctctgattttgttatttcagttttatatagaatagaccagcttttattaaagtaagtgtaaagcatagaagtgaaacgaaaattctgcacgtagtgtggcacgcagtgcagggtggcgcaaaaatttacgaaattctctgtgtagattaagaactccagcaattttatctcaaggagcgattgttagcgactgagaaaaaattgctggcgttcctattaaaaataaaaatggtaaattttaagccatccctaaacaagaattagcatttttccggttccggataatctacaccgaaagtctccacagtaactttagccattttctgctgtgccatcggacgatcgctgtaatcacaacgtgtttctgcgatcttgtttacattctccataccttcgattactttaccgaagcctgcatactcaccatcaagatgtggtgcggcagcgtgcatgatgaagaactggcttccagcggagttcggcatcatagtacgagccatagacagaacacccggtgtatgtttcagattgtttgtgaaaccattgtgagagaactcaccgcggatgctgtatccaggaccaccgataccggttccttccggatcgccaccctgaatcataaatcctttgatgacacggtggaagataacaccgtcataaaaacctttctgtaccagtgaaataaagttatttactgtatttggggcgatttccggataaagctcagctttgatgatatcgccgttttccatttcgattgttacgattggattctgtgccataatgacctccttaattatagccaaaaaatatagtaaattggcatttctatttagcattgtatatgaaaaagtgattgttttcaacaaaattcaaaaaaatggctatttttttagtgattcgtgtgatactgtaaaaaaagaccaattttttcaaagccgcgtgcaaactgtaacatttttgaggttacagttcactcatcacatgtattcaggtaatgatcatgcttgcatgaggaattagctggatacatagtg

SEQ ID NO: 13218 - DNA, 1368 bp, Unknown
  gut microbiota DNA sequence
gtaaccggaggcagtggcagcggaaaatcggaatttgcggaaaactgctgtatgaagctgccggcagtggaaaaacgatatatcgcaacgatgcaggcatttgatgaagaaagccgggcgcggattcgcaaacaccagagagcacgcagcgggaaagggtttgcgaccattgaacagggaacgcacctggaagaggtttctcttccgaaagaatgtacggcattgctggagtgtatgtcaaatctggtggcgaatgaaatgtttgcaccggaaggacggggtgaagactgtaaggatgcaattttgcagggaatccggcatttggcagcagaggcaaaacatctggtaatcgtcagcaataatatttttgatgatgggatcgaatatgatcccggcacgaaattatatatgcggattctgggtgaaatcaatcaggaagtggcagtgctggcagatcaggtgtatgaggtggtctgcggtattccgattttaatgaaaaaagaaagagacagagtgtaactatgaaatgtctggaaagtctgattgtggcattttccatgtattctaaaataccaatgccacagatcacatggacaaaagaaaatatgaaaaatacattatgctattttccactgattggtgcagtgatcggtgcacttttgtggctctggtactggttgtgcgggatcgcaggatttggcgtgatgttacaggcggtagtggcagtattgattccagtgctggtgaccggtggaattcatctggatggttttttggatacatccgatgcattaagctcctggcagacgacagaacggcggcttgaaattttaaaagatccgcataccggagcatttgcaatcattgcatgttgtagttattttctggcagcttttggcatttggacagaagcaaaattgctggatatcgggattcttggcattggttttattttaagccgtaccttgagcggctttggtgtatgcaagtttccctgtgcgaaaaaaagcggtttggcagcgacttttgcagaggcggcagaccggaaacgttgtactattgtactgatcatagaaatgattctttgtatggctgcaatgatctggcttgatccgctgcgcggtgcgtttgcctgtgcggcagcggtgttggtatgcctgggatgcagacatttgtcaatgcagaaatttggtggaattacaggagatacccagggatttttcctgcaggtatgcgaactggtgatggcatttgtggtgattttgattccataaaaacaggttagaatatatcagatgggagccaatcccccatctgatatagcctccggcaggattacagaggtgcgcagttgaagtatgtcatgca

SEQ ID NO: 13219 - DNA, 4816 bp, Unknown
  gut microbiota DNA sequence
gtaagtgtgtgatagcacactttcttgattggtagaaaacggtacagagcgatctataaaaaatgaaaagaatgattatgtgaaagtgatgcagatttgcatatatcaatgtagcgttataaaaagtagttggtactgcttgacaggcagaggtggttgttatatcatcgatataacagtctgaagaaaaagggagaagaggtacatatgacaatcgaaatagattttaacagtgatgaggcgctgtacattcagcttcgcaatcagatcatatatgggattgcgacacgacagttccatgaaggagatgcgctgccatctgtgcgacagcttgcagaggagatcggcattaatatgcatactgtaaataaagcgtattcagttcttcgacaggaaggactgctccgcctagaccgccgccgcggaacggttatcgcgctggatattgaccggttgaaagcggaggaagaaatgcgggacagtctgcgcgttgttctggcacgcggattttgcaaaggcattaaccgtgcagaagtgcatgaacttgtggacgagatatttgatgagtatgagtaatttttggaggaacatatatgcagtatagaggatttaccagacaggcacgaaaagttatgcggatcgcggaacgtctggcagagaaagaacagcagctgcggatgggaagtgaatatattctggcaggtctgctgcaggaaaacgatggcgtggcaggacagatcctgcagcagctttctgtaaactgtgaggagatactgacattgattcacgagatttctctgccaaagacagaggaacaggtggcagacggggatttcctgacaccggagagccgcgccattgtggaagaagcctatgcagttgcagagcggtttgacagcgaactggttggaacagagcatctgcttttttctattattgagcatcgaaccagtgcggcagcacgcatgctgcttgccatgaatattaatcttggaaaagtatatgcggatattctggcagcgatgggcaaagagaatctgttttccaaggaagaagggaaagaatttcgcaccggaaagaaagcaccggaagccaaaggaacgctgatggaaaaatatactgtggatctgacggtacgggcagcggaaggggaactggatccgctgattggacgaagcgaagaattgcagcggatggttcagatcctgagccgccgtggcaaaaataatccgtgcctgatcggagaaccgggtgttggaaagaccgcgatcgtagaaggtctggcaagccgtatcgcaaccggggcagttccggaacatttgcagggaaaacggattctgacgctggatatttccggtatggtggcaggcacaaaataccgtggtgaatttgaggaacggatcaaaggcatgatgcaggaagtgcaggcagccggaaacgtgatcctgtttatcgatgagttacatacgatcattggtgcaggcggcgcggaaggtgcgctggacgcttcaaatattatgaaaccggcattgtcccgtggactgatccagatcattggagcaacaacgattgaagaataccgtaagcatattgaaaaagatgcagcgctggagcggcgtttccaaccggtgacagtggaagaaccgacggtggagcagaccgtggagattttacgtggactgcgcccacgttatgaaaaacatcatcatgtgcagatcacagaggagggcatccgggcagcagcagaactgtcagagcgttatatcaatgaccgttttctgccggataaagccattgatctgatggatgaggcagcttcgaaagcacatgtgggaaatatggataaaccggtgcagttagaggcgtataagcaagaactggaagcactggatgcagagctggagcaggcactgatcgatggagatttaagccacgcaaaacagattcgtcaggaaaaacagcaaaaacagcagcagagtgaagctgttttgaaaaaatacagacagagccttgcccggaaaaaaattcaggtgggtgaaaatgaagtggcagatgtggtatctgactggacacatatcccggtaaaacgtctgacggaaggggaagcagcgcgcctgcagcatctggaaaagacgttacataagcgtgtgattgcacaggatgaggcgatttcagcggtggcaaaagccgttcgccgtggcagagtcggactgaaagatccgtccagaccgattggttcttttctgtttcttggaccgaccggtgtcggcaaaacagagatttccaaagcactggcgcaggaagtatttggcatggaagaggcaatgatccgtgtggatatgtctgaatatatggagaaacacagtgtgtcaaaaatgatcggttccccgccaggatatgtgggatacgatgaaggcggtcagctcagcgaaaaagtgcgccgtcatccgtattcggttattttgtttgatgagatcgagaaagctcacccggatgtgtttaacattttacttcaggtgctggatgatggtcatatcacagacgcacagggtcgaaaagtagattttaaaaatacgatcatcatcatgacatccaatgccggtgcacagtctatcatggaaccgaaaaaactgggctttgcggcaaaagaagatgaaaaagccgattataatcgaatgaaatctaatgtaatggaggaagtacgccgtattttcaaaccggagtttttaaaccgaatcgacgagatcatcgtgttccattctctgaccaaggaacatatgaagaaaatcgtcggcattatgacaaaagagcttcagcacagatgcaaagagcagcttgatctggaactgaaacttaccgatgcggtaaaacagtatattgtggataaggcatatgatccgaaatatggagcacgtccgcttcgccgtatgatccagacaaaactggaggatgcgctggcagatgagctgttatccggcaatgttcacagaggagataccgttacagtccgtgtgaaaaaagatgagattgtttttgaacattaagagaaaacggcaaaatattgattttgtatgatgaatttatatcgttaaaatgaaggatagaaaacggcaattttgagaaaaaagtatcagaattgccgtatcaataaatgaggagaaacataaaaaacagcgtatggcaaaagcaaaaaaaacagtatttttctgtcagcaatgtgggtatgagtctgccaagtggatgggacagtgcccgggctgccgggaatggaatacatttgtagaagaaccggcagaagaaaaacgcagtacacatagcagtgcttcgcgtgttggacagacggtggaaccacttccgttgtcaaaagtagagatgacggatcaggagcggtttaccacaggaatcggagaacttgaccgggtgcttggaggcggaatcgttccggcgtctttggtactggtcggtggagatccgggaatcggaaaatctaccctgttgcttcaggtctgccgaaatctggcagaagcacatcatagcgtgctgtatatttccggagaggaatccatgcagcagatcaagatccgggcagaacggatcggttcttttacggatgatctggaattgttctgcgagacaaatttatcagatattgcgtcggtattgcgcaaaaagaaaccgagggtggtagtgattgactccatccagaccatgtacagcgaggatgtcaattccgcaccgggcagcgtttctcaggtgcgtcaggcaaccgcacttttgctgcaactggcaaaatcgcttggaattaccatttttattgtcggtcatgtgacaaaagaaggcgtggtagccggaccgcgtgtgttagaacatatggtggataccgttttatattttgagggagatcgtcatgctgcttatcgaattttgcgtggcgttaaaaaccgttttggttctacaaatgaaatcggtgtgtttgaaatgcagcaggcaggtctggtggaagtaaaaaatccatcggaatatatgttgaacggtcgtccggaaggggcttccggttccattgtaacctgttccattgaaggaaccagaccgattttgctggaaatccaggcacttgtatgcaaaaccggatttggactgccgcgcagaaccgcagcaggagcagacttgaatcgtgtcaatctgctgatggcagttctggaaaaaagagccggaatgccgttatcctcctgtgatgcttatgtcaatattgcaggtggaatccggatgaatgagccggcgattgatcttggaatcgttctggcaattgtgtccagctatcgggaaattgcgatttccgataagacgatctgttttggtgaagttggtttaagtggcgaagtgcgtgcagtcaatatggcaaaacagcgggtacaggaggcaaagaaacttggatttgaaacctgtattctgccgaaagtatcgttgactgatgaagtgcgtaccgatgacattcaactgatcggagtatccaatgtgcgggaagcgatttcacgtatttccgggtgatttattggtgaaaatttaatattttaagacgaaaacgaaaaatcctgtcatgacagctagccgttcgactaccttcatttcactgcggtttcatcgcgctcacttccaactcctataaaagctggtcgtttcccgttcgcgcaaaaccttgtgaaactcagttgctcactgaaacgcttgccctgacaggatttttcgttttcgtcatttacatagtgaatacaatatttgcaatctatgatatatagtgaacgatgaaactttctcc

SEQ ID NO: 13220 - DNA, 3041 bp, Unknown
  gut microbiota DNA sequence
gcaagccccttctgataagctgcgaagtagctatttggttatgagcaagtagcgaaggcggattgcgaatatcctttgataattaatccaatcttctattattttcaaaactatcaaaaaagtacataaagaatacatatcgttatggtacaataaatacaacgaaaaagaagtgtattgggggctttgagatgaacagaattttactggcagaagataatgacaatttacgtgagctgatcacggattttctgtcggagcatgaatatgaagtagatgccgtggcagatggggaggacgcatgggaaatggtgctgacaaaaagttatcagctgatcttgctggatgttatgatgccgggaatggatggatttacgctttgcagaaaaatccgggaacgggaatcggtgccggtgctttttctgactgcgcgtgtgctggaggaagatcagctgcggggatatgaacttggagccgatgattatattttgaaaccattttctttgcgggtgcttctggcgaaatgccaggcagtattggagcgatatcagcgggggcaaaagtatgaggttcaaaaagggcttgttttgaatgaggagcgacagcagtttttctgtgatggaaaaccggtggaattacagtctctggactatcgtctgttatcttattttttcaaaaatccgaatcgcattctgacgcgggagcagattattttaaaactctggggttatgaatatacaggaaatgaccgtgcagtggatacgcatgtgaaaaatgtgaggaaagcactgggggattacggaagctgtattcgcacgatcgtgaaaaagggatatatttttgaagcaaatatgattcaatgaaccttaaaaattgtagatatagtgaaagatagtgttaaatgatctatggaaaaacggaacgaaaaaaggatcaaggaaccttgaaaatttgtgatgacaggggggatggtatgaagaagttaaaaaaattgtggaagaagaaaatatggaaagaatatcgaatcgcattttatattgagatcgtctttcttggagtagcgctggcggctactggattattgattcgtttttcgtcggagagctggaagtcaagattgaagctggaagtgaaggatatccagtctttggttgaaaaaaatgtgaatacgagcatcaataagaccggggagaaaatgtcagaatcggtttatatggggttggaagatattttgccatatcgggatgacattacgtggaatagtaaaatcggagtagatgtgaaatttttggatgaatcagatacagcacgatatgaattgaatattccggaagtgggatgtatctggacgacttatgacaaagaaacgaatgaactgaatagagaatggatttctctgggagattggtttgaggatctgacattgactggtttggaggattttaaacggttttataagcaggaacagggacatgtagcggttcagaaaatggaaggatattacaacggggacaattttattatccggacggtgtattttacaagtacgattcatagatattatacggcaagtatcacgggcagacagataggcgtgagaaacatggtatatcgtgtatcggacctgaacagtattgaagatggaacattgtcagaaaatgttacactggaaaccggcagtatggatttggtagtatacatgccggataattctgtgcagtcagttctggtcaatacaccgggaaagtgtcaggcgtttgctacaggagagatagatggatataatttaagcagttatgagattaatatgtatgcagatacgatttatctggcaacacatgatgggacgtttcgaaattatatgattccaatctggctgatcggtcagggaattgccgcatttctgattgttgttgccctgtatatgcagaaaaaacgaagggagttagccaggttaagaaatacgttcattaatgctatggcgcatgaaatgaaaacaccggcagcagtgatcaaaaacagtgcggaatgccttgaggaaggaattcatccagaaaaacaggcacattatatcggaatggtgcaaaaagaagcagaccatatgaacgatctgttaatgtccatgcttgcatatacaagacttagtgattctttttgtgaattaaataagacagactgttcgttgcaggaaatgatggaactgagctgtgtccattataaagggcagattgaagcaaagaacctgcatgtgatctgggacagcgcagaaaatacgacaaccagatgtgatgaaaaactgatcatgatggttttggataattttatatcaaatgcggttcggttctgtaaggaaaatggagtgattcgttttacgatcgctccggggacagtgaacgtatataatgagggcgctcagataccggaagatcagataaaggaaatctggacaccgatgtataaaggtgacagttccagaaatgaaaccaaaggaacatcgggaatgggactggcgatcagtgcagtaatcctaaaagcccatcgtgcatcctatggggttcataatgttacaagaggagtagaattttatttcaaactccctttcaaaaagtaaggataaaagaatgcgtgaaaaggaagacaattctgtaaatttatggaattgtctttctttgtcaaaatgaggaaaaagctgttgacttatggaaaaacgagtgctattataagcaagctgtcgctgatgcggcggtactgacaaaaggaaaggtaaggaaaacggcaaggattgcggcagtttgaaatacaaaacttttgttagaaaaaataaaaaagttattgacaggatatgacaaatgtgctaatctaaatgagctgttgaaaaacagtgaaacagacaacttcaaataaaataaaaagttgttgacaacgacaaatgtttatgataatataaatgagctgtcgctaagacaacaaacaaagaactttgataactgaacagtgaaataaccttgaaagattcattgagaacagcgaagcaattcgcg

SEQ ID NO: 13221 - DNA, 15782 bp, Unknown
  gut microbiota DNA sequence
aaggtctccagcacatagcggctccgcccaaatttatcttttaccaaagtatttaattttccatcggaaaaggtaccggctccgccttcgccaaactgtacattggattccggatttaaactgccttctgaccagtaggtttccacatcctgctgacgctcttctaccgcttttccacgctcatacacctgcggacacaacccgcactgtgccagttcatacgctgcaaaaagtcccgccggacctgcaccgatgactgcagccttaatgtccgaagcattctccggttttgccggaatctggtacttcaccggatgtacttcctgcacatgcgccggattcttcttcaccttctgatgctcgtccactaccagatgaaccgtatatgtataagacagggcatctttctttctggcatccacagactgcttgatgatctgcatatccagcacttttttcgccgggatctgagacagcgcacatgcttttttcaaaatctgctcctttgtatgtgccaacggtaccgaaatctgcgatacacgaattactttcttcatattgttctccaatttgtattcttctggttattgtttctgtttgctcagcgtcaaaattaataaccattcctgttttctgtttttataaacccattcttttaatctacttgctcttatcctgcctgctttgcggcattttttcctgccaccgttccgctggaccacgcccactgcaggttgtaaccaccgcagatgccatccacgttcacgacctcaccagcaaaataaagccccgaaaccagacgggattccatttcctccgtcagttcatttaacgggactccgccacaggtcacctgcgcaaagtcaaaacctctggtatcagtgatcgtaagtgtcgttcgctttagtgcctgcattaatttttttatcgctgccggccgccgtttctcgggaatatctgacacatgcttggcatgcagtcccgcacagagcatacctgccagtttttcattgacaattccggacaacaactgctgccagctctcatgcactgatgcatttgcaatctgcttactcaaaaatacttcgatctgttctgccggataatccgggataaaatcaagctctgcccgcacactctgcctctgcgccagcgcaatagatgcatagcggctcacctgaaaaaccggaataccggaaataccataatccgcaaattgtacttccccggtatcttctgccacgcattggttctctacaaataatgatactgtcgcatctgcccggacaccactggtctgctttaaccacttggcatccgcatacaacgccgtcaatgccggcaatggtgtctcgatctgatgtccaaaagattttgcataaatatagccgcttccgtcacttcccgtcttcggtgcagcttttccgccagtggcaagaatacagcttttcgcctgaaatgtaccacttttcgtatcaaatacaaaaccattctcttttcgctgaatttttcggattccaatctcctgaaaaatcacaattccaagttgttctgcctgactaagcagagcattccgtatggttgccgcctgtccgctgcgcggatagaggtaaccctgacgactcttggagagaacaccaagttcctcaaaaaatgcaacggtatccttttcggaaaattgcttcaggatatgcaatacaaaggcaggagaatcgcttcgataacagctttccccctgcagctcattcgtaaaattgcacttaccgtttccggtggcaagtattttctttcctgaaacagtatgatgatccagaatcgctgtatgcgctccttcttttgccgcccaaattgccgccatcagtccggcagctccgccgccgaccacaattacatcataaatctgttctttcactcaaaactccttttatttatcttcatcttcaaaaaatccaagaatttcctcagaaatatggtcaatggtatccttctcatctgtatgtttttctgttacagacggtaccgaatcttcctcatcataataccagtcatcttctttttcagaagcatgctttttcgctgactttttccatatttttcctttggatacggtatcggtatgtttcttttcttcttttttctgttcagaaacttctgctttttccttatccccggattcttctgttatatatttttccgtttcaacggaatctgtttcttttccgttttctcttcgattactgtgttttgcccgttttcccgcacggatcgcaaacatcagataaatcggactgatgatgctgaccgtaccgtctgcgatcaatatgtaatacagcacctctctgtgctgcaatactttcccgtccggatttaaaatgactaaaattgctgctgccagaaatgccagggcaatgatcagaaacaaaagccatgctccattcctgaggctttttaaatccacggcattctgcaatttgatcaccgctgtcagtagaatacaaacacctaaaaacaatggcagataacctgcgatctgctgtgtacgaaccaacaggcagataccaagcaaaatacacaatacaccgccggaaaatccataattccccagatcattatagcttgctgccataaaatatttcacgatcatgatcacaccacagatcagaaagatcagtcctgcaatataaataatatagcgttcctgaaactgcggaacaaagagcattgccagtccaaaaagcagatagatcacggctattccaatcataaatccggttcccagacttgccttttttaatttattttctcttgccatacttttttcctccgtatccatcaggcaatctgcctgatgacccacttttgttcagtatagcacaagcttttactttttggaacccgtttaactcgaataattttcaagaaaactatacagattctcaagactggtaaacttgattccattgatcgcattttttcgcagtttttccggcagatcactcactttcaggcttgtctcaaaatacagacggtctgtatctgaaaaataaacagataaatattctccggatgccttcaggtaatatttttcctcggaaagtgccttcatactctccacagtctcctgttttgccacagtgttttctttttttccatccgcattttcattggcagcttcctgtgcctgatcttccaccgatgcgatctgtattccggaatccgcgttgccgcttaagcttccgccaaaataaaatccgccccagaaagcaccgatgatcagcgctgttacaacaaaaaaagaaatgcgaatcatacgtgtctgtttcatcataaataaaactccttttttcgtagtattcacatttcttctttttttattcaatttaagcttttatacataaaaacccataagcaataaacttatatggatttcaatgaaatcattcttgccaattattttataataaatggaacttctttgcaatccagataatcagctcacccttcgggaagctatgcagttcttcttcagtcagtcccttgatcagtaacaatgctgccgcatatacgatcataccaaccagaacagccacaaccactccgattgcattgctgtgtaatgctttatgcaccacaaaatatgctgcatataccacaacacccatgatcacggatgcaatcgccggttttacaaaagtcttggctacattcggtttaaagccagaatgttttcgtaccgacaatccattcaaaatgcacatgatcagtgaaaatgcaatggttccgatacagataccatagattttcagatcaaagccaaacattgccacagcgatcacacctgcatgaagcaccagtgcaatggatgcattacgaaccggaacatgcatctggtcaatgccctgtaatactgcattagacaatgtggaaatagaatagaaaataacactgattccacctgcctgcagcaaatgtcctgccaaagcacttgaccccgggaacaaaagctgaatgatcggatctgccagcaccataatgcctgcggtacacggcattgcaaccaccatgataaaacgcatggacataccgattttcgagcgaacctgcgcatcatctttctgagcgaaagctgctgccagtgccggaacacaggaagctgccaacgccgtagagattgaaatcggcacattggtcagaacacggtattttccggagaaaataccccaccattcagatacattcgttgcagaatatccctgcatcgttgcaatgtttttaaacagccactgatccacgatggaaaccagattgtaaatggttgtacttaaaagtaccggtacaatggttccgatcagaatacggaaaatattgcggtaagattccggctctttgtgtccgatctttcgctcacgcttcatcgcttttttgtattttggcataaacatagaaaatacaaaaaggataaataccaatccgaaaaacgcgccggcactggtgcccagtgttccgccggccgcaccataagccgcgtcataatgttctttacttccaagaaccgttgcgattctttttccgtaagcaaacagcacatacgctgcacctacactgacaaccgcattcacgatctgttcaataatctgtgaaacagcacttggaatcatcgttcccattccctggaaaaatccacggaatacacctaataccgcaacgatgatcagcgttggtgccagtacctgcagggcatatacacccagcggcgtctgaaacagccgtgtcagttcttccgcaccgaaaaatacgatcacacaggcaattgttcctgtaatagcagcaaacagcatggcgcccttgaatacacggtaggcattctgccgttcaccgtttgaaatacgtgcagaaaccatcttggaaaccgccatcggcagactataggatgagatcagcagcaacagactgtagatctcatacgcacaactgtaataatcatttccgtgatctccgatgatcgcagtcagtggaatacggtacaccagaccgattaccctgctgaccagcgatgctatggcaaggatcgatccctgcaccaaaaaacttgtatcatttttcttcttactcatttagtaacctcttctcctgccaggggcagtattggtttttaagtagcttatcgatctgcatactcttcttcgcttgcatagaaagcgatcttatctgcataggtatcttctgtcacacatacccatgtttttccctgatttaatgtaatttcatttccatccgcatcaaaatatctggtcggagcctgaagggaatctttggaccaggtaaccggaatcgcttttccatttgtaatataataaccatttccgcctgccatagtctccatatccagatattcgtcatcattgctcatacgactccagccgcagatctgaatgatcacattttttacagcaacctgttcaccgttattgccatctgtctgtgcttccccgttctggaaacgtttgtacagaccagtctcactgtcatacacaaaccatggtttatttaccagatatcccggtgcaatcactgccgcatcctgtccgtttgtcagctcgatctgtgtactgtcatcttcattaaatttataatgtccggtataatcagaagcatgttttgtctcatatcccttggtctggattccggctacaatgccttctccggtcgtataggcattgtgcggtgcctttctgccggaatcacgtttgtacatcgttccttccagacttccgtccagaccggacagattgttgacataatcctgtgacaacagctctaccgcatattttgcctgtccataatgggcatagattgcatcaaactccagtgcccagtgtacataataatgacggcagcttcgaatggacattactttttccagattcgcataatcctgaaaaatgcccatcagacgtgtctcccgaccttctacagcagactcatagatcacatctgcatctgtaatgccatattgtggcgtagcgatcttcgtattaccaagcatgactgccaccggccgctgcgctgcaatgttctcatcgatccattctccggtcagataactgcgtgccattccttccggagttttcggctcctccggttccggttccggctcagctacagattcttccaccggctgagagatcacaggctcagtctctttctttccgcagcctgccagcattgacactgccagaatccccatcattacccatacaaatgctttcttcataatcctgctcctctttcttatttatctcttgattttcagcacatccaaaatcctgcgctgatgctcctccattacttctgcctcctccggaaccatgtggtcataccccatcaggtgcagcatactgtgtgtgatcaggaatgcatactcccgctttacactgtgaccgtattcttccgcctgttcatagacactctctacacagataacaatatctcccaacagaacttcctctgtgtccggattcacgcagtcgtcaaactgatgttccactccgtcgaaatctgccggctcggcatattcgatcatcggaaaagacaacacatccgtcggtcggtcaatctgtctcatctcgcggttgatctcatgaatccgatccttatccaccagtgtcagatttacttccgcctcatatggaaaaccttccgtatccagtgactgcacgatcacatccttcgccagttttttataatgaaaagaaaaacccggcgccgtttcacagataatattaattgtcattgcgtcgtcctctgctttctttcttattctggcgtgcattcttttcttttctctgctgtgcactctcatattcatcgtacgcttttacgattttctgaaccagaggatgacgcacaacgtcctgactggtcagcttgcaaaatgcaatatcatccacatttttcaatactctcatggcaacatccagaccggatttcacccccggtgccagatccttctgagatgcatcaccggttacgaccacttttgagccaaaaccgatacgcgtcagaaacattttcatctgtgccggtgtcgtattctgagcctcatccagaatgataaatgcattatccagtgtacgaccacgcatgtaggcaagcggtgccacctcgatcagacctttttcctgatttttgataaaactctccgcacccatgatctgatataacgcatcatataacggtcttaaatacggatcgatcttgctttgcagatctcccggaagaaagcccagtttttcaccggcttcgattgccgggcgtgtcagaatgatacggcttacttcttcatttttaaatgcggtgatcgccatcgccattgccagataggtctttccggttcccgccggtccgattccgaatacgatcattttatcacggatctgatctacataatctttttgtcccaatgtctttggttttaccggttttccctgcacagtatgacagataacttcactgtctgcctccagcagtggattctttctgcagccgcacatttccaatgcataagtaacggtctgctcggtaatgtcattgccgcgctgcgacatggcaagtaattccgtaaggactttctgcgccgcttccacgtttttgtcctcacccataattttcaggcttccatcacgaacaaccattgtgacctgcagatatttttcaatctgtttcagccaggcatcaaactttccgaatacatttgacatatgttcaatcggaatgtccaacaactgttgtgtcaattccatatttgtcagttccttcctgtgtcttcgtgttttcaatctctgttctgcgactcactgtcaccatcgcatccagagtcccatgcacagatacttctgtggcattcttttctataataacactattcgacaatatttgaatagcatttttttctaatttttggatataattatccagtttttcctgtgcaatccgcttaatttctgcttctgtgcggtctgtttcgttgttttcatactgccacagacgctccgtcaccagggtaaatggcagataaaaatccctgccaagacaaatctgccgataaatacggatacatcccgtctgtgccttttgctgccagaacagattcagctgaccgtctcctgtcagcactccaattccatatttcgcctttccaatctgctcgcgcacctgcttttttgcagaaaaatggtcttcatagggaagtatcgtatggatcgtcacatccgcatcagccgcacacagatcataagaaacggtttccccactgtcatcctgaatcgggatcatgccggatacgaccaccgttccagcttccacttcatctcctgcctgcaccagtgccgttccacggcgcaccagtaccgaagtcacctctccggccacttctgttaccagatccgatgccacaagtgctggttcctcctctgcatttcctgcaggaagccgctcctgtaccgctacatacagctttgttccagaaagccgcaccgacacccaggtaatatccggaaaatgatttcgaagcagtacttctgcattttcacagtcaatctcacgctttcgcacgccatacccgatctgctcctctgccagaaattttgtcagaagctgcgtggaatactgatgattgccggatatttccaccgaccagacaaagcgtgacataaccatcaggaacaaaaacgctgccagaataccaatcgcaaaaaaacgatgcttccggtagcgaaacaacaaaaatggcagtcccacccgttttaaaatccggatctgtgtcccactttttctcagcattggtttcagacggcgaaatgcccgcagactgatgcagaaaacataccccgtctcctcccggtgaagtttccacagaatgatccctgcattcccacaaaggttaaaaaagcgttccggcgaatacccggtcagcctcacatacaaatagccacgaaaaaatttgataaatttcagcactgacgcatcgctccctatctgccatattccagtttatcgatctgtccgctgattttcatgtcctcgccggtatagtattcaattttcagatgcgttccgcagatctccacctgcccctgtttcagagaaagccggatcttatcttcccggtattccaaaattcctttataattttccacggtcaggtcgttctgaccggtaatggtcaggatcggcacaccaaacatcatatcctttggcagttctaaccgatccgtcaccgattttacaagcatatgttttttctttttcttcataattcaatatatggtcaaaatcatatgctatgataactgtgtgcgttattttctgcacaattcaaaaactgtgtgatttttccaagcctttgcttatgatctgatcactatttgtgatacggctcgttcgacatgatccgatatgcccgatacacctgctctaacaaaatcacacgcataagctgatgcggaaatgtcatgtacgaaaagctcaataaataatctgcccgattgatcactgcatccgacagccccaaagatccgccgatcacaaatccgatatcactggttccatgcaaacccaaagatgcgattttttcagaaaaagcaaccgaatccagctttttcccctgaattgccagtgcgatcagatacgttccgtccttgatctgacggagcagacgttctccttccttatctttaatctgtctggtttctgtatcgctggcatgatccggtgtcttctcatccgacacttccacgattttcagtttgcagtaccgtcccagacgtttttcgtattcttcaatcgcctgacggtaaaatttttctttgattttccctacggtataaattgtaatattcatacggctattatttcacaaggtgaaatttctgtaaagaaaaaataacagaattttaaaaacatagaaaaaagtaatggagagtcttttttatgtaaaaaatatgtgctataatagctttaaattattgaccggacgttccggtgaaaacatagtggaggaatatcatgcagttactggaagaaaagattaagacagacggcgttgccgttaatgaagatattttaaaggtggacagttttatcaatcacaaggttgatccatttctgatgaaagagatcggaaaagatttcgccgcacattttgcaggtcagggaattacaaaggttgtcaccattgaaagttcaggtattgctcctgcccttacaacagccatcgaaatgggaatcccaatggtgatcctgaaaaagcagccatccaaagtactgaacaaaaatctttatcagacaatggtaacttcttttaccaagggaaccagctatgaattaacactttctgctgaacagattgatgagacagatcacgttctgatcatcgatgacttccttgccaacggagaagccgcaaccggtgcgatccgtcttttaagaaaagcacatgctaccgttgccggacttggtatcctgattgagaaatctttccagccgggacgtgacaaattaaatgagcagggaattcatgtatattcactggcaagaatttccaaactggcagaaaatcatatcgaatttattccggaagaagcataatcaaccgattatcctttcaacccaaaatgcaaaagccgaagcacaggatttttcctatgtttcggctttttttaatttacgaacgacatcatttcatatcattctgtttttcacatcattacaggcttttatgcatttctttgtatcatcgcatatatttttcgtttctgtttttattcttgcaccgctactttttaatacaatgtcggaacgccggcagcaaaaatgcatccgcaaaaatccacgccagcacatttgacaggcagattcccatatatcccatcaacggtgccagcacaacacccgcaatggttcttgctgccatctcaagcactcctgctgtcatggcaaagccggaatatcccataccctgaatggaaaaacgcacagttccaaccagtgtgagcagacaatagccaagggtagacaccagcaaaaacaggaaggaatagttcactacttccgcatttggctcactcaaaaacagcaatgtcatcggttttccaaataataacacgattggaatgcagatcgctgaccatacaaatccacagattgatgctttttttacaccatcactgacacgttcctttttgcctgcaccaatgttctgtccggtatatggtgccatggtctgtcccaatgactccaacggacaggtgatcaggttgttaatcttctgcgctgctgttacgcctgctaccgctgtcgcaccaagtacattaacggcggcagtgatcaccagagagccgattgctgtaatggaatactgtaatcccatcggcacaccaatggcacagagccgtttcatgtaattgccacgcatacgccactcatcacggcttgcctttagaattggaaacttctttttcatatagatcagacagataccgccggatacgccctgagaaatcacggttgcaatcgctgctcctgccacaccaagcggaatcggaatcatcaaaataaaatccagtgcaatgttcataaccgaagacaagatcaaaaacatcagcggtgttttggaatcccccagtgctctcgccacacctgccagaaaattatataaaaacgtgcatggaattccaaggaaaatgatcaatatgtaaatataggcatattcaaaaatatcctccggagttttcaaaagcaccagcatatttctggtgaaaatacatacaaaaaaggtgatcacaatgctgaaaaaaacacacagccaggtgctgtttgccacatagcgccgcaattccacttctttgcttgcaccaaatgcctgtgcgattggaatggaaaaaccattgcagatacccaggcaaaaccagatgatcataaagttcaaagatcccgtggcaccgacacctgccagtggctgcacaccaagcacctttccaacaatcatggtatctaccatactgtacagctgctggaacaacattcccatacacaatggaactgcaaaatttataatatgccgcagggtggaacctgaagtcatgtcttttgtcatatgatactcctcctcaaatctctctgatgaaatctctttcaaaactcactctatactatagcaaatatagtcttgcatccataacagaactgacataaaatataacaaaagcgacttttttatattgatatggagataattatgaaaaatactataacaatctcggttcaggacgatttctgggaaaaccgtgcacacggtgataccacatttccctgtgccgcctattataccgatgccaatacccacgatatacgctggcactggcacgaagaatatgaattatccattgtccgaagcggctcctgtccgctatcggtcggaaccgaccacctgacactgcacgccggtgatgctatttttatcaataccggaacgttacattctcaggaaacgaccaaggctacaaaagatttttacaaagaagaccttgtctttcatggacgtctgatctatagttccaaacatacggtcttctggcaaaaatatatggcacccattgcgacatccagcatttccctgccctacatacatctgacccctgcggttccctgggaaaaagaaatcattgctctggtttccgatgctacggaatctgcccgtgaaaagccctttggctatgaattttatatccgtgaaaaattatcccggatttttcttctgctggcacaaaaccggacggagcttgcttcccacagtcagaacgaaagttctcaggaaatgcagcatatcaaaaaaatgatccggtatatccaaaataattataccgaatcaatttctctgaaacagctggcacaaactgccaatatctgcgaacgggaagtccagcgttccttccgcaacgtcatccggcaatcaccgatccagtatctgatccactatcggattgaaaaagcctgtcacatgctggattccggggaacaaagtatcattgatatctgcaatagttgtggattttccagtccaagctattttacgaaaacatttaagtcgatcatgggatgtacccctagggagtatcgcaatacgcgatgatacagaaacaggaagggatattttttcccttcctgctgcttatttttgaaattatattgtgcaatcataattactataaatgcatgtaaatcctatgcttatgtattttattgcaatctaacataatacattttttattttctttattccggatggcatctgccacatggttcatatccctgctgctgaagttctgccgcggttccggtaaattcctgccgattattttccttgatatccgctacactggaacaatccggcgtatgatatttcattgtattcgtatttaacacatatgtcttttccgttgcctgagactgctgaccagacggtgtagatgtggctgtggatgtagatgcggactgtgccgctgcctcctcatcggttgccttcctgctgtctccggtagcataatcaatgacaactcccggctgcacattgtagacatagacattatagcagacacctgctccgttatcttccacagattttgcttccatctgcacaccggatgctaccagattgtccccttcaaaaatcggagttacacgataacgcacatgcgcattgttctgttttacataatctgctacttcatcctcaaaaggcaacattcctgtcacgttcagataacgtgttcctgtgatcagattcttctcgttggcgttttcaccgctgagctgatatccgatcagatgacagcgattatataaatagttaccatcaataccctcatacttaattgtatgccagccgcttggttttacctgaccaatagctccacgttcttctgtcggcatcagatcaattccgacgattgcatttgccacgccacatctgccaagactgtccagctctgaataatcctcataagatgttgtctgcatatcagcatctgtaaaatcaggtacattattattgatcgttacataagactgaccggaatatgccggaatactgtccagtgatatactttcgctgctctgtgatgcagtactgctatctgcagactgaccctgctgttctgtgactgcctgaccgccattttcctcctgtgtggtacgcggttccggcgccggagacagggaacacgccgaagtaaggacggttgctgccacgatcagcggaatcaatactgcacgcattgtttttgtcactttatgtaataaatcctttttcttttcggatgttgcagatgtagcacctgcttctgtaatttttgtattctccgttatttttatttctttttccttttcgttatttgaagaatccacattcatctcaccgtccattattccggcttgttcctttaaaaatgttcgcagactctcataatcttctgtaaacaccatcgcctgcataccagcttctcgggcaccttccacgttatccttccgatcatcgaaaaacagacattcttctggttttaactgatatttttctaacagacattcataaatccgtacgtccggtttgatcagatgcacctcagaagataccatgacgccgtcaaatgcttctaacggagaaaatttcgggaaatactgataaaactcatctgctgctgcattggaaagcacatacgtctggtaaccccattttcgcgcatcctcacacaattttaccgatttctccagtggttccatacagatatcccaaccatacacacatttcttcaattcttcatgatattgctccgggattctttttgccacgctttcatacatttcttcaatcgaaatcgttcctctgtcccgttctacccattccggtccctgaaacagttctttccggatcaggtctcttgcttcctctgaagaaacgtattcccgcaatggaacttccggatcataacgcatgagtacatttcccatgtcaaatattaaatgcttgatttttgccataacttacctgcctttttttaacccaaagaatgccactttgcatactcacatatacaatcgcatatggaatacccaaagtgacattctcattcatataatttttattccaaaatgccttttcattgcgttaggcattatatcagattcagaaatatttaaccagaatttttgcccctcatcattcatagcaatttggttcctctttcatctgatgcaaaataatatcctagcgtattccagttacctcgtaaccttcctcttctactgcttttttcagtgcggcatcatcaacggaaccggataactgaacaacagcagttcctttctcatggcttgcctctgcggatgcaacaccctctaatgcctctaacgctttctttacatgtgcctcgcagtgtccgcacatcatacctttgatctcgattactttctccatatcattctcctcctgtttttcagccattacatctgtatctactacgatctgtacatcctgctgattctgattctttttatgatttttctttttatctctctttgtactgtaaacctttacaaaattcagacgcagcgcatttgttaccacgcagaagctggacagactcatcgctgccgctccgaacattgggtttaatttcagtccaaaccaatgataccacactccggcggcaatcggaatacctattacg

SEQ ID NO: 13222 - DNA, 1613 bp, Unknown
  gut microbiota DNA sequence
gtttttaattggaaaggaaatatatgagtacagttttatttgaagatttagatttaaatccgcagattctgcgggcaattaaagaaatgggatttgaggaggccactccgattcaggcacagtccattccggctgtcatgagcggcagagatgtcatcggacaggcgcagacaggaaccggaaaaacagcatctttcggtattccgctgcttcacaaagtagatccgaagctgaaaaaaacacaggcgctgattttatgcccgacccgtgagcttgccattcaggtatccaacgagttacacaatctggcaaaatacacccacggtatcaaaatccttccgatttacggtggacaggagattggcaaacagatccgttccctgaaaggcggcgtacagatcatcgttggtacaccgggtcgtgtaatggatcatttaagaagaaaaacaatccgctgcgatcatatccacaccattattctggatgaggcagatgagatgctgaacatgggattccgtgaggacattgaagaagtattaaaatatcttccggaagaccgccagaccgttcttttttccgcaactatgccgaaagagatcatggagatcacaaaacagtatcagaaagatgcgctgaccatcaaagtggtaaaaaaagagctgactgtaaaaaatatcgaacagtattactatgatgtaagaagaaaagataagctggatattttgacaagacttctggatgtgtatgatccgaagctctcccttgtattctgtaatacaaaacacatggtagacgagctggcaaacgaactgcagaaccgtggttattttgcagaaggtctgcatggtgatatgaaacagcagcagcgtgaccgtgttatgagaaacttccgtaacggaaaaacagagattctggtagcaacggatgtcgctgcccgtggtatcgatgttgacgatgtggaagcagtatttaactacgatctgccgcaggatgacgagtattatgttcaccgtatcggtcgtaccggccgtgcaggcagaaccggaaaagcattttcttttgtaaaaggaaaagaagtttacaaattaaaagagattatgcgttactgcaagacaaagatctatgcacagccgattccatccatgcgtgatgttgaggaagcaaaatgcgacaagatcatggagcagttagaccagatcattgaaaatgaggatctgactaagatggtaaatatggtcgaagcgcagatcaataacggtgattatacggcaatggatctggcagcagcctttttatatcaggcacttggaaaagcagagcgcgaaggcgtaaaacaggataatttcgatttctctgataccggtgcagaagacggaatggttcgtctgtttatcaatattggtaaaaaacagcgcgtgcgtccgggagatatcctcggggcagttgcgggagaatccggaatgccgggagatttggtaggagctattgatatgtttgacagctatactttcgtggaggttccgagagagtatggtgcggcagtgctgaaagcgatgaaaaatgcgaagattaaaggaaagagcattaatgtggagccggcgaatgcgaaatag

SEQ ID NO: 13223 - DNA, 664 bp, Unknown
  gut microbiota DNA sequence
agagtttacacagaattaattacagtctcacttggtggtattttgggttaaatctttgtgacatgaaaattgcagcattcatcgtcatatttttaaatcagatttcaatctgcaatccaactttcagctggtgtacgatatcgccaagaccatttttaagtattttatatgcacggtctttggtgcaatgtcccgtgcagacataattaataccagtatcttttatttgctgtattacatttttgatttcttcttcggacttattaaacagatggaatccaccgataatgccatataccttttctgttggaaatgtcgcacccacctcattaataatattagcaacaccaccgtggcagcaactattgaaaatcactaaacctttttgggtacggaataccagactctgctcatgagaaaaatcatcgtatacccatcgatgatgttctttacggtacatactttcacgtttaccaaccattttaaggttcggtgtcttgtgaggaatcagatatacgccaggtataatctcatagtctctatcagcgtatattatcctgtcacgataatccgtcaaaatgtgctttggtaagccgatatatttgtggaatatccactttttggcataacaattttcctgacagccttttcgtaagaaaaaagg

SEQ ID NO: 13224 - DNA, 209 bp, Unknown
  gut microbiota DNA sequence
gcaatcaatatccgtgaagaagcacgtcgtatgctgttggcaggatagacagaaactgtctgtaaccagaccggaagatatcccctgattgggtaaaaaataaatcgcggggcacgcgaggatagcttgtagatacttggctcagtagagccattgagcaagaagcccccacttcaaaatctgtgatttaagtggtgggagcatgtcac

SEQ ID NO: 13225 - DNA, 983 bp, Unknown
  gut microbiota DNA sequence
tggctcagtagagccattgagcaagaagcccccacttcaaaatctgtgatttaagtggtgggagcatgtcaccagctgtgtaagtttgccgaaaacttgatataaagtcagtatcagtagaaaaataaaaatagcatatccaagcaaataaccgggatttcccatctgatctgcaagaaattctaatggcgtgttttcaggcggtacgttgataaacatataattgctgtcaaattttttgttaaaaagataaacaggcggaacgataccgcaaagcaacagtaccggctgccagatatgacgtgttttagggcgaatgtttccactgacaaaaagtaaccatggataaagaatgatcagcgcatgatatacaaaaccatggatcgtcatataatgaaaaggtgggtacacgttccacaccggaaataaaatgccaaggacagcaccgggcataaaaaggcacagtgcaatttcaacaagagaagtccagcgaccggtgcgcaatgcctgcatttgcaagaacagatagaaaaatcctgccagatcgcaaaggtggaaaggcaacattctggcgttcatgtgtccggtgacagtcaaaatggcatcctgtgtaaaggtgcagcataaagccagaagcacagtgatattcaacatttgtaattgtcttatttttgtaaggcgcaggtatattctgcatagaagaaaaataacaatggcaatgcaggtaagccagatgaaatgcattctgccaaaaatcggaaagccacaattctcaggcaaagcatcctgataagtgaaaaaataagtatacataaaaaagaaccttcattcataaaatactaaacttggtagagacataaagtaaatcccgtacgctattatgtattttatgaaagaggttctttgtttcaagattacgatttttatttggtataaagtaaggatcgtaatctttttattattttatgatatgcgtttgattt

SEQ ID NO: 13226 - DNA, 1422 bp, Unknown
  gut microbiota DNA sequence
tatggctttcctggtaagtttttaaacgttctaacatggttcttaacacatcttctgaagcagcaaaggaaaaacgaatgcagacgcagtcttcttctccgtaagcgatacctggaacaccggcaatttttgctttatccaacaggtcattgcagagtgtttcactgtccatatcagtgtcaaatttaacccatgcataaaaagctccggcaggtgtcagaagttccacacccggaatctcacggattccttcaaacagaaggtttttgcgtttttcgtatgcctgacgcatctgttcggtttcttccacacaatcaagcgcagtcagagcaccgcgctgtaaaaatccgctggtacagctgatggagtgctggaataatttcaacactacctgataaagcgcaggggtgcaggcaagatagcccagacgccatccggtcatggcactgcattttgaaaaaccgttgacgatgaccacacgttcaaaaaattccggaatggaagccagacttacgattttgttctggtcataaacaattttttcgtaaatttcatcagataaaacataaacatcaggatggttacgcaaaaaggcggtgagagcctgaatatcactttctgttagaatctgtccggttgggttgttcggatagttgatgatcagaagttttgttttatcggatgctgctgcttccagagcttcttctgtgatgcggtagttttcttcatattttaaatgaacagcaacgggtttgccaccactggcttctacgatggacggataggatacccaccccggtgtgagccagatcgcttcatcccccggattgatcagggcacgaatggtcaggtacacagcatattttgccccaggagtgatcagaatattctctgcttgatacggtgcgtgattttcttcctgcagtttgcgggcaatgcgggcacgaaggtcagcgtctccgcggctgtcagagtagtgtgtatgtccggcggcaagttctgccacaacggtatcacagacggctttcggagtcggaaaatccggttctccgccagtcaggtttaatatctcaggatcagttttctgtaattcttttgtttttgccagcaaagtgacggatttggacggttccacgttgctgatcagtctgttaaattccataaagtaattcctccaaaatacgggaaaatatattagtttagctttttaatgtgtaaaagcgtaatttcttatattttactccaattccgacataataacaatcggaaacataagaattctctggatttttttacagaaaacgctataataagtatcgaataggcgaaaataatgtgtttactgtagcgataattgtccgtatgagatggaaaaatcatctcagtctgagttgagactcccacttctgcaaggacgccact

SEQ ID NO: 13227 - DNA, 10683 bp, Unknown
  gut microbiota DNA sequence
aagtctcacgtgcgttcgacttgaaaaataaaaaaaatgtgctaaactaaagagaatgtaaaaaaagtatttcatattaaggagattaatataatcatgaatattgtagttttagctggtggactcagcacagagagggatgtttccctgaatacaggagctatggtaagtaaggcactgcgctccaaaggacataacgtaattatgctggatgttttcatgggttaccatgatcaagaggaagatatcacaggaatttttgagcgtgcggaagaggcaagtgccgaagggacacagattccgggagaagctccggatatcgcacaggtaaaagcaatgagaaaagatcagtccgattgtttcttcggaccgaatgtaatcaggatctgtcaggcagcagatgttgtatttatggcactgcatggcgagaatggtgagaatggtaaaattcaggcagcatttgatctgtttggcattcagtataccggaagccgttaccttggaagcgctctggcaatggataaaggcatttccaagaaaatgtttgaggcagccggtatcccgacaccgcatggtatttccatgagcaaagcacagcgtggtgttccgttcgcagagacaggattaagccttccgtgtgttgtaaaaccatgctgcggcggttccagtatcggtgttaccattgtccgtactgcagatgagtatgaagctgctctggatgaagcatttaaatatgaaaatgagattgtgatcgaggattacatctgtggtcgtgagttttccgttggtgttattgacatgcaggcacttcctgttatcgaaattgctccggtagaaggtttttatgattacaagaacaaatacaaagcaggaagcgcggttgagacctgtccggctgacattccggaagaagttgcaaaagaaatgcagaaacatgctgttgcagtttgccgtgaacttggtctggacgcttatgcccgcatggatttcctgttaaatgacaaaaacgagatgttctgtctggaagcaaatactctgccgggtatgacagcaacaagtctgttaccgcaggaagcagctgtcatcggcattcagtacgaggatctgtgtgagcatctgatccagatttctcaggaaaaatacggaggaaaacatgaataacacattggagcagatgacactggaaaatatcgcaaaagcatgcggcggtacttatgtaggcgacgatgcacagcgcggcagcgagatcaccggcgcagttattgacagtcgtcaggtagagccgggctacttatatatcccgatccgcggagagcgcgtggatggacaccgttttatcccggatgtatttgaaaaaggtgcgctggcagttttatccgaggaaccattggaaaatccggcaggaccgtacattcaggtggcttccagcgagcaggcactgaaagatatcgcagaattttaccgttccacactttctatcaaaattatcggaattaccggaagtgttggaaaaacaagtacaaaagaaatgatttccgctgttttaagccagaaatataacgtgctcaaaacagaaggaaactttaataatgagattggtcttcctctgacgattctccgcattcgcagagaacatgaagtggcagtggttgagatgggaatttctgagtttggtgagatgcatcgaattgcaaaagtagcaaaaccggacatctgtgtcatgacaaacatcggacagtgccatttggaaaatctcattgatcgtgacggtgtactccgtgcgaaatcagagatttttgatttcctgaaaacggatggacatattgtgctgaacggaaatgatgataagctgattactgtgcaggaagtaaaaggtgtaaaaccggtattttattatgtagaagatggtactgctaaaaaagcagatctgccgtatgaaattaccgcagatgctatcgaaaataaaggacttcgcggattgaatgcaaacctgcattttccagaggaagtctgccagatccatgagccgatcccgggcgtacataatgtatacaatgcatgcgcagcggcatgtgtcggacgtatcatgggactgaccaatgaggaaatctgtcagggtatcgcccatgcaaaaaccattgcaggacgtacgaacctgatcacattgggtgaggtgcttgtcatcgatgactgttacaatgcaaacccggtttctatgaaagcatctttagatgtactggcacaggcagatggtcgcaagatcgcggttcttggtgacatgggagaacttggagaaaatgagcgtgagatgcattatgatgtaggaaaatatgcagcaaatacaggtgttgatattctgttctgctgtggaactctcagtgaggaactggcaaaaggtgcacagcgcggacatacaaaagtaatgtattttgcagaccgtgaaaaactgacacagacattgatcaattttgtggaagccggtgatacggtacttgtaaaagcttctcatttcatggagtttccaaagattgtaaaggcgctggaagaagcgttggaggcataaaaaatcagataaaaaataacttttgggttattaggcagagtataagaaatatcgagaatatttttttatgacaagaactataaaaagaaaactgggaaatagcaatttgctatactcccagtttttttgcgttataaaattgtttttatttttctgaaaaatgtcaatacttcgtgcaaaagagatatttttttattgctcagatgctttctgtgcatccagcatttcctgaatcatattctgagaaaggcggccaagggcacgtctctcttcttttgccagctctttcggatagatcggagcgccatattctaccgtaacatgtgtcggttttacaaatggcatatgatctttgataatgtctctggtatgggaaattgccattggaacgatcggacatccggttttctctgcaattttcatacttccctctttgaacggtgccatctcatcgctgtctccgcgggttccctccgggaaaatgcagatggaaatgccttttttgacatattcgattgcctgcaggatcgtttttaagctggctttcatatcatcacgtttcagaaacaggcagtagagccgtttcatccagatgttcagcagcggaaccttttccagagaatcctttgcgatgtagccggtcagatccggacagagtgcataggtgatcataatatcaaaataactgttgtggtttgctacatagagcaccggtatgtcctttggtacattttcctgcccttttacggtgagttttacaccgcagatccggcagatgacacgaaatgcccactgtaccatgcgcaggctgctgatgtcacgcaggtggggattttttttgccgatgagccattctacaaaaagcaccggaattccgatgatcagatagcagacggcgaacaaaactgcaagaattgttcttaacataatatttcctccaaatagtttttaggtactctcagaatctttcctttaaaagatttcgaaagtacatttctaaaatgtaataaaaatgtgatttcttttaaaaagacttatctagtatagcagatagtttttaataaatctatgcatatttttcggatttgaaaaatagaatagaccaaagaaacagcggggacagggagtagcagtttttatgaaacgaataagcagcatttttaccgtgagtctgctggtacttattttggggctgacaggctgtggattacaaaagaccgggacgcaaaaggtacgtgatctggattataccgttgtcacagaacaggagcttccggaggaactacaaaaggaaattgatgaacgctataccgaagacttcaaaatgacctgcatgctggatgacagcctgtacattgtgcgtggctttggaatgcaggagaccggaggatacagtatacaggttcaagatctgtatctggcgcaaaatgcgatttattttgaggcagatctcattggaccggaaaatggtgcggaggcagaaaaggcagtcagctatccgtatattgtcgtcaagaccgaacgactggaagaaaatgtggtatttgaataggaaaggggaaacatatggaattaaaaacagaagctctttatatggaagaaaaaaagggaccggcgatcactcaggtaacatttgatgaaacatatcatcttccggattatcttccggattttttttctgtgatactaagccgcggggatgtccggctggatgaaagtaagtgtggaaacggacatatcatggtgcgcggtgtgctgcagtttcgggtattgtaccgcaccggacagggggaatggaagatcagcagtctggaaggggaatatccgtttcaggagacactgatgctggaggaagcgggagaatttgacatgccgcagacggaggtgtttctggaagatctgacggttcggatgatcaatgccagaaagctgaacattcaggctttgttagagattcactgcaccgcccgcacacggttggaattgcagatcccggtgggaatggaacaggaggagtcctgtgagcatctgtaccggaaaaaggagtttctggaactgtgttatcgcggggaagaattgtgcgctatgcgggaagaagtgcgtctgccttcaaataaaccgaatatccgccagttactctggcagcaggcacagctttttggcatgaatgtccgtgtggcagccggggaagtgactgtacagggcgaattgcaggtgtttgtcatttatctgggaatgcaggaagaccgcatgcagtgggcagagatgcgcgttccgtatcagtgccggctggagattccggaagcttccccggatatggtgtcgtatctgacagcagatcccggcgcgattcggtgtagtgtgcaggcggatgccgatggcgaagaacgggtgattctggcagaagcggatattccgattcgaatgtggctttactgggacatcagcaaaaatcagctggaagatgtatattcgctggaaaaacagctgataccgaaacgaaaaccggtaaaaatccggcagcttcatatgaaaaatgagaatcagtgtcgggtaaatgatacgctgcagataaaaaatacagaggaagaagtgctacagatcggtgccggttttggaacggtagaaccggaacactgggagatttcgccaaatggtcttatgatcgagggaacggttcggatgcaggtcttttatatggtaagctccgacagtgcgcctgtgggagcaatggagagtttagtgccatttcagtgtcagatggaaatgcaggatctggatgagacctgtgagattgagatccagacaacattggaacatttatccttcctgatgaaaaatgcatcagagatcgaagtgcaggcaattatcaatgtcagtgcattggttacaaaattaaaagaggaagaactgatcagtgcgatcgaagaagaagcggcagatgcacaggcagacgaaaaactgccggggattgtgggactgatcctgaccggctcctcagacctgtgggagattgccaagaaatatcatacgacggtgtctgccatccgcaagacgaatgaactggaggaggaaaccgaattaaatggaagaaaaattttggtagtcaaacaagttctggatatcggatgagcccgaacgtatatcaactgcgagatgacgattacttctatatataaaagtaaaatgagataaacgataaaatagatagtaaaaataaaaagaaattcggaggtttgcacagaatcatagaattgttacaaagatattacagaaaagtgtgaaatatttctaaaaagcgtctattttggttgaaatcctgcaatgaagatgttataatcctaaaggtagctgaaaaaggatttacaaaggagtatttatatatatgaaaaagagattattagcaacagttctggcagcggttatggtcatttccggaactcagatcgcaggagcaacatccctctctcaggcaagaagccagaagaatcaggcgcagaacaaacttgattctgtaaacagtcagatcgcagatattgagagccagcagtccagtctgcagtcagagattaataaagtagattcagatttagtagatgtactggtaagtctggacctgatctctgatcagattgatcagaaaaaagtagagcttgcacaggcagaatcagatctggcagcagcaaaagagaaagaagctgagcagtatgatgctatgaagaacagaatccgttacatgtatgagaacggtgacagctcttttctggatgcattcgttggtgcacagagctttgcagatgtattgaacaaagtagagaatttctccaaggtatatgattatgatcgtaaccttctggtagaatatcagaatacaaagacagaagttgcaaaccttgtaactcaggttgaagaagagaagaaagatctggaagaaaaccaggctacatatcaggaacagcagaagaatctggaagagatgaaagctcagaagagcagccagatgtctgattttgaaaatcagcttgcacaggcacagagccttgcagcacagtacaaacagactgttgcagagcagaatgcgatcatcgcacagaaacttgcagaagcacagactgtaaaaacatctactgcaggtgtttccaatgtagcaaacaataacagcagctcaggttccaaatcagaatctaagaaatcatccgattctgattccggaaactctaattccgaaagttcttcttccgatagcagcagttccagctcaggatcaggttcaggatctgcagtagcaagctatggctgccagttcgttggtaatccatatgtatggggcggcgagagtttaacaaacggagcagattgttccggatttgttaagagtgtatatggacactttggtgtatcacttccacacagctccggtgcattgacaggtgtaggtcgtgcagtatccacatccgatatgcagccaggtgatatcgtatgctacagtggtcacgttgcaatttacattggcggtggtcagatcgttcatgcaagttcaccatccacaggtatcaagatcggacctgtaaactacggaaaatccattattgcagttcgtagaattttctaatcaaagaacagatattaaaatcctctgggcattatgctcagaggatttttttgtgcaaaaaagaggcacagttgatcatgttgtttgccagaaaaagtgttcgtatcttagacaggagataacttttattttgggtaaaaaaattcccgatcaacagtaaatcatgtgatcgggaatagattagatattgtattatttgcaaagttcagcaacaacctggttaatgacttttccgtcagctttgcctttcagctctgccataacagctttcatgatctgacctttgttcttggttgccagtacgtcggcaaaacgctcagtaaggattgcttttacttcctctgcggaaagcagcttcggagcatattcactgataatgtcataacgtgcctgatattcttctttcagatcagtacggtctgccgggcaggtatccacctgttcttttacactctttaactcttttaaaatcacgcgggcaaccagctccggtttgatgtcatcacggcatccctcatcgatggctacttttttgactgcggatactaaggatgagatggcatccttacgtactttgtcttttgccttcatagcggcaatcatgtctttttgtaatgtctgcatttccataatgtagtacctcctgtattttcaggcagacaaaagcgtctgctcatttttagcaaaacaatgcttcgtcaagcggatattcacaattaaaacaggaaaaatcccagatttacttaaatatgaatacggctcagcagtttgtttatataatactgcttgatatgctgataatgctggtgcagtgtctggtgtgccagatcggaatcctgattgcggatcgcgtccagaatctgggtgtgttcctgtaaggagcgtgctgccagatcacgatcatccaatatagtggaaataaacagcatctgctgacagtctaactgatcatataccgtttccagacgtttgtttccagaatagctgaccagtaattgatggaatttctgatcccagcgggtaaagtggaaaatatcatctttttccagcgctgttttcatattgttgagagccatttccagtgcatttaccaccagagcattctgtttattgatacatgccttgatggcataatcctgaagaagttcgatgagatcgtaaacctccagaatatcatctgtggaaaaggatgccacgacagttcccttccccggaacaaaagagagcagaccttcgtgggtcagctgctgcagggcattccggatgggtgaacggctgacattgtagatttcacaaagctttcgttctaccatgacagttcctgccggataagtattattcaggatatcctgtttgatctgctggtatgcaagttgctgcttgttttccactggctgattcagagaatcatacttgctgttttcctgatttatcatgtttgttctcctgtataaaataggtattccatggaatacttgcggtgtgtgtctgttcttgctgggaaaagtatagcaaaaatgagaaacaatgtaaagttttggagaaacgcaagtttatcttttcattttttctgaaatgtgatagtatatcagaagaatgtgacgatttaaagtagtgacgtgaaaaagatataggggatttggaggaaatatataatgatttcaaaacgtttaagagaatcactggattcatccatttgtatccgtgacatttttgaggaaggtaaaaaactggtagcaatttacggcgcagaaaatatttttaactttaccattggaaatccgagtgtggagccaccggcagcagttaatgaggcattaaaagagattatcgacacagaaaaaccgctggcactgcacggctatcctgcaaacgtgggacatccggaagtccgcaatcacattgcaaattatctgaacggaaaatatgactgcaactatacagagcagggtattattatgacaagtggtgcggcagcagctatcgtagttattgcaaatacattgctggatgacggtgacgaggtcgtaacatttgcaccgtatttctgggagtataagagctatgtggagacaatgtacggaaaactggttccagctctttgcaatatggagacattacaaccagatccggagacttttgaggcagcactgtcaccaaaaacaagattcgttctgatcaacacaccgaacaacccgactggtgcggtatatacagaagagtctattcgcatggttactgatattttaaagaaaaaacaggaagaatacggtcatccaatttatctggtatccgatgagccataccgtaaactggcttacgatatcgaagtaccgtatctgactcattattatgaaaatacaattgttgtatattcttacagtaaagcattatccattccgggcgagcgtatcggatacattgctatggagccttgtgtacaggattacgaagacctgattgcaggtatgactgcttccatgcgttacctgggctatgtaaatgcaccgtctcttcagcagaaaatgctgctgaaatgtgtggatgcttctgttgatatcagcatttatcaggagaccagagacattctgtacaacgccctgacagagatcggttacacatgtatccatccggacggagctttttatctgtttgtaaaagcactggaagaggatgatacaaaattctgtgaacgtgcgaaagaagaaaaaatcctgatggcaccgggaactgcattctacggtccgggttgggtgcgtgtatcctactgtgttccggcagaagttgcaaaacgcagcataccggctttccagagattgtatgacaaatatcaggctgagcaggtattgtaattaagaagtgatggagattcagatttattatcagaaatgggatgaaaaaagcaaagcttcccatgagttattagaacatgtgattcgcatttatgccaaggcgcatcagataaaattgccggaaacgttgcagattcatcaggaaaaaaacaaaaagccgtttctggaacatgtatcagatatctgcttttctatttcccacagtggagaatggtggagctgtgcaattgcaccgcaggaagttggtctggatattcaggaagaacatgactgcaaggcagaacgtctggcaaaacgattttttcatccgatggaagtagagtggctggaacagcatggatatgagaatttttgccggttgtgggcatacaaggaaagctatgtgaaatatacagggattgggcttgtaaagggtatggattattattcggtggtgaagccggatggcacattgaccggagaggaaagtgtctggcaaaagcagattgcctttcaaccagagtgttatatggttgtgactgcaaaacaggaagcagaagtaaagctgttttcattgacagaacagagtaaaaaatgataatcttataaactggtatggggaatactcatactagtttgtagtatagaagaaacactctaaaatattgatgttatga

SEQ ID NO: 13228 - DNA, 1846 bp, Unknown
  gut microbiota DNA sequence
tgttatgatctgttttcttgtgatcgttgcggtactgatcggagtatccgtagtgacaccgggaaaagttgcagatccggataactatgcctgcgctgcttatgcgacagtatttgcgttactgccaccggttgtggctattgcgctggcgttaatcacaaaagaagtatattcatcactgtttaccggaattattgtcggagcactgctgtacagcaacggcaatctggaactgatgatgaataccatgtttttcaatgagagcggcggtatggtatttaaacttgctaacagttggaatatcggtattctgatcttccttgttatgcttggtatgttagttgcgctgatgaacaaagccggcggttccgcagcatttggtaaatgggcatccaaacgaattaaaacaagaatcggggcgcagcttgccacaatggtacttggaatcctgatttttgtcgatgattattttaactgcctgacagtcggaagcgttatgcgtccggttacagatacccacaaagtatccagggcaaaactgtcctatattattgacgcgacagcggcaccggtttgtattatcgcaccgatcagttcctgggcggcagcggttacatcttctgttccggaagattccggaatcaacggttttgccgtatttttacagacaattccatataacctgtatgcgattctgacactggttatgattgttggaatggtcgtattccgggtagattttggaccaatgcgtactcatgagttgaatgcgatcaaaggtgatctgttcactacaccggagcgtccgtatgatgaaagtgatgaagagacagagagcagcaaaggtatcgtgtttgacctggttcttccggttgttgtgctgattgcggcctgcattatgggtatggtttataccggtggattttttgacggagagaattttattacagcattttccggttctgatgcttccgttggattggtaatcggtggatttatcgcgttattatttacctttgtgtattacatgcttcgtgatgttatcacgttccatgaatttgcagaatgcgtgccggaaggctttaaggcaatgatcgcaccaatcctgatccttgcgatggcatggactttatccggtatgacaaacctgcttggcgcaaatatttttgttgctgatctggtagcaggatccgcgcagtctctgcaaggatttttgccgattattatttttgcagtggcagcaggtctggcttttgccacaggaacatcatggggaacgtttggaatcctgattccgatcgttattggtgtattcccgtccggaacaatgatgattatttctatcgcggcttgtttggcgggtgccgtttgtggagatcactgttctccgatttctgatacaaccatcatggcttccgcaggaggacattgtcatcatgtgaaccatgtcacgacacagattccgtatgcgctgacggtagcggttgtgtgctgcatcggttatgcactgatcggtgtgttgaatgcagtgggaatgcttggtatttcatggatcgcgcttccggtttgtgtggtgattatgctcggatggttacttgttttacggaagaaattcggtagagaagatatctaagcgttgcagtatctttaccatatgcagttaaatcaggttttgcatgaagactttcttgaatgtagtaagggtagaagatatgtgtgagttgtaatagttaatcagatataaaaaaactcctttgagtatatttatgacagatgaatgattcgtcataaatgtaatcagaggagttttttatgtatcgcattttatttcaatgcaccattcatt

SEQ ID NO: 13229 - DNA, 1617 bp, Unknown
  gut microbiota DNA sequence
agtgggagtcttctcgactgaggtaaaaaagaataactgtattgtagaagaaagatgaaaaggatacgaggtagaaacatggaatacatacatcattataaatctccgttgggaggcatcaccatggcaagtgacggcaaagcactgactggtttgtggtttgacggtcagaaatattttgccgtgactttatcaaaagagcatgaaaaaaaaatgttgccggtatttgaagcagcagaccgttggttagacatttattttcaaggaaaagaaccggattttctgccaccagtttcttttgcctgtggatcagaattccggcaggaagtgtggaaaattttactgtctattccgtatggaaaaaccatgacttatggagaaatcgcgacatgtatcgcgcaacagcgtggacttagcagaatgtcagcgcaggccgttggcggcgcagttggtcataatccgatttctattatcgtgccatgtcacagagtggttggagtggatgggagcttgaccgggtatgcgggtggtattgccagaaaagtcagtttgttgaaactggaacatgcggatatggagcagttttatgtaccgaaaaaaggaacggcgttataaaaaatgctttttctctattggtttcccgatgttaaaaagcgcatttttttgaacagggacatccgctggcagcaaaggagcgtattgatattcatgaactggagaatgagccttttatgctgttggaacatggtggaaaaacggaagtgacagaattgttggaaatgtatggtgttcatctcagtctgagatgagactcccacttctgcaagtggtgagtagtaacaagtatttctcagtgggagttcaatctccgactgagataaatgctccgcgagggcgcacattgtctggaagacaatggttttgcgccgaccggaacggagtgtagagtgcagtgattctgaaaagaagatgtcagcttgcgctgaccagaatcacgcaccaagtctcacgtgcgttcgacttgaatattttgtcaaattggcagaaatagtgtataataagtttcaagtgattcaaagaagggaaggtataaaacttatgaaaattgcagtaacatatgaaaacggaatggtatttcagcattttggacattcggaacagtttaaaatttatgaggtagaggatggaaagatcatcgcatcagaagtagttccaacaaatggacagggacatggcgcgctggcaggatttttaacaaaccaacaggtggaagtactgatctgtggcggcattggggcaggtgctcagactgcactggcaaatgttggaattaaattgtatggtggtgtatccggtctggcagacagtgcagtgagcgcatatctggcaggaaaactggattataatccggatatcatgtgttctcatcatggagagggacattcctgtggagaacatagctgcggtaatcattaaatgaaaagaaacttagctgtgaacaaacctatagagaagatattttgaaaaaaattaatgcggagaaatcctgaaaatgagcagtcagttgatggagatgtcaactgactgttttttcactttataggaaagttctccttt

SEQ ID NO: 13230 - DNA, 34769 bp, Unknown
  gut microbiota DNA sequence
gaagcggattgcgaatatccgcttgactttacggtaagtagaattcagtgatgcaatggcattggtcgtgtagattacctttctgaccgtcgcagagaacttaaaaattggagaaattgcatcccagttattggcagagaaacagatcagttacaaatccatttttggagcatatgtaatgcgtgcacagtatgaactggcatcctggaatcaggagcagaaatccgaagagaaagaaaatcagcagatgatccaggagacagtagaggattatatcgaacaggcgtaattatgataaaaataagtaaaaatcgtttcaatcctatgtaataagaagcatttttgctgaaacaaggttgacaaccggtaagcgaatacttataattgcattgttaaaaaatgttcaaaatgcaaaaactatgatgaagagagtacgctgactgggaacatcgcagagagccgggacggtggaaaccggtatcagtaccgttcagtggaaaatcacttctgagttgcagttctgaaaccttttatatgagagtaagagctgacggattttcctccgttacagggaactggtatccggcgcatctgccgcgtacttcgaacaggtggttaaaacgatttctaaaagctttcgtccttttcgggacgaaggctttttttgttacagaggaaaaactgtaatgtaaaagcgttcctgggagaatcataatactatttaaaacatgaaatgaggagaacagaatgtacgaaaaagtttcaacgaatctgaattttgtggatcgtgagaaaaagacagaagaattctggaaagaaaacgacattttccgcaaaagtatggaaaaccgcaaggaaggcgagacttatactttttatgacggaccgccgacagcaaatggtaaaccacatatcggacacgtgctgacacgtgttatcaaagatatgatcccgcgttaccagaccatgaaaggaaaaatggttccgagaaaagccggttgggatacccacggacttccggttgagctggaagtagagaaaatgcttggtctggatggaaaagagcagatcgaagagtatggtctggacccgtttatcaaaaaatgtaaagagtccgtatggaaatacaaaggtatgtgggaagatttctcaggaaccgttggtttctgggctgatatggataacccatatgttacctacgacaacaactttattgagtccgagtggtgggcattgaaaaaaatctgggacaaaggcctgttatacaaaggttttaaaatcgttccttactgcccgcgttgtggtactccgctgtcttcccatgaggtagcacagggatacaaagacgtcaaagaacgttccgcagtggttcgtttcaaagtaaaaggcgaggatgcatatttcctggcatggaccacaacaccgtggacactgccgtctaacgtggcactctgtgtaaacccggcagagacttatgtgaaagtaaaagctgctgacggatatacttattatatggcagaggcactgtgcgacactgttcttggcaaacttgccgatgaagaggctggcacaaaagcatacgaagtacttgaaacatacaaaggaaaagaccttgagtacaaagagtatgagccgttatttgactgcgctgtagatatttgtgagaaacagcacaaaaaaggctactatgtaacatgcgctgattacgtaacactgaccgatggtaccggtgtggttcacattgcacctgcatttggtgaggacgatgcacaggtaggacgtaagtacgaccttccgtttgttcagttagtaaacggcaaaggtgagatgacaaaagagacaccgtatgaaggtgtatttgtaaaaaaagcagatccgatggtattaaaagatctggaagaaaaaggtctgctctttgacgcaccgaaatttgagcatagctacccacactgctggagatgtgatactccgctgatctactatgcaagagaatcctggttcatcaaaatgacagcagtcaaagatgatctggttcgcaacaacgctaccgtaaactggattccggaatccatcggaaaaggacgtttcggtgactggctggagaacattcaggactggggtatttcccgtaaccgttactggggaactccgctgaacgtatggcagtgtgagtgtggtcatatggaatccatcggaagccgcgcagagctggctgagaagagcggagatccgaaggctgcagaagtagaacttcaccgtccgtatatcgatgctgtaaccatcaaatgcccgcactgtggtaaagatatgcaccgtgtaccggaagttatcgactgctggttcgattccggagcaatgccgtttgcacagcatcattatccatttgaaaataaagaagtatttgagcagcagttcccggctcagttcatttcagaggccgtagatcagacccgtggatggttctactccctgatggcagagtccacactgttattcaataaagcaccatatgagaacgttatcgttctgggtcatgttcaggatgaaaacggacagaagatgagtaaatccaaaggaaatgccgttgatccgtttgacgcactgcagaaatatggcgcagatgcgatccgctggtatttctacatcaactcagcgccatggctgccgaaccgtttccatggaaaagcagttatggaaggacagcgtaaattcatgggtactctgtggaatacttacgcattcttcgttctgtatgcaaacattgatgagtttgatgcgacaaaatacaaacttgagtatgataaattatccgttatggataaatggctgctctccaaactgaactctaccgtaaaagcagtagatgacaaccttggaaactacagaatcccggaagctgcaagagcactgcaggatttcgtggatgatatgagtaactggtatgtaagaagaagccgtgagcgtttctgggcaaaaggcatggagcaggataagatcaatgcgtatatgacactgtatactgcactggtaaccatctgcaagactgcagctccgatgatcccgttcatgacagaagatatttaccagaacctggtaagaagcattgacaaagatgctccggaaagtatccatctgtgtgacttcccggtagttgatgaggcaatgatcaatccggaacttgagaaaaacatggaagaggtactgaagatcgttgtacttggtcgtgcagcaagaaatggtgcaaatatcaaaaacagacagccaatcggcgatatgtatgtaaaagcaccgtttgaagtaccggaattcttcgttgagatcatcgaagatgagctgaatatcaagaaagtaagcttcatcgaggatgtcagcgcatatacaaattacagcttcaaaccacagcttcgtaccgttggaccaaaatatggtaaattccttggcaagatcaaagccgctctggaaaacatcgacgggcatgcagcaatggcacagctgaaaaaagaaggttccatcaccttatctgaagtggacgagaacatcgttctgacagaagaagacttactgatttccgtagctcagacagaaggctttgctaccgagacaggaaatgacatcactgttgtactgaatacaaaattaacaccggaactgattgaggaaggctttgtccgtgagatcatcagtaaggtacagacaatgcgtaaagaggcaggatttgaggtaatggataagatcgtcctttccttcaaagcagagaaaacaatctgtgatgtatttgcagcacacaaggagcagatccagagtgaagtacttgctgtagagatcaaagaaggcgcattagatggctaccagaaagagtggaatatcaacggtcacaaagttgagttaggagtggaaaaacagtaatgaaaaatattttatttgacaaaaaagaattcatcaaatgcgtaaaagaaaatgtaaagacactttaccgcaagaccatggcagaggcttccgagcaggaagtcttccaggcggtatcctatgcggtaaaagatgtcatcattgacaactggcttgctactcagcagacctttgacaaggaagatccgaaaatggtttattatatgtccatggagttcctgatgggtcgtgctcttggtaacaacctgatcaacctgaccgcatatcaggaagtaaaagaagcattggatgaacttggttttgatctgaacacgattgaggatcaggagccggatccggcacttggaaatggtggtctgggtcgtctggctgcatgctttatggaatctctggcaacactgggatatccggcatacggctgtggaatccgttaccgctacggtatgttcaaacagaaaatcaaagatggttatcaggtagaagtgccggataactggctgaaaaacggttatccgtttgagctgcgcagaccggagcattcttttgaagtcaaatttggcggctatgtacaggcagagccggctgagaatggacgtacaaaattcattcagaaaaattatcagtctgtactggcagttccgtacgacatgccgatcgttggttacaacaacaacatggtaaacactctgatgatctgggatgctgagccgatggagtgcttcgagctggattcctttgacaaaggtgattacagaaaagccgttgagcaggaaaaccttgcaagaaatctggtagaggttctgtacccgaacgacaaccatattcagggtaaagagctgcgtctgaaacagcagtacttcttcgtatctgcaagtgtacagcgtgccgtagcccgttataaaaaatatcatccggatatccacaaactttctgagaaagtaacgatccagatgaatgatacacatccgacggtagcagttgccgagctgatgagaatccttctggatgaggaaggtctgacatgggatgaggcatgggcaatcacaacaaaaacatgtgcatacaccaaccacaccatcatggcagaagctctggagaaatggccaatcgagattttctcccgcctgcttccgcgtatttaccagattgttgaagaaatcaaccgcagattccttctggaagtagaagaagaatatccgggaaatcagtataaaaaagataaaatggcaattatccatgacggacaggtaaaaatggcacatcttgcaatcgtagcaggatactctgtcaacggtgttgcccgtttgcatacagaaatcctgaaaaatcaggaactgaaagacttctacgagttatatccggagaaattcaataacaagacaaatggtatcacacagcgtcgtttcctgtatcatggaaatccgttacttgctgagtgggttacaaacaagatcggaaatgactggatcacaaacttaagtcatatggaaaaacttgctgtatacgtagatgatccgaaagcacagcaggaattcatgcagatcaaataccagaataaactgcgtctggcaaaatatatccaggagcacaacggtatcgaagtagatccgcgttccatctttgatgtacaagtaaaacgtctgcatgagtacaaacgtcagctgatgaacattctgcatgtcatgtatctgtacaacaagatcaaagagcatccggagatggagttctatccaagaacatttatctttggtgcaaaagcagctgcaggttacaaaaatgcaaaactgaccatcaaactgattaactccgtagcagatgtgatcaacaacgatgcaagcattgacaacaaactgaaagttgtatttattgaggattacaaagtatccaacgctgagtggatttttgcagcagctgatgtcagcgagcagatttctactgcaagtaaagaggcatccggaactggtaacatgaaattcatgttaaacggtgctgcaaccatcggtactatggacggtgcaaacgtagagatggctgaggaagtcggaaaagagaacatgtttatctttggtatgagttctgacgaagttatcgcacatgagcagaaccgtgattacaacccgatggatatctttaatcaggatcaggagatccgtcaggtactgatgcagctcatcaacggattctattccggaaacgatacagagctgttccgtgatctgtacaactcactgctgaatactcagtgcacacagtatgctgatacttacttctgcctgaaagacttccgttcttatgcagaagctcaggagcgcgtagaaaaagcttacagagatgagaaaggctgggcaaaacttgttatgctgaatgtggcccatgttggaaaattctcttctgacagaaccattcaggagtacgtagatgatatctggcatcttgacaaagtaaaagtaactgtaacagagcagtagaatcaagttgagcgtaggtgaaacttggcacgtgattctggtcagtgtaagctgacacattccacttagaatcactgtgcatcttaaatagggaggctgtctgctgtacacagagtgccccacccgatatagggattggggtattccgtgagggcaggcagtttttttgtgccccgaatcaggtatgcttttgctttttctccgtagagataaggatcgttgccacgcaaaatcccccattccatcaacagtgcacagcttccggtgacaaagggagctgccatggaagtaccgctttttgacgtataaccgccgccgggtgcagcagaaatgatattgacaccaggcgctgccagatccggtttgatgcggtgttccattcgggtaaaaccacgtccggaaaatggtgcataattgttgaatgcggcattataagcaccaactgaaatgactttggaagcggtagagggaatcgtgagggtggtgtcttccgttggatacagaaagccggtgccattgccgatcacggattgtcccggaaaccagaggtcatagccgccggcggtgatacggcggggattcagggttagttcccagagacctgcatcgatataacttccacgggggataaaatccagatagatttcctgactggtgctgtaagggcttggttttccgtaatacaccagaagttcggtcgttccgacggtaaagcgataggtgccaagccgctcctgaaatggtccgatgacggtgccgtttggatgccgcagagtgatttcgatttcgtcagagtaggatttccagagctgaaggtttagaccagattcgtagtcgctgacggaaaaaggaatggaagcaggggaaaattgccccgaagtaacagtcgcaggtgttctgggaatatccactgcaggtgccctgaaagtatctgaaacagacgttctggaattatttgtcagaaaagttccggaagtatgaattcgggaagtaccttcatttccggtgccggtgataatgcaggatttccagtaggaagacacattatcaaggtaagtttccaacagactggtaccatcatgggaaccataattattgccgaaacttaagttgactgccacgggcatctgtaacgtaaatgctttttgtagcacataatccactgcacgcattaattcggtagtgcggggaaaaccatccggatcgaaaatgccaagttttacgatcaaaagggaactctgcggagcaacaccgcggtattgatcacctgatgcacgtccgtttccggcggcaattccggcaacgtgtgtgccgtgaccggacagatcccggcttgggacaagttggtaacgttcctgggatgaaggagcttgcagggcttcgttgatttcagcttgtgtgaaaatacggtccaggctctgatcccaaagttcgatgatccgggtggtgccgtctgcgttgcagaaatccggatgtgcgtagtcaatgccagagtcgatgatggcgatgaggatgccagagccgaagaggttgtttcgttctggatttggctgctgagtggtttgcaaaggggtaatgcaggaggctgaccgaccggtgtttacggtaaaaaatagccgttttggtttttcaatatattcgatttccgggcgttccgataaggaatccaacagatttgcagggacagtcagaataccatagccgttcagtaatggtctgaccgtaatctgcggaaaaagttccagaagggtgtcaaagccaccggaggcttttgcaatgacttcccagttgcgggagatgttatcatatccaacatttagttctaaggatttttcacgttcttccgatgtggcatcgagagccagattcaggagattttctaatttttcattgttcatgagagtgaacctctttcttaaaaatttaggaatattattgttactctggtataaagtgcggattatgcagcaaataacatatttctataaatagaacaagtgtttatttttcgcacggcaatttatcttccattggtagagaaggggagaatttttactagattatattaaaatatgctgttctacataaagtggaagtggatttttcagtaattcaatgtatttgtaatatagcagagaaatatgagccagattatgatatcggaaaaatatatgagaaaatagaaaaataatatgtgaataagtattcatgtattgacgtatgaaaagaactatgataaattgaatttgaagttacaactaactaaaaaaggatcctgaaggcataggattcttttttactgactaatagttagcataaactaattaaaggaaatatagagatagatttagattaacagtgaaagaaattttgaataaaaaacggaaagacaactgacggattaccgcagacgtcatttggtatatgtgtttcagatgtacaatctgattccgaatctgacggtgcgggaaaatatcgaggttggtgcatatctgggagatgatctgcagaacgttttgacacagattcgtgcactgaaagaggcggatggcgcttatcagagtttttccgaattgaaggaaggacagagtggaagcgtacggtttatcattgaaacagatgaaatcagtaaataatgataagaaataatatgaaaaatagtgaactttgcagcagagtccactattttttgaatttatctcagtcgagaagactcccacttctgcaagtggtgagtaataacaagtctttctcagtgggagtacaatctccgactgagataaacgctccgcgggggcgcacattgtctgggagacaatggttttgcgccgaccggaacgaagtgtagatgtgcagtgattctgagaagaatatgtcagctttcgctgaccagaatcacgcaccaagtctcacgtgcgttcgacttgaagtagctttattaaaaacaattacagcaaattccgttggaattggtttgtaagtatttagaatatgtttgattttttgaagtgtagcatcgaataaatatgtttcggtattgttgtgtttctgaaaatgcaatgctatactgaaatcagcttaattacatgggggaatacttatatgaacataaaaattatagatgaaaaagaccaatttgcacagtgtgaaacgtttgaaatcacgcatcttttatggggaaccaaagcaattccaaaaacatatggaaaaatagcctgctggaaagatcatggttttctggtggaaatgacttgtgaagaagcagatccgcttcggacgtataccaaaatgaatgatccggtaagtctggacagcggaatggaagcatttttatccttgtgggcagatcgcacaccattgtatgtaaatgtggagatgaatgcaaacggggcaacgctgatgcagtatggaacagggcgtgcggatcgaacattttttacggaagaacagatcagaatttgccaaccgcaggcggtaatagaagaaaatcgctggaaaatcagtttctttttgccgttagaactgttggaagaaattggtggaacaattccacagacatccggtacaaagattgcctgcaatttttacaaagtgtgtgagggtgataatgctgagcagattcattatgccagctacacaccggtagatgtgccaaaaccggactttcatcgaccggaattcttttcaactgggatattgaaaaataatctgacgcagggtgaatgagcacgaaaaagccggggttgaaacgtgaagaaacagaatcttcttgcgaaaaaaatacttctatagtaaaatatatctgttcgcaatcgtggagattttcagtaaccatacaggctttgcctgtgtgcaggtaaatcgaaagagggataaagaatgaaaaaattatacaaatcagaggataacaaagtattgtgtggtgtatgcggcggtctgggagaattccttggcattgatccgaccatcgtcagattgatctgggtcgtacttgctctggcagcaggaagcggacttctgatctatattctggcagcaatcattatgccgcgcagaccattagactaagcagaataatcaaatctggaacattattaatctgagaaaatgatacttattttctaaagataaaaatgggcaggaaatgcataacaagaggatttaaattaaaaaatatgagcagtgaaaggacgaaagtcttttcgctgctctttgcgtttcagggaaaaccaagaaaaatgctaggatataaaaacgataaagccggattgaaacttaaagccgaatgcatatgaagattctggtcagtgtaagctgacacattttctcaaaatcactgtatagagctctaaagtatcgggtaaaaaaatgattagaagaataaaaaacagaaagagagaaacaagatgctggaattgaaaaatgtgtcttttgaagtatcagacgagaaagcacaaaaagagattatcagaggaatcaatctgaagattgatgacaacaaatttgtggtcattacaggaccaaacggcggtggtaaatccacccttgcaaaactgatcgttggtatagagaaaccaacctccggtcagattttattcaacggagaggacattacagaaaaaagtattacagagcgtgccaaaatgggtatcagctttgcttttcagcagccggtacgattcaaaggaatccaggtgctggatctgatccgtatggcagcaggtcgaagaatgagtgcggcagatgcctgtcagtatctgtccgaagtaggactttgtgcaaaggattatatcaaccgtgaggtaaatgcaagcctttccggtggtgagttaaaacgtatcgagatcgctacggtgctggcaagaggtacacagctttctgtatttgacgagccggaggctggtattgatctgtggagtttccagaacttgattcaggtatttgagcgcatgcaggagaaaacaaaagacggttccatcctgatcatttcccatcaggagcgtattttgaacattgcggatgaaatcgtagtgatctctgcaggacagatcgtaaatcacggaccgaaggaagaaattttgccacagttactgggaacatcttccgcagtcaatatgtgtgacaaatttaataagtaaaaatctatatagaggataaaatgctaacgttgatagttaaaaatattttatattagaaaagaaaaaggctaatggtgttagttgaaaaatatcttatttatagaaaagaaaaagactaatggtgttagttataaaaattaagattatggataaaaaactaatggagttagttgaaatttagttagtgtataaatagtggaaagaacgaggaatagatagatgatggatgagattcagaaaagacttctggcagaagttgctgatctgcacggtgttccagaaggcgcttacaatatccgtgcgaacggtcagatggctgccagaaatacaacagcaaatattgatattgtttcaaaaaccgatgtcagcggcatcgacatttacatcaaaccgggtacggtaaacgaaagtgtacacattccggttgtgttgagccagagcggtatgaaagagatggtttacaacgattttcatatcggagagggcagcgacgtagtcatcgtggcaggatgcggtattgacaactgtggcgatcaggatgcagagcatgatggcattcaccgtttctttatcgaaaaaaatgcgaaagtaaaatatgtggagaaacattacggcgcaggcgatggcaagggaaaacgtatcctgaatccggggacagaagtgtacatggaagaaggaagctacatggagatggaaatggtccagattaaaggtgtagattctaccgttcgtgatactaaggcagaactggcagcaggcgcaaaattagtggttcgtgagcgtctgatgacacatggagatcagaatgcagtcagcggatattcggtcagcttaaacggagaaggctccagtgcagatgttatttcacgttccgtagcaaaagacaattcctaccagaaatttgattccagaatcatcggaaatgcaccgtgcagcggtcatactgagtgtgatgcaatcatcatggataaagcaagaatccttgcaattccgcagctggaggcaaacgatctggatgcagcactcatccatgaggctgccattggaaaaattgccggtgagcagatcatcaaactgatgacgcttggtctgacagaggaagaagcagaggagcagatcgtcaacggattcctgagataaatagaggttttgtatttatatctgtacaagaaaacagtaatccactttttgcataacaaaaatggatgtacgtaatgtttttatataatattgttaaaaaatatacgaaatttgaaaagccccggtgttttgccggggttttttgatgcaaaatgtatatttgactttaaaaataggtctatttataatgaatttatacaaaagagacacaagtaatggtataatacgagtaaccggtcggaagtatgattacagatttttgacgcgcatatttatgtttttaggataggttttgtggtattcgatgcgctgggagaaagtattaactgtaaggtaaatttaaggaggacaagtatgaagattttaggtgtatcacttggaacaaagaacggaaacaatgacacaatgtgtcgtgtagctctggaagcagcaaaagcaaaaggtgcagagatcgaatttatccaccttcttgactgggatattcagtactgctcaggttgtgttgcctgttcccgtggccttgtaatgggcaaaggaatgatctgctcccgtcaggatgatttcaaagctttctatgagaaagttatcgaggctgatggtgttctgttcgtagatccgatcttcgagtctggtgcaacaggtttatatcattccatcacagaccgtatgggaccgggacatgatacaggtatgatgaaaatgcttgacggcaaactcaaagaggcaggcaaagagggtctgaacccaagatacttccgccagaaagctctttccttcgtaggaatcggtggatctgactgggcagttcgttgtgagacagaccatgctatgttcgctctgagcccaggatggaaagtagtaaacaatgagttcttctcttggtgtaaagacgttatcatgcaggatgacaaagttgagcgtatgaaagagatcggacgtaaccttgtagatgctgtacagcagatcatcgatgaggatatgcagatcgagggatctgagcatacatctctgtggaaaggtaaagaaggcgcttgcccacattgccagggtaacaacttctacatctacccgggtacaacacactgcgtatgtgagctgtgtggtcttgagggaacacttgagatcgttgacggagcattcaaattcaaatatgatccggctacagagcatcatgcacatgacatcctttctggaaaattcttacacggacaggatatctttgagaacgaaggtcgtctgatgaacctttacaaagatccggagttcaaaaaccgtaaagctcattacacagcagtatgtgagccgacaccagctccgtccaaacagaaataaaattattaattggataaagcaattaataaattattccgtgaggattgcagagctgaaaagaggaaattatcagcgttgctgatattcagtttgcagcaagagtcataaatgaatcttgaattcaatattggttgtaacaggcgggggcaatagcgctcccgtctgataaaatttaagaaaagagggtatttaaaatggcagatttcaaatttgaaccgatgagaagccttatttacgttgactgcgtaagcgaagattacagaccaaaacttcagagatggctttacaaaacacatattccggacagcatttcccagttcgagccgtatgtaacaaaatatgcattttatccatctttcccgattccgccacagggtgatcgtttcggatatgcaagaatgcagcttacagagcatcattggttagtaagcgaccttgatccgcgtctggagatcaaagcaatcgctgagacattcccgatggacgtacttgtatggcagggacagatcccggcagcagctcatacagacgctcagatcgattctgacggagatgctggaaatgcagcacgtaaatccaacaatgcagaaggaaatccgttcattttcgcattccttccaatgtggtgggagaaagaccttaaaggaaaaggacgtaccatcgaagatggcgcaaactatcgtttcaacatgactattggtttcccagaaggcgtagacaaagcagaaggcgagaaatggttatttgagaaagttgttccgatccttcaggcagctccggagtgtacacgtgtacttgcaagtgctgtaaagaaagacatcaacggatgtgttatggattgggtacttgagatctggttcgagaatcagtccggatggtacaaagtaatggttgatgatatgaaagcacttgagaaaccgtcatgggctcagcaggatgccttcccgttcctgaaaccataccacaatgtttgcagtgcagcagtagctgattatacaccaagcaataaccttgcaaactatcgtggatatattacaatgcgttaattttttgtaacatttacatagtgaaattactaaatttgcgcgtgcgaaagagtgtgtataggattgttacttttgtgcacgcgtgacatatgatgcgccgtaagtggataaaaataatatttatcacaacgtaaatgcgcctccaatttattttttctttacgagcgattgttagctggaaagacaaaataaattgggggcgctttcattactaaatttttattcgcgaaacaagcatcaagagctcatatcacgggatttctgcacgcaagctctttgtgcttcaatcaccgcgctgcgaaaaccggatttttccagctgtgctacagcttcaatggtcgttccacccggagagcataccgcgtctttgagttcccccggatgttttccggtttcaagcaccatttttgcagaaccaaggacggactgagccgcaaatttatacgcctgtgtccgaggcatgccgtctgccacagctgcgtctgccatcgcttcgataaacatgtagacgtaagccggggaagaaccgctgacaccgacaacggcatccatcagatattcgctgatgacttctgattcgccaaagctgttaaaaatagcctgaatttcagcaagttcatccttagtaatgccatcgttgcaacagatggcactcatggaagcaccaaccagtgccggggtatttggcattacgcgcaccagtttgatagaacgctcaaacatgtcttcaatgcgttccattggctgaccggcagcgatggaaacaataatggtatcatcagtgatggcatgacggatctccgggattactttatgaaacaggtttggttttacggcaaggaacagaatatctgctttttgtgcagcaattttgttatctgttccagcgtcaatgccaaaactttctttcaggcgaagcaccgttgcttcgtgtgcggcggtggcatagatatggtcacagtctgacagaccggaagagagcagaccgccgatgatggcagttgccatatttccaccaccgatgaaactgatcattttatcaatcataaattacaactcctttcaaaaattacagcatgatcataaattgtaagatcaaagaatcagagaaatcttatttttcagtaaacaggaaaataagattctggcagctgtatttttgttctataaaaattgttttataaaaataattgctttataaaaacagggatgccagaaatacaacattgtattggtggcacccccattttgttttatcgaaaaatcataagatcttcattcaaaaattgttcgatttagaaatctgtaaagtttttctctttacgtttctcaaggaaagctgtcattccttctgttttatcatgtgtagagcatgtcataccgaagaggtttgcttcgtactcaacagcgttcttgatatccatgtcataaccgttgttgatagcagcttttgcgatagcaacagcgtagcttgcgttgcgagcgatcttaccagctaatttcttagcagtagccatcagctcttcctgcggaacaactttgtttacaagaccgattctgtaagcttcagcagcatcaatgttctggcatgcaaagatcatttcttttgcacgtcccataccaaccagacgagcaagtctctgtgtaccaccgaatcccgggataattccaagaccgcactccggctgtccgaataatgcattttcagaagcgatacggatatcacaagccatggaaatctcacatccaccgcctaatgcaaaaccgtttacagctgcgattgtaacctgacgcatgttctgtaatttaaagaatggctcagaagctctcataccgaaagcacgtccctctgcggcagagaagttaaccatctcagagatgtctgcgcctgcaacgaatgatttctcaccagcacctgtaaggataacaactttgatgtcgtctcttccttcgatctctgtcagaacttcgtttaactctgtcagagtctcactgttcagtgcgtttaatgcctttggtctgttaatggtaagtacggcgattgggccttctacttctaaaagtaaattattcatttgaaatacctcctgttttggtaagttatgtaataccatttactaacaaatatgattatacaccatatttgttaaaaagaaaacaataaaactaagatttgccagtagaaaaagtataaaaaatctgttaaagtgctaaaagacattctttgtaaaggaaatttataaggaagattttctgttatataatgaacttatatagaaaaataataaaacaacagtaaaaaagattacatagataatacatgcgggattggaaaaattttgcatgatcatgataggagataaaacgaaatgctggaggattttgacttagaacagatcgtggagccattgcttggctggtttgaaaaaaatgcccggacactgccctggcgatcggtggcaacgccgtatcgggtgtgggtgtctgaaattatgctgcagcagaccagagtggaagcggtaaaaccgtattttgcccgttttatggaagcattgccgacagttcaggatctggcagagtgtgaggaagaacggctgctgaaactgtgggaaggtctgggatattataaccgggtgcgaaatatgcagatcgcggcacagacggtgatggaacaatacaacggagagcttccggcggattatgaaaaactgcgggaactgaaaggaattggaaattatacagcgggagccattgcttctattgcatatggaatcccggtgccggcggtggacggcaacgtattgcgaattttaatgcgtgtgtcagcggatgactctgatattatgaagcagtccgtgaaaacaaaagtggagcaggcactgttaaaagtgattccggcagaccgggcaggtagttttaatcaggcattgatggagcttggagcgattgtctgtgtgccaaacggagagccattgtgtggacaatgcccgtggcatgatttctgtgagacacgaaaaaaaggactctggcaggaacttccggtgaaaaagaaagcgaaagcaagacgaatcgaagaccgtaccgtacttgtgatccgtgacggagaacgtgtggtattgaaaaagcgtccgaaacggggacttttagcaggtttgtatgagttcccaaatgaacttggaaaactatcggaagatgaggcattacatgctgtgcaggagatgaaccttcatccgatgcggattcagaagctggaagatgcgaaacatatcttttcccatgtggaatggcggatgcaggggtatatggtggaagttgattcactgaccagggaagaagcgggacttttgtttgtggaagcggcacattcagaagaaaaatatccgataccggcggcatttgcggcatacacaaaatatatgaatatccgtcttggaaatgaacgatttgaagataagtagtgagtaataaagaggaagccgatgtgtgaacaccggctacatgaaaaagatttatgaaaagaaattgataatttcaaaattgtgttttgtaagatgttgttttgttctttatttatcttacaagtaagagtatagggaagaattgtgtctttcgtatgtggagagtatgttttttttgcaaataaaatgtgaacaaattatgaagtgtagaatggtaataaaaaatttagaaaaaacaagttaattttttcagaatcgtgatgtatactaaaaggaataacggaataatcattgtgtaaaaatagatgcggcttacgctgcaggagaaatgctgaaggggaaaatttgtatgaagctattaacatttacagtgccatgttataactctcagaattatatgtgtcgttgtgtagattcgctgctggtgggcggagaagatgtggagatcatcattgtggatgatggatctgtcgacgatactggaaaaattgcggatgaatatgcccgcaaatatccgtccattgttcgggtcattcatcaggaaaatggcgggcacggagcgggactgaatgccggattgaatcatgcaacgggtttgtattttaaagtggtagacagcgatgactggatagatgaggaaagttatcaccagattctggatacgttacataatctgtgttctgcaggctgcatgctggatatgatgatcagcaactttgtgtacgaaaaagaaggagcaagacacaagtccgcaacgcggtatcacaacattcttccacagggacaactgtttggatgggaagaaacgcggaactttaaaatcggaaagtatattttgatgcattcggttatttatcggacacagttattgcgtgactgtcatctggtacttccgaaacacaccttttatgtggataatttgttcgtatatgtgccattgccatatgtaaagaccatgtattatctggatgtggatttttatcgttattatatcggcagagatgatcagtccgtcaatgagaaaaatatgatcaaaaatatcgatcagcagatcaaagtcaacaaattgatggtagatgcgtatgatctgtggaagataccggatcgtcatctgcgccattatatgttgaattatctggaaatcattacggtaatttccacggtaatgctgttgaaatccggaacggaagaaaatctggagaaaaaacgggaactttggacatatatcaaaaatgcggatattcgcctgttccataaattgcgtaaccggattatggggcagacattaaatctgccgggaaaaggtggaagaaaattgtcattgaccatttataagatttcccagaaggtaataggattcaattaggttctttcttaatgtaggttattgaaggcgccagtcagcaatctttcctcggcaagcaattgttagctgcaaaggtaagattgctgactggcgctttcacagactaaattctatacatgatatttcgcagcactgagttcattgaacaccgtctgtttcatattgtacagcttatcagaaagatccacatacaccttagacggatttacaaaacgcatattctcatcccaaagtgttgctttctcctgtgtacagatctgctgaatttccataacacttggagaagtgtacacgcattttccttcttcgaaaatcggaaccagaagtttacgcatggtataagtgccaccggcaagacgggtacgtttccaggtttcgtttggatcaaacagcaccatatcttcgttttcatcaaatgtctcatctgacagacagatcagatctgcgcggatttttccggtttctttatcataaatacggtaaatttctttgttgccagggttggtcactttttctgtattttccgaaagtttgatcttcggtgtaaatttgccgtccacattgcggattgctgccagtttgtatacaccaccaaacgccgggcagtctctggaagtgatcaggcttgtaccaacaccccaggaagtgattttggctccctgaattttcagtgtttcgatcagatattcatccagatcgttggaagcggagatgatcgcatctggaaaaccggcttcatccagcatttttctgactttcttggaaagataagccagatcgccgctgtccatacggatgccataattgtgcagttccacaccggcttctttcatttcgcggaaaacgcggattgcattcggaataccggattttaaagtgtcataagtgtctaccagcaaaatgcaggcatccggatacaattctgcataagttttgaatgcagtgtactcatccggaaaactcatgatccagctatgtgcatgggtacctttgaccggaatgttgaaaatctgtccggcaagtacattggaagtaccacagcagccgccgatgacagcagcgcgggcaccgtaaataccggaatccggtccctgtgcacgacgcagaccaaattccatgacaccgtcattctgcgctgcgtagcagacgcgggctgctttggtagcaatcagactctgatggttcatgatatttaaaattgcggtttctaccagctgagcttccatgatcggagccacgactttgataaacggctcacgcgggaagattacagttccttccgggattgcataaatgctgccggaaaaacggaacgtgcttaagtattttaaaaagtcctcatcgaacatattcaggctctgcagataacggatatcatctgcggaaaactgaagatttttgatgtaatcaatgacctgctccagtccgcatgcaatggcataaccgccgccgcatggattttcgcggtaaaaagcatcaaaaacgactacatcctgattctgggatttgaaatatccctgcatcatcgttatttcgtataaatcggtgagtagtgtcagatttaatgatctcatagtatcagtatgaccatttcctggtcatttcctccctatccatattaaaaaataaaagcatttgctgccctttgtatacaaaacaatgcttttgacgcaaaaagcgctttttaacagtatactcttttttgagaaaacttccagttttttttctgtttctgggaagaaaaacatgttgacctgttagcgtagggtaatataatataagaaaataggcaaattagaactatattaaaatattaaaaatagcaaaaattggatgttcaatgaatgtttgagatatgagcaagtaacgttgatagattgtgaatgattacaaatatttgcctggttagggaacaaaatgaagataacaatagaaataaatggaaagacagaaacgtttgcaggaaactgggaaaaccgaacgcttttggaagcatttcaggagcttggcatcacacaggtgcatgcgccctgtggaggcattggaacctgcaaaaaatgtctggtgaacgtaaatggagaaaacgtgctgtcttgtcagacgatgtgtgaagatggcatgatggtcgtactggaagcagagcagaaagcagtgatcgcggaaacgggtgactgttacctttatccggcagatcagaccaatcgcctggtggcagcttgtgatattggaacgacgacggtggtctgtcatttgctggatggaaaaaccggcgtgcggcttggtacggtcagcgcaccgaatgcacaacgcagttttggggcagatgtgatttcgcgtattcaggcggcaaaaggctccggtttacggaaaatgcagtttgcgatcatgaatcagatcaatcagatgatcggtgaactgatgcaaaaagcaaaacaggtcggcaaagtggatttgctggcagtggcaggaaatactgtgatggagcatctgttttgcggattgtccccggaaagcatcggtgtcgtgccttttgagccgttgtcaaaatttggaaccatgatgcagggaagcagaatcggaattaacagatgtaattatgtatacatgatccctgcggtggcaggatatgtgggtggagatattgtggcggatctgatcgctgcaaaaatgcatacaatgaccagtcgtactttgctgctggatattggcacaaatggtgagatggtgcttggaactgtcggagattatgtgtgttgtgcgacggcagcaggaccggcttttgagggtgctgaaattgccatgggaatgccggctgctaccggtgcgatttcagaagtctgggcgaaaaatgaacagatttgcgtttctgtgattggtggcggaaagccaactggtatttgcggctctggtctgatcgatactttggcagtctgtatccagttaggattgatggatgagacgggacttttactttctgccagtgaagtgcccgaaccatggaaacgctatgtcggagaggatgaaaatggtgtctgcatctgtctgacggatgaggtgcgcgtgacacaggcggatgtgagaaaaatccaactggcaaaggctcctatcgcagctggaatccagattttgttacaggaaaaagactggaaaataaaggatattgatcaggtaattcttgcgggaggttttggaagctatatgcgaaaagaaagtgcggcagagatcggactgatcccgaaggagctggtaaagtgtacccattcggtgggaaatgccgccggtgagggcgcggtatctgcggcgttggcatcagaggcaagaacggagctggaacagttacagaaacaaatgcgatatgtggaattgtctacgcatgaggcattcagtgatatttttatccgggagatgtcatttacaaacagttatatgaggagtgaatagttacaaatgagaggaatgttatatggagtgggcgtcggaccgggtgatccggagctgatgactttgaaagcggtacgcatgatccgggaggctgatgtggtggcagttccgggagagcatgccaaagatacagtggcatatcagatcgcagtacaggcggtgccggagctggaaacaaaggaactgctggcgatttatatgccgatgacgcatgatcgggcaaaaatgcaggaaaaccatcaaaaaggtgcaaaactgttggaaaagatgctggatgccgggaagaaagtggtatttttgacgttgggtgatccgacgatctattccacgttttcctatttacagcggatcgtggaagcagatggctatgagaccggatgtgtcagcggaattccgtctttttgtgcaacggcagcgcggatcaatgagccattggtggaatggaatgaggcgttacatattgtaccggcagtgcatcgggcagagacagaaatcatcggtagcggaaattatgtgtttatgaagtccggcagaaagatcggaaaagtaaaggaattgctggcacagaccggaaaacaggtttttatggtagaaaactgcggcatggagaacgaacatgtttatcgcaagatcgaagaactgccggaggaagcaggatattattccctgatcattgcaaaagagcagaatgctggcaatgagaaaagtgatacaagggtaaattgttgtgacaaaagtagtagaaaaatggaagttgcaacggagcaaaatacagaggaaaaacggaatgattcaataaagtggagggcagatcagatgacagaagaaagaaaagtggatgctcagatgacagaagtggaaaaaacggaatatgagttagatgatctggtggaaggaacagaaaaagaattgctgctggtaagttttggtacaagctatctggatacattggaaaaaacgcttggagaaatctatcgctatatggaagaacagttccctgattatgtggtggaggatgcttttacaagccagatgatcattgaccgtctgcgaaaaagagatggaatttttgtttcctatgtggatgatgcggtaaaatatgcggcacagcataacgtacacaatctggtgcttcaaccaacccatttaatggcaggtctggaatatcaggatttactggatgcagtggaatcatatcgtcatttattggaaaacgtgacaatcggaaagccggtgctgagcgctgaggaggattttgactggatgatccggattttgacggatgaactgaacggatactgtgacggaaaaacagcaatttgtctgatgggacatggcagtgaagcgaaagcaaatgaagtgtatgatatgctgcaggagcgtttttgccagaaaggttatacggactatctggtgggaaccgtggaagcaaaaccggcactggcagatctggtgcaccgggtagaacagggcagttatgaacgcgtggtgcttgtaccgttgatgatggtagccggagaccatgccaataacgatatggcaggtgaggaggatgattcctggaaatcaacctttgaggctatgggaaaagaagtggttattttgatgcgtggtttgggtgaattaaaaggaattcaggaactgatcgcggatcatgccagagcggcaatgaaagaaattgacctgtaagatatggcaggatatgtgctatactgtagggcagaaatggaagaatgagaggatttatagagatggaattaaatgcaatgaaagaacgggaagaaatctgcgatgtatgtcataaaatgtggcagcgcggaatcgtggcagcaaatgacggaaatgtatctgtaaaactggaggacggtacctttttgtgcactccttccggtgtgagcaaagctgcaatgacaccggagatcctggtgcatctggcagcagacggcagcgtgatctcagcggcagagggatacaaaccttcttctgagatgaaaatgcattttcgctgttatgcagagcgggacgatgtgaaggcagttgtgcatgcacatccgccggttgcaacaagttatgcatctatgggacgtgcgctggatggttatcagaccatggaaaatattgtaaatctgggagcagttccggtagcaccgtatgcacagccgtctacggacgaagtgccggattccattgctccatttttacaggagcatgatgcaattttactggcacatcatggtgcactgacggttggagaaagtttgaccagagcatatttccgtatggaatcactggaaatgtttgcaaagacttctctgtatattcatctgcttggcggcgcaccggatatgccggaggacaaaattaatgcgctgatggatctgcgccagaacggatataagattccgggcagacatccgggttatgtaaaatacaacaaaccagaagaaaaatagtatataaagggttgaaaagagagcatgaacagcagacaattggagtattttcttgcggtagcgcatgaattgaattttacaaaggcggcagagtcgatgtacgtgtcacagacggcagttactcaacagatcaaagcgcttgaggaacagcttggcgtcagtctgtttgaacggacgaaaaagaaggttgtgctgactccggcgggaaacgtatttttgcaggaggcaacgctgctgctgaaacggatgcagactgcgattgagagaaccagagaagcatccagtggatttatcggttctctggatatcggtttttctattggaattggaaatacgggaatggcggaaaaaattcaggcattcaatgaaaaatacccgaatattgcaatgaaatttgtgaatcagagtccatccatgctgctcaaatctctgaaaaaaggagatttggatctggtgctgatgccgatgtttgaggagcgctactataaagatgtggttgtgcggaaaatcggtgaggaccgcatgaatgcggtatttccgcggacgcatattctggcgcagaagcagtatgtgacacgtcgggatttgaaagatgagaatctgatccttgcctgcacaccggacagtgagatcggagaagaaaaaaggatcattgaaaaattctggaaatgcggttatcatccgaatgtggtggcaaagatcgaagacgtggaaacaattttgctgatgctctccgcaaatatgggggtgtcgatcctaccggcatatatgacgattccgatgcagaccagagggcggctggcagcagttccttttggtggaccggaggatacgattgaaataattgcggcatggcggccggatgcggacaatccgtctctggagaagattttgccgtttctggaaacaacccagaatgtgcagggagaaacatcagaagaactgtaaaatatctgacaggaaacagggacaaaaagtctgtgaaatagtttgataggaatcagaggactgaaaaccttgtaatcaaaacaaacagatcagagaaacaaaaacttagtgatcagaacaggcagaatggtgtatatagtatgaaaaatggtctggaaaattattttgtgataaaagataataaaaaaatgcggtttggatacaccacgggaagcagcgcggcggctgcagctaaggcagcggcggaaatgcttttttcggggaaggatgttccggtagtggagttgctgacaccaaaagggattatgctgtatttggaagtgctggatgcaaaaggtggtcagagaacatgctcctgtgccattcaaaaggatggcggtgacgatccggatgcgacatcgggactgcggatctatgcgaaagtgacgttgtgcgaacggcaggaagcagaggcaatctgccagaagtttcaacagagtgaaaaatccgatttgaaagcagctgcttcggtaggtattactgccggagagggtgtggggatcgtgacacttccaggactggaacagttcatcggcgcccctgccatcaaccgggtgccaagagagatgatcacaaaagaagtacaggcggtttgtgaaaaatatcactatacggaaggggtagaagtgtgcatttcagttccaaacggagctgtggtggcagagaaaaccttcaatccgcggcttggcatcaaaggcggcatctcaattcttggaaccagtggcattgtggagccaatgagtgagcaggcgttgatctccagcattcaggtggaaatgaagcagaaatcagcgggagaccgaaagtacctgctgatcgctccgggcaattatggattgcagtatctgtccggaaattttacgtttgaggcagaagaagcggtaaaatgcagcaattatgtcggacagaccattgattttgcggtaaatatgggattaaaaggcgttttgtttgtggcacatatcggcaaatttatcaaggtggcaggcggcattatgaacacccattccagagaggcagacgcccggatggagatcatggctgcctgtgcgctgcgggcaggggcggatgcagatacggcaaaccggattcttgtggcagtaaccaccgatgagggattgagcattttaaaagagacgccatattgggcacagacgatgcagatcattacagaaaaagtggaatattatctgaatcatcgggcacaggggcgactggaaatcggtgcagtgctgtacagcaatgcgcatggagagcttgggagaacgtctctggtggaacaattgcttgagcaattgcaggaacagaaaagtaaagaagaataatggcaatagagatatgcaagttgaatatgtctgaaaactggtatgtgatacaggtcagtgcgatcggatatacttttgtgggactgtctgcatggtaaatatagaaagtgaaaaataggagaaatggcatggtttattttgttggagcgggaagcggtgcggtagatctgatcaccgtacgtggaaaaaatcttctggaacaggcagatgtgatcatttatgcgggatcactggtgaatccggaacttttggattataaaaaggagggatgcatggtttataacagtgcaaaaatgacactggaggatgttctggaagtgatggaaaaggcagaagcggaaggaaagatgacggttcggttacatacaggtgatccatgtatttacggcgcaattcgtgaacagatggatcggttggatgaaaaagggattgattatgagagctgtccgggagtcagcgctttttgcggtgcggcttccgcattgaatctggaatatactttgcctggcgtttctcaaagtgcgatcatcacccgcatggcgggacgcacaccggttccggaacgggagagtattgcttcttttgcggcgcatcaggcaaccatggttgtttttttgagtaccggattgctggaagaactttccagggagttgattgcaggcggttatacggcagagacaccggcagcgattgtatacaaggcaacctggaaggaagaagaaaaatatatttgcacggtggaaacactggcgcagaccgcgaaggagcacaacattacgaaaacggcgctgatgatcattggagaagcagttacccacagtaattatgccagatcggaactgtataacccaaatttttctaccgaatatcgcaaagcgaaaggtgaagacaaagcatgagtattgtcagaattatttcttttacagaagccggatatcaactgtcctgtaaaatgcaggattgcttgcaggaacgggcagaagttgttttatatagtggcaaaaatcaggtcgcagagcggcatgcggaagtttgtgcggtgtccgatggattgaaaaactggtgcagtgaagtttttgacaaatcagaggtattgatttttgtcggagcatgtgggattgcggtgcggacgatcgctccttttgtgaacagcaaatgtaccgatccggcagttctggtggcagatgagcagggaaaacatattatttcgctattgtccgggcatctgggcggtggaaatcagtggacattgtttttggcgcagaagctgcaggcagatccggtgatcacgacagcgtcggatgtgaatgaatatcttgcggtggatgtgtgggcgaagcagcagggatggcagattgcagatctgacgctggcaaagcatgcggcggcagcgattgtagccggagaaaaattgtcgttttatgcggaagatatgcagatacaaaacctgccaaaagaattaaatctgttctcatcgaaagaatcttttcagaaaatgatctcaaaaagggcaggagaaccgattgctggaatcgtagtttctgtgtacgatcactggcaaaaaaatgtgctgcggcttgtacccaaacgggtcattcttggcatcggatgtcgaaaagaaaaagatccggcagaagtggaaacacaggtacggcaggtgttggaaaactatcacgttgccgtggagagtattgcaaaactggtttccattgatttgaaagcagaggaagcaggaattttgcggctggcagaacgatgggggattccttttgaaacgttttcgacagaggaattgcagttggttccgggaacgtttgcagagtcggaatttgtgaaaaaaacgacaggagttggaaatgtgtgtgaacgcgcggcggtggcagcactgccagaggaagcacaaaggcaaccatgttggatctgtcataaacaggcagaaaatggtgtgacagtggcaatggtcgcattaccgttgtaatcaatagaggcgctcacactattaaatttttatctcagtcgagaagactcccacttctgcaagtggtgagtaataacaagtctttctcagtgggagtacaatctccgactgagataaacgctccgcgggggcgcacattgtctgggagacaatggttttgcgccgaccggaacgaagtgtagatgtgcagtgattctgagaagaatatgtcagctttcgctgaccagaatcacgcaccaagtctcacgtgcgttcgacttgaatgatggaaaggaaacaacattgaagaaaatatatgtagtaggaattggaccgggcgcttatgaacagatgacgatccgggcagcgaaagcactggaaagctgcgaagtcatcatcggatatacagtgtatgtggatctggtgcgggagcattttgcaggaaaagaatttttaaccacaccgatgaaacaggaagtggagcgttgccggatggcatttgagacagcaagtgcaggaaaaacaacagcaatgatctgcagcggagatgccggtgtgtatggcatgagtggtctgatgctggaaatcggagaagaatatccggaggtagaggtagaatgtgtaccgggggtgacagcagcaatcggtggagcatccgtgcttggcgcacctttgatccatgattttgcggtgatcagtctcagtgaccttctgacgccatgggaaaaaattgaaaaacgcctgctggcggcggcaggggcagattttgtcatctgtctgtacaacccgtccagcaaaaagcggtatgattatctacagaaagcctgtgatctaattctaaaatatcaaccggaaagtctggtctgcgcgacggtaagcaatattggcagagaaggcgaacagaagcagatttatacactgggagaacttcgaaatgcaaaagtggatatgtttaccaccgtatttatcggcaactcccagacaaaagaaatcaatggagcaatggtgacaccaagaggatatcggatatgaaaaaacatgcggaatacctgatttttgccggaacaagtgaaggacggaaactggcagaatttttgcaggaacatcagatctgtgcagaggtctgtgtggccaccgaatatggagaaaaattgcttgcggcaacggattatattcaggttcataccggcagaatgacggagccggagatggaaaactacatacaggaacgatccggagcgccttttcaggcagtaatcgatgccacgcatccacatgcggcggaagtgacgaaaaatattcggactgcctgtgaaaacaccgggatgcgttatgtgcgtctgttacgtgggcagattgatttatcagcattttcagatctggtgacatttccggattgtgaatcggcagcggagtggttggaaatgcaaaatggacggattttcctgacaacgggaatgaaggaattgccgatggtggcagaacggatttctgaccgggagcgcttgtatgcaagggtacttccgcaaccggaaatttttccgttggcagaagaactgggcttgagcaaaaagcagctgatctgtatgcagggaccattttcaaaggaattgaatgtggcaatgctgcgggaagtgcaggcaaagtttctgctgacaaaggaatccggcaatgcaggtggatttgcacagaaggcagaggcagcgaaagaagctggatcagtctgtgtggtcattcgccgtcctgtgcaggaacagggattttcactggaggagattcaggagaaaattttaagtgtgagggagaaacttttcagtcctaagaatgaggtgcaagaagctcaggggaaagaaagttgtcatgtagaagaagcagatacagaaaaaggcaatagtttgaatgtttcagaaacagttgaaaagttaagcagctgcaaaccggggaaaaaggcagcaacacgaagaaaagtaacgctgcttggtatcggaatgggtgcggcagaaaatatgacggtagagggcgttcgtgcctgcaatcaggcggactgcattatcggggcaaagcgtatgctgaacgctgtggaacaggttttagatacagaaaaaccaatggtatccatgtacctgagtcagcagattgtagagtatatccactcacatgaggaatatggcaatattgtgatcgcgctgtccggagatgtgggattttacagtggagcaaagaaactggtggatgcgctgccggaagttgaagtggaattgctttgtggcatttcaagtgcagtgtattttgcatcaaaactgcatacatcctgggacgatatgaaacttatgagtgtacatggacgcagggcaaatatcattgcggcattgagcagaaatgaaaaggtgtttacgctggcttccggagcagagagtattcgtcagcttgcggcagaactggtgacttatggatttggtcaggtgacaatgtcagtgggaacggatctcagttatccacaggaacagattacaacggcgacaccggaacagtttctggattatcagacagagggcgtcagtgtggcactgcttcagaaacagacaccggatgattttgtggtgacacatggcattacggacgaagcatttatcagaggaaaagtcccgatgaccaaggaggaagtgcgaagtatttccgtatcaaaaatgcagctttgccgggattctattgtgtatgatattggtgcgggaacaggttctgtttccatagaaatggcgaggatgataccggaaggatgcgtgtatgccatagaacaaaaggaagaagcggtggcattgatccggaaaaatcagaaaaagttccaagttccgaatgtgcagatcgtgcatggaaaagcaccggaggcaatgcagggactggaagtgccaacccatgcgtttttgggcggcaccggcggaaatatgcgggagattatcacaaaattgagggagttaaatcctcagatccgcattgtgatcaactgtatcgcactggaatcgctggcagagataacggtactgcttcaggaactggaaatcaaggatgcagagatcacagcggttacgatcgcaaaatcaaaactactgggacattatcatatgatgatggggcaaaatccggtgtatgtgattgcttttggcggcatttccgggcagaatgatatcagattggagatgactcccatctctataggtggtgagaaacaagctagtatcagtggtgggagtctcaactcaggctgagataaaagagattgataaaaagtagataggaatcagaatgggagggaaaaacgcatgaagataccacgtattatgctggcggcaccggcaagcggaagtggaaaaacgctgatcacctgtggtttgctgcaggcgttcaaaaacagaggggtacacccggtgtcttttaaatgtggaccggattatattgatccgctgtttcatacacaggtgcttggaattccttcccggaatcttgattcttattttactggtcgggaactgacgaaggcactgttttgtaaaaatgcggcgcaggcagatctggcagtaatggaaggcgttatgggattttatgacggtgtggcagggattacgacacaggcttcgtcatgggaactggcagatattacggacacaccggtaattctggtggtaaacatgcgcggaatgagccggtctgtggtggcgctgatccggggatttttgcagatggagaaaaagtcacatatctgtggcgtgatcttaaatcagacgtcagaggtgatgtgtgaggatttacgtccattgattgaggaaaattgtaaaattccagtgcttggatacgtgccgaaggtggcagaatgtgtcatcgagagccgacatctgggactggtgacaccgacagaaatgacagatctgcaggaacggattgaaaaactggcagaaattttggaaaaaacactggatctggataaaattttaacagtggcagcaggagcatccatgttgcaggaacaaaaaatggaagatttttatccggagctgcaggtagcgacagaggagaattgcaaagaaagcggaaaggaacagaatcagagtcagggggagcatccggttcgcatcggagttgccagagatgaagcgttttgtttttattatgaagataatctggatctgctaagagcaatgggagcacagatcgttcctttttccccattgcatgatgcaaaactgccggagaatttgcatggactgctgatcggcggcggttatccggaattgtatgcaaagcagctcagtgaaaatgagacaatgaaagagagttttcgcaggcagattgaggcaggcatgccatatctggcagaatgtggtggttttatgtatctgcatgagacgatggaggatatgaaaaaagagcgctggcagatggttggtgttttgccgggacatgcgttttataccggaaaactggggcgttttggttatgtggagctgacagcgcagaaagaacagattctgggagaagcgggagagacgattcgtgctcatgaatttcactattttgacagcagtgaaaacggtgatgcgtttcgggcgcaaaagccgcggcggaagcggggatgggattgtatgcaggcgtctgaaacgcatgcagcaggatttccacatttgtattattattccaatccggcatttgcggcaaattttgtgaaagcatgcagaaactgggaacaggaaattcaagtcg

SEQ ID NO: 13231 - DNA, 10610 bp, Unknown
  gut microbiota DNA sequence
aagaatcctgtgcttcgatgcattgatccagaaagacctgagcatcttttgcagcttgagcatccggcatggcaaccggattttgcctgatctgtgcagcatcaaagcggtttggatcaatggagaccggaccgatggcttttgtataagtaagaatggagatgcccatttcttttaacagttttgcggcaatggcgcctgcagcaacacgtccgatggtttcacgggcagaagaacgtccaccgccacggtaatcacggaaaccgtattttgcatcaaagcagtaatcggcgtgtcccggacgatagcagcgggcaatgtcactgtaatccttggaatgctgattttcatttcgtacgatcatggagatcggagtgcctgtggtgcgtccttcaaaaacaccggagagaatctccacccggtctgcttcggtacgcggggtggtgtatttggattgtcccggttttcgacggttaagataaatctgaatgtcttcttcggacagtggaagtccgcttgggcagccgtctactacgacgccgaccccttttccatgggattctccccatgtggtaatctgaaaaatagttcctgtatttgaaccagccataatgtttcctcctctggtataaaaaaacaatgtttattatttttgacacttaccttattatatgataaagttataaacagcgcaatgaaaaaggaaaggaactttttatgtataaattattaaaaaaagatggacgcgcgaagcgtgccgaagtgacaacggtgcatggaaccatccagacaccggtatttatgaatgtcggaaccgcagcagcgatcaaaggtgcggtatccacagatgatctgcagcagatcaagacacaggtgcagttatccaacacataccatctgcatgtccgtccgggtgacaaactgatcaaagaccttggcggtctgcatagatttatggtatgggacaaaccgattctgacggattccggcggattccaggtattttccctggcaggactgagaaaaatcaaagaggaaggcgtacatttccactctcatgtagatggacgtaaaattttcatgggaccggaagaaagtatgcagattcagtcgaatctgggatctaccattgccatggcatttgatgagtgcccacctgcactggcagacagaagttatgtacagccatcggtagaccgtaccacacgctggctggaacgctgtaaaaaagaaatgcagcgtctgaacagtctggaagatacgattaataaaaatcagatgctttttggtatcaatcagggggctatttatgatgatatccgtattgaccatgcaaaacgcatcagcgagatggatctggacggttacgcagtgggtggacttgccgttggtgagagccatgaggagatgtatcacattctggatgtgacagttccgcatcttccggaagacaaaccaacttacctgatgggcgttggtactccggcaaatattttggaagcagtagaccgcggggtagacttctttgactgtgtatatccgagccgaaacggacgtcatggacatgtttacaccaattttggaaaactgaacctgtttaaccagaagtttgagcgtgatatgcgcccaatcgaagagggatgtcagtgtccggcctgccgtacatacagcagagcttacattcgtcatttattgaaagcaaaagaaatgcttggtatgcgtctgtgtgtactgcataatctgtatttctataacacaatgatggaagaaatccgtgatgccattgatgcaggaaattatcagaattataaagctgagaaactgtaccgcatggaacatggggagtaagaaaaagttcacccgcgccattcgcaaaacacccgtactgggcttctctgtagttacactactatttttgctcataaaatggcgctcccttcatcactatatatcccattaattcctcatgcgagtatgattattaacggaatatatgtgatgagtgaactgaaaaaaataaaaaatatgcgaaatggcttgaagaaaagctacattttgtgtagaatatttaatagtattgaaaaataggaggaaatcaaatgaacgtattatcatccagtacaggaatgggtatgatgggaacaatcatctggattgttgttttacttgtattcgtatttgtatttatgctgagaccgcagaaaaaagagcaggcaagaagaaatgagatgatgtctaaaatggcagttggcgatactgttcttacaagcagcggcttttatggtacactgatcgatatcaatgaagataccgttattgtagagttcggcaacaacaaaaactgccgtattccgatgcagcgctctgcaatcgcacagattgaaaaagctgaagacgcagtagaagagtaaattgaaaaaagcaaagatcagacaaaggagggcggggcatggatatcaatcgatatcactgcccttcttttgtatatcagatgggagatgactcccaactctataggtggtgagaaacaagctagtatcagtggtgggagccaatcccccatctgatatagcctccggcaggagtacagaggtgcgcagttgaagtatgtcatgcaattgcatgacgcgcacctcgcaacaagaatgccggagcattcttgaatgtgagtgacgtcgaaaaatataaattttcaggcatcatatcagaaaatttgtttttgagaggagaaagagaatgaaatatcaggttggagtcattgccggagacggcattggtcctgagattgtagccgaggcacagaaagttttaaactgtgtggctgacaaattcggacatgaatttgagtacgaagatattttaatgggaggatgctccattgatgcgaccggagagccgctgacagatcatgccattgaacaggcactgcactctgatgcagttttaatgggatccattggcggaaatacaagtacttccccatggtataaacttccaccggagaaacgtccggaagccggattactgaaattacgtaagtctctgaacctatttgcaaacttaagaccggcttatctttatgaggaattaaaggaggcatgcccgttacgtgatgacatcatcggcacaggcttcgatatgatgatcatgcgtgagctgaccggaggactttactttggagcccgcaagaccagcgaggtagacggtgttgtgacagcggtagatacccttacatataccgagaacgagattcgcagaatcgccatcaaaggttttgatattgccatgaaacgccgcagaaaagtaacaagcgttgacaaggcaaacgtactggattcttccagactctggagaaaaatcgtagaggaagtagctaaggattatccggaagttacttatgaacatatgttagtagacaactgtgcaatgcagctggtaaaagatccgaaacagtttgacgttatcttaacagagaacatgttcggtgacattctttccgatgaggcaagtatggtaaccggttccatcggtatgctttccagcgcaagcctgaatgatacaaaattcggtctgtatgagccgagtggcggatctgcaccggatattgcaggacagggaattgcaaatccgatcgctactattttatccgcagcaatgatgcttcgttattcctttgatttggataaagaagctgatgcagtggaaaatgcggtaaaacaggtgttaaaagacggatatcgtaccatcgatatcatgccgcaggaagaagataagaaatctgccgtagaacaggttggaaccagtcgtatgggcgatctgatctgcgagagaatataaaaaaggagtatgtaaaaaaatgagaagtgacaatgttacaaaagggatgcagcaggcacctcacagatctttatttaatgcacttggttacaccaaggaagaattagacagaccgttagtaggtatcgtaagttcttataatgagatcgtaccgggtcatatgaacctggataaaatcgtagatgctgtaaaaatgggcgttgcaatggcaggtggaacaccgatcgtgttcccggcaatcgcagtttgtgatggtattgcaatgggacatacaggaatgaaatactctctggttacccgtgatctgatcgcagattccacagagtgtatggcaatggcacatcagttcgacgcactggttatggttccgaactgtgacaaaaacgtaccgggacttctgatggcagcagcaagactgaatatcccgactgtattcgtaagcggtggcccgatgctggctggtcacattcatggcaaaaagagaagtctttcttccatgtttgaagcagttggttcctacgcagcaggtactatgacagaggaagaggttagagagtacgaagaaaaagtatgcccgacctgtggatcctgttccggtatgtatacagcaaactccatgaactgtctgacagaggcaattggtatgggacttcctggaaacggaacaatcccggctgtatattctgagagaatcaaacttgcaaaacatgcaggtatggcagttatggaactgttaaagaaagatatccgtccgcgtgatatcatgacaaaagcagcattcatgaacgctttaactatggatatggcacttggatgttccacaaactccatgcttcaccttccggctatcgcacatgaggctggtgtggatatcgaccttgatatcgcaaacgcattaagtgagaagacaccaaacctttgccaccttgcaccggcaggtccgacttatatggaagacttaaacgaagcaggcggtgtatcagcagttatgactgagttaaataaaatcggtttgctggatacaagctgcatgacagttacaggaaaaacaatcgctgagaatattcagggggttgtaaataaaaatccggaagttatccgtccggttgagaatccgtacagcaagacaggcggaatcgccgtactgaaaggtaaccttgcaccggattccgcagttgtaaaacgttccgcagttgtaccggaaatgatggtacatgaaggaccggcaagagtatttgactgtgaggaagatgcaatcgcagctatcaaaggcggtaagatcgttgagggtgacgttgttgttatccgttacgagggaccgaaaggcggcccgggtatgcgtgagatgctgaacccgacatctgccatcgcaggtatgggacttggttcttctgtagctctgatcacagacggacgtttctccggagcttccagaggcgcttctatcggacacgtatcaccggaagcagcagttggcggcccgatcgcattcgtagaggaaggcgatatcatcaagatcaacattccggagaatactctgaatgtagatatctctgatgaagagatggcagcaagaaaagcaaaatggcagccgcgtgagccgaagatcacaacaggatatctggctcgttacgcttccatggttacatctggaaacacaggtgctattctgaaaacaaactaataagatgagatagaaaagaggaacaaaagcatatgcagttgacaggatcacagattgttatcgaatgtttgaaggagcagggcgtggatactgtatttggttatccgggcggagcgattttgaacgtttacgatgaactgtataaacatagcgatgaaattcaccatgtgcttacgtcccatgaacagggagcttcccatgcagcggatggatatgcccgctccaccggaaaagtcggtgtgtgtctggctacttccggaccgggtgcaaccaacctggtaaccggtatcgcaaccgcatacatggattctgttccagtagtggctattacctgtaacgtaggtgtgccgttgcttggaaaagacagctttcaggagattgatatcgcaggtatcacgacaccgatcacaaagcataattttattgtaaaagatgtcaataaactggctgatgtgatccgccgtgctttccggatcgcccagaccgggcgtccgggacctgtgctggtagatattccaaaagatgttaccgcagctacaacggaatttgaatttcagcagattccgccggtagcacgtaagattgacaaaatgacagaagcagatctggagcaggcagcagccatgatccgtgaagcgaaaaagccgtatatttttgtaggtggcggtgcagtcatttccggagccagcgaagaacttgcaaaatttgcaaatctggtagatgcgccggtatgtgattccctgatgggaaaaggtgcatttgacggaaccaatgatcgatacagcggaatgcttggtatgcatggtaccaaagcttccaattacggtgtaagcgaatgtgatctgctgattgcagttggcgttcgcttcagcgaccgtgttatcggtgacgcaaaacgctttgcaagcaacgcaaagattctgcagtttgatgtagatccggctgagatcaacaaaaacatccagacggatgccagcgtgatcggagatatcaaggaaatcctgaaacgtgtgaaccacctgttagagcagcaggagcacacagagtggatgcagcaaattcaagaatttaaggataaatatccgttaacttataaagaaaaaggattgtccggaccatttgtcatggaagagatttaccgtcagacaaagggtgaagcaattatcgttacagaggtaggacagcatcagatgtgggcggcacagtattataaatttgccaaaccgcgtacattactgacctccggtggtcttggcaccatgggatatggtcttggtgcagctatcggcgcacagatagcaaatccggagaaacaggttatcaacattgcaggtgacggatgtttccgcatgaatatgaacgagattgccacagcagtccgtcagcagcttccactgatccagattgtcatcaacaatgaagtacttggtatggtacatcagtggcagggattattttatgagaaacgttattccaacacgattttaaatgatggtgtggatttcgtaaaacttgctgaggctatgggagccacaggcatgcgcgcaaagacacaggaagagtttgccgaagaagtggcaaaagcgttggagatgaaaactccggtactgattgactgtgtcattgacagtgatgataatgtttggccgatggttgcaccgggtgcaccgatcagcgaagcatttgatgagtctgatctgaagaacagataaatgacgcatccgggtggcactgtacagggagagtaatctctttgccgcctggaaggtgttcataataaaaaaatcctgcaagacaggacaaatccaggaggtttcaaaatgagcagagtttacaatttctcggctggaccggcagtattaccggtagaagtgctgaaagaggcacaggaggagatgcttgattaccgtggatgcggtatgtccgttatggagatgagtcatcgctcctccatgtttcaggaaatcattgatgaggctgaagcagatttaagggatttattacatatcccggataactacaaagtattatttttacagggtggtggggcattacagttctccgcagttccaatgaacctgatgaaaaatggtgtggctgattatatcgtaacaggtcagtgggcaaagaaagcatatgaggaaggaaaaaaatacggaaaagcagtaaaaatcgcttcttctgaagatgagacatttacttatattccggattgttctgatcttccaatcgatgatgatgcagattatgtatacatttgccagaacaacaccatttacggaactgtatatcatgaactgccgaacaccaaaggaaaaactctggtagcagatgtatcttcctgcttcctgtccgagccgatggacgtagaaaaatacggtgtgatctggggcggcgttcagaaaaatatcggacctgccggcgtacagatcgtaatcattcgtgaggatctgatacgcgatgatctgccggattatgtaccgactctgatgaaatacaaaacacaggctgacaaaggttccatgtacaatacaccgccatgctacggcatttacatttgcggtaaagtattcaaatggatcaagagccttggcggtctggaagcaatgaagaaacgtaacgaggagaaagcagcaatcctgtatgatttccttgacaacagcaaactgttcaaaggtactgtccgcaaagaagatcgttccctgatgaacgttccgtttgtaacaggtgacaaagatctggatgcaaaattcgttgcagaagcaaaagcagcaggtctggagaacttaaaaggacacagaaccgttggcggtatgcgtgcttctatctacaatgcaatgccaaaagagggcgttatcgcattggttgagttcatgaagaaattcgaggctgagaacacaaagtaaatttgtgaatcatatttgagttttattgcgatatgagaatgacaatcgttacgattgattatttttaaaatgtaaaaagtgtgtgccgaaaggcaaaactgactgagaaggtgagatgtcccggtcagaaaaattgagttgaagaaaagaggaaacaaaaatggttcagtttcattgtttaaatccgatcgcagcgtgcggtctggaattattcccggatacctatgagaaaacagaggattttaatcaggcagaggttgcattagtgcgtagtgcggcaatgcatgatatggatcttccagaatcactgctggcagtagcccgtgcaggtgcaggcgttaacaatattccgctggagaaatgcgcagatcagggaatcgttgtattcaatacaccgggtgccaatgccaatggtgtaaaagagcttgtaatcgcaggaatgcttctggcaagccgtgatattacgggtggtatcgactgggtaaaagcgaataaagaagatgcaggaattgcaaaagctgccgagaaagcaaaaaaagcatttgcaggaactgaaatcaaaggaaaaaaacttggtgtcatcggacttggagccatcggtgtgcaggttgccaatgcggcggtagcactgggcatggatgtgcttggttacgatccgtatctgtccgtcaatgcagcatggaatgtttctacaaaagtaaaacatgtgatgtctgttgaggacatttataaagagtgtgattttatcacaattcatgtacctctcctggattctacaaaaagaatgatcagcaaagaagccatcgcaatgatgaaagagaacgtaatcgttctgaattttgcaagagatacacttgtagatgagcctgctatggtggaagcattaaaggcaggaaaagtacgcaaatatgtcgtagattttccgaatccgaccactgctggtgtggaaaattgtatcgtaattccacatcttggagcgtctactgcagaatctgaggataactgtgcagttatggcagtacgtgaagtgattgattatattgagaacggaaatattgcacattctgtaaattatccggattgtaacatgggtgtgtgcacagctgctgcaagaattgcaattttgcacaaaaacatcaaaaatatgatcggacagtattcatctgtacttggtgaggcaggtgccaatattgccgatatgaccaataagagccgcaatgactatgcttattcacttctggatctggatgcaccgatctcagcagaagttgtagaaaaactggctgcaattgacggtgtattaaaagttagagtgatcaaataagatcatgaaagtcggcgtgggaacagagagtacagctttgtttccacgcctttttactatacaaatattttgaaaaacatgtgagaatctttcttatatgctgataagcagataatatatgggactttttataacaaaaataattggcagattttcatgttgacaaaaaggagaaagtaagatggcagaaatcagaccatttgcatgtgtgcgcccatgcaaagagaaagcagcaaagattgctgcgttaccatacgatgtatataatcgaaaagaagcaaaagaagaagtactgagggaaccggaatcattcttgaaaattgaccgtgcagagacacaatttgacgattccgtggatacttatgcaccagaagtatatcagagagcgcatgacacattgtggaatatgatagaaaaaggtgatttcattcgtgacgataaaccatgctattatatctacgaactgaccatgaatggtcggacgcagacgggtatcacagcctgtgcgtcaattgatgattatgaaaataatgtaattaaaaaacatgaaaatacacgtgcggaaaaagaacaggatcgtatttgtcacgtagatatctgtgatgcgcagacaggaccgatttttctggcttatcgtgacgatgaccagattacggcaattgttgcaaaggtaaagaaacaggatccggaatatgattttacatcaccggatggagttcgccatcgtgtatgggtaattgctaaaactatagatatcagtgagattcagaaagcttttgcaggaattaatcagatttatattgcagacggtcatcatcgtgcggcttctgctgtgaaagtcggtgagaaacggagaaga
